United States Patent Application Publication US 2018/0305689 A1 - sequence listing, part 4

SEQ ID NO: 2121 - DNA, 4001 bp, Homo sapiens
acagactgaggatatagtaaggatcaaccaaactgcacttattattatatgttagaggaaaaaaatggcacatattaaatgcctgtgccacaaagtatttttcataccctatcttatttcattcccacagcaaccttgtgaagcaggtgccactactttgatcttatattgaagaaactaaggcccagagacatttaagtaacttgtccaacatcacagaggtagcagtgggcagagccagcatccagacatatctttctgagtctaaagcccacattagtttcagtggagggaagataaggtggacagatatgtcccaaatgtctgaaagcagtgtgaagtgctagaagagaaagattggaccagattcatgtgtagtttgggatgtgcattaaagatgtttaccacatgtataggacaaggcaggggagaaaccaaaacagaaaaagatggccagcaataaatatcatgctcctcaatgtccctttcagcaaataacacaatgaatagtaaagatgactcatattcatatttcagtccttgtgctaagagcctcccggtcaaataccccatactgtaatactgatgtattatttcctcatgtcctggaaaatgttctgaaacaaaaagaggaagttcagaaagctcacaggaaacttctgatctcctttacgcaaagaaggggaaacaacttctacgaggttagtctcttattttcatcattgacaccaggcacgttagaagacgattcaggtaaccagaacacagtagatgacttaatatcatcttatagagaaataaatgctacttcacaataacacaacaacaacgaattgtttcctggtattttccatcgtcacacagttcccccaggcttggacaactaggtctctgcattctccagtcaaggcccaggaaactttcatgctgttcatgtttttgattcatgcatccaggttatgttcttgtagaaaggtagtgcaaaaaaaaaaacgagggcaggggaggcctctaccagtgggatggaaagttctttttaagtgaggccctcacaccaagttctcccacctgaggccacaagtctgtgaacccagaaagatgctcaggtgaggctaagaatccggtcttggagaaagaaaactcaacaaagaagggatggctgagcgcactctggcagagcataaaatcattttgtctattcaaatttatgagcataaagagagtgagaggttctctactaacatatacatcctcgtgtgaacttttccaaagtagagctaagggcaaacagagctagcagatctcatagaaaactcattcctaagggactacctgtaaactcagaagtttctgtcttcacatgatcaaatgcacagtagagcccacctccgctcactcttccctccatttaaagcgctatgcccctcaccaccagcaactcacgcctagccactccacccctccccgtggcccctgaaaggcctcaggctccacagagccgcgggacccgcgggaacacccctcctctccctaccatccccattattcggcacacagccctgctctcccctggagccaacagtctgcagctccttcaatgcaggcgcgagcaggaggcaggaatggtgggaaaagaagctgtgccagctgcatgtttcagaatctccctccatatgcatttgccaaaggaacaaaaagaaaatcaatgccaggaaaagacaactgagatgaggatgcggtgggaccgcggctgactccgtgcctctgagcagcaaggggctggccaaccacgcgtccgagccacagatccaagtcgttaccttcaggatgcaggccatggcgctccgccggccctcctgccaccgagcagcgggcgcgcctgggtcaggggcagtcctgggggcaggctggaggctggtaccacggcaggacctctccagcccacattcccgcagatccaaataaggggaccgcggtgtaagctgcgccgccacagaccccgccccccgagccgcggccccgcccccgtccccatccactggcccgcggcccgcgcggccccgcccccgggtcacgtgccgtcctgggcgccggcgccggcggctcctcagtgcctgctacttctttctcttgttttcttctgtgaacctttcgcggctcgacgtgcgcagagtgcgctctgcagcaggcggggacctgggtcccgcggggggcagagtacggccttttcttctcggttccgtctcctctcacacatcagagaactcctttttacagacgtttcacactttgtcaaagttgagtgggtttggcatcgcccttctggagactttgggcacatcaaagggcttttcaaaagtagcaacgaagttctccctgggctgttcaaggattgagccttcactctgtgatgggcttatctaaaattaataatttaccgctaataagtgagcacaaatatcaacgaaagaaagacgtcatgaaccttacactctgtatggtatattttgtgtgtgtgtacatattttacatatacatgtatgtgtgtataatatataaattattgccttttcctggtacaagcttgtttatgaaattgtatatgcatgatatacagtatacagatacaggatgcacacatgtgtatattgtattatatatgtacatgttgattgtacagtatatgtttataaactgtgtatgtgtacatgataggactttgctcttccctgctccaagcaagagccggctaagagaagcagttatttctacaaggagagtaaacgcattgcagaagggagagagcattccgtgtacacacacagatttttaccacttggtctgtcagaaaaattttaaaagcggcccccaaatatctacccaaaagaagtttcacttgctagaagctccgtctagtttgcctccatggaatcaggaaaagcactgtgggctggtggtgtcatgagattggctcacaaaccacaaggcagaatccaggctttcaaggaatttggtattttcttgatgagaacatgcagaattcttagagagcaggagtaaccacaggaaggaggttgcagaagctgagcctgtggatgaactgcctgtcccatgggaagctcctgtcttcagtctccctggaataccacaccctgctcttcgacttcttcctcccgcccctccctcctctgccttacagatccggtgtgtttttagtaagaattctttgtttgggactatatactttaaaccgctgctttagctcatggtccttcataggccaggaaaattcagtatttcattcatttactcatcccttgattgattccacaaacttttttattgagccactactaaatggaagaataaactttattcaccttccactaagtggaggaaaaatctttattgaagacctttcagggataggagaatgactttcagaatatctaacatcaaggtgggctcacagttaagtgagaaagacaagaataagagatacatgatactataacatggaaagggccttagccaaattggaagcaaagatctcaggaaggagaaagagaaacacctgaccgtcccccagcccgacacccgtaaagggtctgtgctgaggaatattagtaaaaaaggaaggcctcttgcggttaagaggaaggcctccgtctcctgcatgtccctggcagaacagcagagcaaaggggtgagggtgggcagagcacatcgttctctctagaaagtctgtacatctggaaagagaaacagcaggccctagtgaacagccctgctaagtacttccctgctgggtgtccttgatcaagtttcttaacctctctttaatccttaccttatctaatattatctatcctcaagagaattaaatgagataataatgtttgcaaattgcatttacctcaatttctggcactatgagcactttttatatgatagctctttatgtaaagaaaaaaatcttccgctaaagacagacttgtggg

SEQ ID NO: 2122 - DNA, 4001 bp, Homo sapiens
actgtattaaaatatcttcagaatcagcaaacttgattaggattctcccagaggcttcacacactgaaaccagatatttattattccagggaaaggaggcccaattttaaaaaattcatcttattagttattagccaccccatgcagcagcttcccggaaggcagaggaagacaggctcacaatgatgagtttcaaaccaatggaagctgagtgtgtccctcaagtcttccatgcctgcctgggcaccactccccagggctgagagaattcagcccaaagcaatgcgctggagagatcagaggggaacgctggatcccgagcagtggccgcgggctggctgcgctcaccctccggttccgggtcagaggaacgctcaggctggtacccgcgccaaccccagtttcctcccaccaggcagcgactcggcggccaaacccgaggcttcaggaaccggacctccatccgcagctgcaattctggggatcagggagttctagttccagggccgatttctgctgggaaattaggctttggggtccacgcacctcacccctattttctacaaaactttgtgtctttctccaaataagaattcataccaagttggaactagcccaccctaccccagcgggtccactcccctccagccttcgaacggcacctactcacagcgcctcccagccccgggaaagggggaaggctcaggtgtgcgggatccccaggctgagtggcgagcgggctggcgggcatgctgtcaccttgtggtccgccactccgaggtatccgtccagtggccgcggtcccgcggggaccccggggcgctgctgggtgctgctctccgccgccggctgcgagctgccggtggccgacgcctgctgctgctgttgctgctgctgctgctgctgctgcgggggccgctccttctggccgccgaggctgctgtacactagcaacaagctggtgcacatggtggtgagcgctaaacacactgccagaccatggcgctgcgggcgggcgggagagagaagaggagagcggctgagcgcagacaccggaggagcgcgcccagcggggacaactgtgcggtggtcactctagtgggggagatttggggcggcctgggccccagccccgccgcacgcaactgggacagagaaagcaccgtcccctagcgtatcgcaagggatgctccgggcgcgtcgctgctttcggccgccgccgcccagatctctcggtagagggcaggtggtgtacggccccgggctgagggagggagcgcgccggggccgaggacaggggtgggtttgcactttggggaagggcccgtctggcgcagccaccccagccaagctgctggaattttgagtccttcacacccctcctttcctggggccctggatccttgcgatccttgcaagtttgaaatctaagaaaacgaagaaagtctgcaaaggtcccccctccccgtccctcttagtttttggcaggctgttgcttttgggcacccccatcccttgagcaatctgcccactcctccatcgctcctgcagctctccgccaccccctcggacctctcgccggagatctaggaggcgaggcaaccccgagttcccatcctggctctgggattccgagccaggcagagctggagaatcgggagggaacgcggagcgggtagaaagttgtccctttgtaacaggcgacctcgcggcccagggttaggcgtctcggagtctccacggtgcgtcccgtggaccctgagcccggggatccccctctttgcccggtggagttgccacaactgactcaccatcagggtcttcattttgggcacctcttttgtgcagaatcctcaggctcgcgcgtccggggccactttttcctggagggtttccatgatgggtaatggggcggaggcggctctgatttttgcccagcagccggccgcggcagatcgcgcgcgggagccgcgggacccgggaagcgcggctgttgcagagattagagacagaattaaaactgaaccggaccctcgtagtctctcagcgatctacacaactgccgcctgccgccgcctgctgggtcctaaagacctctacatccccttccccgcccccaaataataatcttttcagtagtgaaatttctggggagagagagttaaccgagccagtgtacccacttcttggtccgcgggcttatttatctttaaagaagtcatcaagtagtaaagaaggagaacctgattggattctgaacgtgatagccatgtgaaaatctgcaacctaaattttctgttttgcgatgttgataaaaacaaatcaacctcccaaatgtcaataactctatttatagcgtttgcgtttatgtacgtagcatagagaaatacatgatgaaattatttttcttaaaaaattatttattattccgtttttcaattgctcactttcttattttctcttctctcttaattttaattttactttatcagattcagttattctcatgcattctttagataatatttcatctcaattatttcatttattattttcattgaatattacaatttacatttctgcctgacctctgagtttcctagtgttcatctaaatgatcttaaagttttaaaaacattcagcacgtcacagctacatgattaacttgacctgtagattcttcctaatttggatgaagaatttctgtctgctagagataaaactgcatatggcttatttcataatcctaaggtatttggtgctttccgttggtctactgcactgacggcgatagtttcacattcaggacttcaattaaaattaaaaaaacataagtattgttttatgttgggaaagtcacatcaatagcttgttttaaggatgctgtctcctctgcattgaattacaaatggcatttgttaaatgtctaatttagctaaaaacatatttcttgtgaaattgctcagtgaaaatagttgtcttaatgtattacttaacatctcacctgtagcagtgtaatgttaaagattacattaagatggaaatgatcagcaggcctactgaaccatgggcacaataagagctttctcaaggccaaagaaggcattacaatccatttttaatcttccctaatctattgctggactgatgatacaacaggaactatttttatcttatgaggcatccttccatacttagtattaagaaagttaaaattattggtgcaataatgaatatcagtgcaacgtgtttgggagagggcaagaaagcacacgatttagcctttcaaggaaaagcaaaataggaagcactgtccaacattgccagccttgaaactatttattcagtttgtgctttaggcatgaatagtaccagttgttagggcaggaaaagcagcagccagaggagaatcttaccaggtcttggcaattctttattgtatggttgcacttgacactcaaattaatgaaacaaaggaccaacttgatgaatcactgcaagcagattatctgtgtttctccagggatccttttagatgctattagaagcagctcctgcatttttcaggattattccccctccatctagcaagttgcccagtgactgatgaaacagttctaatatattttgccatgccaaacagaggcatcatatctatgatttaagttcatggcagcatgttggacatctgttacactgtatgtctgaccaaattcattaagcttatgggtttttttttcccctcctgggatagcagttagctagttgctaaatctacttatgaaatggccagggtaaatttaaaaatgtaattcagagcttgatttgaaagatttcaaggtcttggcttttacatatttgattagattaatgcagccatttcaggcattctggcttgagagccaaatggacaagatagggtgagggaaacgagataaagaaaacaagtcatagaatttacttcaatttgatgatcattaatgattgccacttatttggtg

SEQ ID NO: 2123 - DNA, 4001 bp, Homo sapiens
aataaaaatctggccaggtaggatggctcactcccataatctcagagttttgggaggccaaggcaggaggatcactggtagccagaagttcaagaccagcctgggcaaataaaatagacccagtctctacgcaaaatttaaaactcagccagtcgtggtggtgcacgcctgcagtcccagctacttgggaggctgaggccagaggatcgcttaagcagaagagttcaaggctgcagtgatcttgccactacacttcagcctgggtgacaaagggagactctgtctgtctttctctctctcacacacacacacacacacacacacacacacacacacacgaaacgtaaaaaagaaaaatctatagtaatcaactattctcatctaaatgttgcatatggttaacgtagaaaaataaatgacaagtcaatcagtaacactgtgcatagaaaccaccgttaagcacttcattcacctgttacagagatgccaaattagctcttcagtttagcttattttagagtgctagttatatttgaacttgatacctatcctccaaaaaaaccaaaatatttccgaacattaactcacagtctttcatgtcatctctgaacaggaaaggggacatttgctgccttttgcttcagaaaaatcaaccaccatactgaatcatgtaatggaaatacttatatcttgttctgaggttgctgctcagatcttgagtgaaatataatcacatggtaaggggacctgggccctaaacacttcatcctgtctacagctaaagaatagtacagtatatgagaatccatcaggatcatcacttcttacatgtgttcgtattgtcagcacagaatacgtagcaagtgttctacagacgtcgaaagaactagcaaacccactgttgtttgtggcgctctcacttcctgtactattttattactcaagataagcctaaaagaacagacaaaactatcacgaaaacgatttcttaacagaactattttaaaacaagagaatcctcaattaaaatcatgccattttctttctctgaaatctttaaattacagatgtgctcatctttgttgcctggatatgagttctttcagctgggcagcgggagactcaaagtagtgacttttaagggatcctaccagaggtgggggagccaatataaattacgtatcctaatctgagacactcttctgtcctaatacctgaagcttatagcttgtcaggtggcttttccatggaaaaacgaggacataagagagagggcggaccttaagagttctacggaggagccggtaacggcagcaggcttgtcaatcaactgcaaggttgcagcccaaaagaaaaagaactcacttgatcgctcatcatcgactcctcagaggccctctaggactaccgagaatctcttgccctttggctcttgcccccgacatctctcctggccccccgccctgccccaggaggtctggtcctctcacccgctgccaaattctcacacagcctcaaagggatcctcagggcgtaaagcagccccagccccgccacgaaccacaacgaggccccagtccccgccagcccggcccgcagtcgctccctccagcctagcgtcgggtttaggccagggacagatgcaggagacgctccaacagctgcggcttcacccacgccgccacggtccgccatcttgccgctatcgcaggcgccaggagctgggaggggagaaggacaggaaaccgggagtcgggaatcctgggatagtggcggacctgaagttggcctctgtgaaggctgagtcctggggaaccgggaccgagaagatttcgaaggtggaggagcgtgtctcaagattggggctacctgttctttcgtggggcagggaaggggcggacagcagcgcctattctggaggaactggactgagatgtgaccccgaagtgttaccgcttccaaacgaaatgagggtcacctttcacaccgccccccccccggggttggaaaagccaccgatcgttccagctgccgagcagctcttaaagctttggattcggctgtcgtggagataacgggcaccagaaaaacttgtaggagtagcaacagctatttggtcggatggaggccagaagccaagaataatcgaaacacgctgccagcgcccattagatggatgggaaatgagtgtaactcattgggaaagatattagacttcaaatcacctaaggcaaaccctacttcctggggcgcgggcgcgggcgctggcgttaggagacgtcactcccgcgcataactgacatggggccctcttggtcggcgtttccgggcgggtccttccgacggccgccgcggtgattccatcactcggctttcttcccggcctgcctcgcgcccgtagccgggctgggccagaacagcccaagatggccgacttcgatgatcgtgtgtcggatgaggagaaggtaaggggtccgcctctctctcttacctcctcccccgacagggaactggggcccggcccggctgcgttgggagcctagcagtgtccccaggaaaaagaagcttcttggtccatgctgacatacgctctccgcagtcgggacgcttccctcttagggggctttcctctgcctcacggtggccccagttcctcgttcctcgactctccttttctctcaggcctgaggcacagcccaggggcctccctgcaagggaacagacgtttcctttattggatcgtgactgtggacttttttctgtaattttgcgagagggtggtggttatgttgcgacatatcaaaaagcagttattttaccgcctttagcagttggggctcaccccatccccccatttgtagatataattggggttagtttagggcgagtcacttcctggtcaggatggcctcttaacttcccttttgctcctccttcctcaggaagtgattttgctgtcacgactcttcgacaaggagaggtcccaaatgttgtccatctccctacacatgcactacttttctcctgtactgtcgcctgtctgattcgctataataaatctgtgagcctcagggcatttgcttcagaatttgaacaccagtctttccctatagacacatcccttttaacgataatttttgaaaattttgtttcttgttaacaaatctagaatagctgatggattttcttaacctccagaaaggttttctgtaacacataataaaccttatgttaacacgttcaagactgaacaaagcatcctgccttctttgatgctccactgtggagtctttgatcagttgaatttgtcagtgtgcattttgtatgctcatttcttgaaaagggtcttaaatacaagagcacattctaaggtggaataacttttcttctgacagttgcacagtttcataacagtttgtcaggcttttcagtaagtacatggttttagggcacgtagaacttagaatgacctcacaaggcaacttattggacaagaattatgacatttgtctcccactgtggctattagaaaatgtgtccccttgagtgctctgtaaatctacctgggtgtttttttcaataagaagttgggatgggaaggggactgttatgatccataagtcctctgtacggaataacttgatatatgtagatatggcatgccattttgaaatgtttaacaagccattgacaacagcgttagattttctcttatttggaaactgatcttcatacatgtttaagatttaggacaaaaacatttatgtataagcctatgctggaaatcgatctataataaattgttctaaggcaaatagttactattcaaataaaattaagcaaaaatcctgttacaatacaactaaacaatttttttttttttttgagacggagtctcgctcggctcactgcaacttccgcctccctggttcaaattattctcctgcctcagcttcccgagtagctgggattacaggcacccgccaccaagtccagctaat

SEQ ID NO: 2124 - DNA, 4001 bp, Homo sapiens
tgaaaatgctcttataccttgttcaagacagagaaaaacgtgcttctaataaaattgactaggccggacacggtagctcacgcctgtaatcccagcactttgggaggccgaggtgggtggatcacgaggtcaggagatcgagaccatcctggctaacacgatgaaaccccgtctctactaaaaatacaaaaaattagtggggtgtggtggcgggcacctgtagtgaacccgggaggcggagcttgcagcgagtggagatttcgtcactgccctccagcctgggcaacagagcgagactccgtctcaaaaaaaaaaaaaggtgactaaacagtccttcttagaaatatctggacttaaaaggtttaatgcagcttccacagaatgcaggctttaaatcctaaaacccttccttagtacttggttgtcatggataacagtattcacatggataactgtaactctacaaagtataaaaagtgccaattttttcttcattaaacagaagtgtcttaaaatgcgctatttgtgttttattcctttattcatttgggtgaaaagatggataatgttgatttcttattttaaaacaatatacataaggtactttcattctgtcagtgttgtacaagccactaaaggtaataaaactaaaaccacacaacatctacacctagcaaaacatattctcaggtaaagtcattatcgtgtacaatagaaacgttcaaatcatcctcaccccttcttccatataaattatctttccatacccaccaccttagttgctaacttcatcaactcaccagacttatggaaaagtccccataatgctgctagaagagtgtttccatataaatctgatcaaattattctcctgctttaaaagtcaatggctcatgtcaggggcggtggctcacgcttgtaatcccagcattttgggaggccgaggcgggtggatcacctgaagtcaggatttccagaccagcccgaccaacatggtgaaaccccgtctctactaaaaatacaaaaatcagccgagcgtggtggcgtttgcctgtaatcccagctactagggaggctgaggcaggagaatcgcttgaacccgggggacggaggttgcagtgagccgagatcactccacttcactccagcctgggccaaagagtgaaactgcgtctcaaaaataaacataaaaataaattttttttaaaaagccgatggctcttctttacatacagaataaaggatcttcacaatccagccccactctattattccaaccttaacccccccatccactcatcctacattccagtcaaactgaactacttgcagtgccccggtttcaatatctgcacaggatgcctcccttaacttggaatgccctagtaaacccccgccatccctcacaatccaactcgaatgtcacttcctctgtgaaaccttctcccagacaccgtggcgatggtactatactgtctgtactcacacgcatagcattctcgcactttgctgtttacactttacttccagtagtccatgaacttcaaacattaactgatcccttactacgtagcagagtgtgagccagaaattgtgaggaatgcaagagcgagcattcaaggtttcagtcctcaagaaattcccaccgtaaaaacaactttaaatggcacgttatcgactgcaaacctctttcacataccttagctcagatgatacccaaggatttcatggactgcttaatttctcccactagctccccttctcgtcatctgctccaggctcctggagggcggaacccactacagggctttgaatgttacccaccaaccttcccagggccccgctgccgcctctcaaggggaaaccaggagcacaaagctccacttaccgcaacttccgcggagctgaggtctgtttgcagggtaggagcgggagccggctccaaggagcgccaccgccgactccggccccgcctctgggacgttggggtcgcgggaactgaggcggcaaacacaagctcgcgaaactgaaggccgcgccacgcctgctgactggtcagaaacctcgccagtcagggagcgggggtggtgctagagagccgcgcacggtcgccgttacgtattggtgtgccgaccaatcagcgccccgcactggttccgcgctcgaccaatcccaagtcttcttggagaactgcgggcgccaccggcgctccaggatcaaggatccgaggatttaaacctttcatttcgtcaacggttaagttccggggcggggtaggctttccgcaagcgcaatggaaagcccagctaggtagacggaggagcgagtggcagatgaagccggaagtgctctataagatgatcattggtcggcgactggaagcggacacccgaagaacagtttccaaactctttacctgaaagcacaaaagacaagaaagttagagttattccagtttcttactttttaatttttattctaaaatgtacatttttaatttttcctttttgtgatcacttatcctcaacttctagatttcttccagtttctttcctaggaagccatctgttttagtgacataattttttttttttttgaggtggaatctcactccgtcgcccaagctggagtgcgatgacgcgatatcggctcaccgcaacctcgcctcccgagttcaagcgattctcctgtctcagcttcccaattagctggtattacaggcgtccaccacccaccaccacgcccggctaattttttttttttttgaaacggagtctcgctctgtcgcccaggctggagtgcagtggcgcgatctcggctcactgcaagctccgcctcctgggttcatgccagtctcctgcctcagcctcccgagtagctggaactacaggcgcccaccacgcccggctaattttttgtatttttagtagagacggggtttcaccgtgttagccaggatggtctcgatctcctgacctcgtgatccgtccacctcggcctcccaaagtgctgggattacaggcgtgagccactgcgcccggcctaatttttgtattttttagtagagacggggtttcaccacgttggctaggctggtctcgaactcttgacctcaggtgatctacccgcctcggcctcccaaagtgctgggattacaggcgtgagccaccactctgggccaaaatttgtatttattaattgattgattgattgattgattgagacagggtcttgctctgtcgcccaggctggagtgctgtgacgctatctcggctcactgcaactcactgcacactgccttccaggttcaagcaattctcctgcctcagcctccggagtagctggggttacagacaagcaccaccacggccggctagtttttgtatttttagtagagaccaggtttcaccatgttgggcactgggctgatctggaactcctgacctcaagtgatctgcccacctcggcctccgaaactgctgggattacagaagtgagccaccgcccccagcaaagtaacataaaaattttaaattcctgttgagtagaagaaaagaatgtgacttaaatttataaaccatatatgcctatctctacaactagcattgatattatatatagtattgatattttatgtatttatatacagtcagccctctatcagtgggttccatattcacagattcagccaaccgcaaatggaaatattcggaggggaaaaaaacaaaataacaacaataaaaataatacaaatccagtctgggcaacatggcaaaaccccatctctacaaaaaatacaaaaaaattgccaggcatggtgtcatgtgcctgtagtcctactacttgggaggctgaggtgggaggacggcttgagccggggaggcagaggttgcagtgaactgagattgtgccattgcactccagactgggtgacagatcaagaccctgcctcaaaaataataatacaaataagacacacatgttgggtgcggtagctcctg

SEQ ID NO: 2125 - DNA, 4001 bp, Homo sapiens
tcccgtccccaccccacccccaaggctgagctcacagctttctccctttctccactgggctcccacagtactctcttgctgctgctattagcttcttcttcttcttttttttttttttttgagacagagtctcactctgttactcaggctggagtgcactggcttgatctcggctcactgcaacctctgcctcataggttcaagcaattctcctgcctcagcctcccgagtagctgggattacaggcctgtgccaccatgcccagctaatttttctattttcagtagagatggggtttcaccatgttagccaggctggtctcgaactcctgacctcaggtgatccgcccgcctcggcttcccaaagtgttgggattacaggcatgagccacggcgcccagccactactagcttctttagaccacatttcaaccatttgtttacaggtcaatttcccttaattagactgtatgctccttgaaataaaaatagataacatttattgaattcttattacgtggcaaacatggttgtatgttttacatgttaactttttactcttcataatatctctctctgttatcatccttgttttatagacgaagacactgaggcacagggagactaagcaatgtgcccaggtacacacagctggaaagttgctgagccagaatttgaactcaggaagtctggctccaaagcctactcttaaccactatgctgtctagcacttgcctctaggcaaggactcttgttgtggtcatgtgagaaatgaatgaatgaatgaatgaggactgtctagattaacccaaccaacaacttgcacagcacggccattaggaagcactaaaggagctcacaggcactgtttacaaacaagattattttggccctacaattacacattctgctcttccttatctcacgcaaaactactcaaagagggaaaggcgcccagcccagtatgcctaccctcttccccactggttctcaaaaccaaagcaaagccaaccggtttcctccagtgacttaaaacagagcaaagtctatcctgccacacagagggcggctgtcatctcttccttccgctaacaaaagggcttcaaacctggggattggggtgggcagaaaactcggcatcaggaatccgaatgtccctacctaactggctggaaggcggggccaagtggcgtgggaatgggcgggcctgaccggctcggcaggtgaaacactgaccacagcaagctctccttggaaaaggccggccaaacgtggccttggcaagcaggtagctgtgactcgtacctgaacgccgcccgggatatgaaaattccccagcagcggtagcgcccgtgccagagtgagggctcttggaggaagccctggctggccctccctggggactcgttctaactatcaagtcaccctcgggattaggagggaaacacggagaggcagaaggtgtctttttggaaagatctggctggattcacacgccggttgcttcactcactggctgggtgactctaggcaaagctggcagtgcccacttcccagagctgcggcggggactgaagctcccgcggcctcccggtacccggcgcgaggcagccctcgcccctgccgccggggaagggcagagccccagcggaggagggggcattcgccggggccatttctgctgcactcagatggcttcaggctgtcactccgattccaccgccgcggccgccggggcccgccccgcctacccgcaacccccacccggctccccgctcctggacccctgccctcaccttcgccgggtggtcagagctattcgcccatagtccgtagcccagagccggggctgctcggctctccctcccggggggccggggccgggctggaggcgtgcgagcctctcaccgccgcctcccagcgcagccacccgagccgccgccgccgccgccgccgcctccctccatggctgcggcgccgccacctgacaacggaagtgacgcaccgcccccctcctccccagccttagccgcggccccgcccccccgggccccgccctccgcctgcgtctccagccccacggctttcggattggggcgccatcttgacgatgggcggaagacttcaggcaagaggccagagtccgattgaggattggttcagggtggggtctgggcgaaacctgttacacgattggaggccgaggctctaatggggcggtacttactgctgatctatatctgcggcgaggctgggacggaggcaccgccccgcccgaccccacagaacctcgcgggccctacactccccctgccgaggttgaagtccccagcggttggaagatcggccaattgtagtgtatttatcagaaaagtgactcatccttgatcctcatttcccggtttgtggaactctgtgaggaaagccctgcagttaggctcaataaaagacagaaattcctgtcgcagcgctcataattcatttccctctaggtctgtcgcctttgtagaaaccccgaggatggcaaccttcaacctggagatccctgaagccttgaccagggaggtttacagtgaagcgttcctattagcgactacagctatctaacctcagttcctcctgctgcagtttcggtccctttctcctcctcctccagcaaccacgccctccatgaatcagcttcttgcaccagcagatgagccctttaaagggattgcatcaggcaagtgactcactggggccctctaagagcctggcttccctcccttggcatgcagaagcagctagaagggctcagtggcagcagcaccagcggccgtagccccactcccttgtcccagaggtgtgagtcagggtgtttgctgcttatgatgtctaactcttggctgtctttccagctgtcccctgggtcactctatatccatgtgtgggcacacgtgtctaagcttgtgtgcactgctgggttttcctagggtgtgtggccacttgtgtgtatgtgcatttgtcatctccacataggcagtgccaggacacaagagctgatatgagtgaagtctggctgcctctacctgtgtcctttgtctctgaatgcctggtgcccactgagctgctgatagggctgactaacaagagtaatcaggacagctcccaccgttgtgccacactctgcatggagcacttgagacagtattaggtaggaggctgtttacagctgaggaagccagtgctcagagaaggaaattaatgtgcccaaacacacacagctaataatggcagggctaggattcaaatcaagtctgatggattccaaaaaacttggctttgaatccctgctgcatcacttacaagctgggtgactatgtgcaaattgcccaatcttccccttctgtccaaacagggataacgcttgggggatcactgtgaggactcggagttatagaaacagctttttgcaagacccagcgagcactcatactcatctcagttgaagggcttcaatgaggtgggtgaccaaaagacaggcataaagaaggccccagcccagcaagctccactctctgacaaaacaaaaagcctagggattccggaagccctgactctgacaaaaatgagttctgggttttccagagctctaattatcagctagatgaatcactctgcgctgacaccaccattcctacccccaggagactctcagctgattgaaaatccaggattttaacaaaggagaggaggaggaacagaaagctaggaggagaagaagtaatgaatagaaaccaaaggtgccagccagaggaaatgagaaactgtcatcaggacactaccatgaggagaacgctgggacacacacacacacacacacacacactcacactcacgctgacatactcttgctggctctccaactctaggcttacggcagacggtgctgccataacaaagtgacgcctgtcacaacagcatgagatggtggcttgacaaggtataggcagatctgcctat

SEQ ID NO: 2126 - DNA, 4001 bp, Homo sapiens
aaaattttttttgattaggtgggtgtggtggcccatgtcgatagtcccagatgctatggaggctgaggtgggagaatcgcttgagcccacttgagctccagaagtcaaggctgcaatgagctataattaagccactgcactccagcctgggcaacaaggtgagaccctgtctcaaaaaaaataaaaaccatctcccagaaaaacaaagctcaacatttttggattaataaatactgttttgagacatcagtatctgacaatcgctttcataaacaaaagacttgtgcaaactccacaattttgcttcagactaagccaaactgtccaataaacaattacgagctctcggcacattcaagtgataatcatttttaaattcttctcctattcataaaataggttttggtaagaccaaaacataagtgccaaatcaaaggcgaagacctgagccatctcaatctaaaatcataagcccattacaatttcagattttccaaatagattacctaccagaagaagccatggtgaatagaagacaagcgacaggcagtgtattctgcacaatcaactgggataaggaaagtcctgaaaatgattttcaaaaacatgcaatcactttctttgcctttctatatgtcatcaacccaaaaaaatctcacatcacatctacatacatcgtcagaaaaatacgtggaataaagacgtctaaattaaccacgaaaaaaattatcaaaatctactaaataaacattgggaaatatgacctgaatatgatattggttccagaaaatcaagttaactgagctttctcggtcataaaactcttggatttttaaaatcagacaaagtcacaagggtgaagaatttttcccccataaactctttaacatttcaccgaaactgtaagaagatattccagattcaactcaacagtgcccccggagccatcttaatactgcctacaactcattgtgcaaatgaaatacccacccctgctttgtctgtgtctgacgtggtggataagaaaacgcccaagctaatagtaaccaataatgttgaactcctattgtccctcaggtttaagcttccttgcccaacagcaagcaaaatgtttatgaacctctagattttgacttatatttgctgccgttatgtcatgaaaaatgctgtatctcttgttgatctttttaacattatgacttttgtagacgccagctagtaccaaaaacgtaggatgacaggttcccaaaagctaggaattaaaatcagaggcagcgacaagatttaagaaaagcagagaattagacgcagcaccggacccaggatgggcgtggccctggtccgggcgaggaaaagaggaccggtcgcccccggccaatcagagcacgccttgcgctccggcccctggccccgcccccttcctccccgcgccttttcgaatctccccgaactcaacaccccggagcccgcgcgcgtgggaaggggaggggtgggcggggctaacggtccaatccgggtaactccgcccctgcctgactccccctgcgcggacgccccccccaactcccgccaaaaacacctccaggccgccgccaccacccccttcacagttcagcgggtggggcaggccccgggaacaggcccccgggtggtcccgcggtgagctcgccaccgcctcccgccgtccccatgcccaacctgccgccacccacgctgtccgcgcgtccggccgcgaagacagaagaaccctcgtggggcccgggagcgccgcccctcaatcaccagctgcggtcgccaggggacggtcgcagggagggtcgcggccctggctgcccgcagtttggtcctaaagccgctggtccctggggcaccgccccgtcccttcagacaatggggaacccggcggggcccgcagggaagggagggagggagggaggtaaacgagggcccacgccccctattgtctcctcgacggcaccccggagcggacgcccggtgatcgcccagccccctgcccacgaacagccgcgcccccggagagcggggacaaaggcgaggctccgcccgagccacacacaaagcggagcgacccccgcccaccaacccctccgaggcccgcagccccgcccgccgccctgcagcagggggtcgctgccacggcccagcccctcccgccgaccgcgtccctcttgctggcctcagccagccgccgcctcctccgagccccgcacccacctgctcagtccgagccgcctgaccacactctgagcaccaacagacccgggcgcgcacaaaagcgccaaacagaggcacgtgacctccgcgcggggctccgcattggccgagagcggcggcacgtgccgcccccgccccccacaacccgcgtggagcgccgccccccgggaccccgaagcacctcgggaagtgtagtcctgtcccggagggcaggaggacaatgccgggggttgcagggcgcctggggagcatccccaggtgtgggcctgggactaggggggtggtctcgccgtggaagagggcgtggcagtggaccccggactaggtccgaaccagctccccattctcgagaacaagggcagggcggagcaggcggagggcgggggggtccttccctacctttccaaactttggccgcctggactccaccttgtagagccacatgcccgcctcgccccaagggcagcactcggacagagcagtgccccttctagtgcgccacccacatgggtgcctaagacgcccgagcccctgtgacagcacaatgccactccacgcccctgcagggccccctgcccccggcaccctacaccgacaccggcgtgtcacccatattgtgacatcatcgtaatttctaatccactcagcccacaggtcgcgggcgtggcccttccctcactgtgtgcgttcttgccagcatcctcaggttcccgagccggtgaccagggacctgtgcgggaaagcgtggggctctggaatttgatcgcctttggtctaacaaagccactcagcttaaatgcagactccatctgttcttccaagccttctgcggatgataggggaggaagagcaatagccgttctagactacacagattgcagttaagtgttgcttttgttctcagagcacgtgctccccagagcagcactgggttctttttaaaaatcgaaaaaggagccacaaggtcactgttctccctgacctggatagctcagaacctcagcaaaggcacaaaggaaattggtctgaccgtgccttagaataactggccctttctctcacaaaaaggggaaaaaaataaatgaaatgaacatggtccccgcctcctcccattctctgaccaagaccgtgtcctcggttggtggtcaatacaccaagacacctgctttgagatcttgactaagcagaagagatatctttattttattaatgagctgcatctccccaaatcaagaaacaaatgtgaccaaccttcctgaaacaacagtcctaatttagaaagactctcatgcctagttagtcaccagggatgtgccagagataaaatacaactaaggggtgcccaagacaataaaaactggatcatacaagcagcagcacactacacaaagcaaacaattagcaatgcgctgttgcctgaaatatgcttgttgcggcattttttccaacaatcgcccttgtgtggggtcggcctcccccccaagccaatcgaagtggttttcacttagcctgtgagcaggaccaggaataattcagatactgagccttgaaaggcttcttctcagaccaaacttagcttcaaaatggctaggtgcttccgtctgtcatttttctgaacagaatctcagacatcattagaaaagttggagaaggatgggcatgagacccctcaggaaagcgacagataggcaggcaacacaaatgagcaaggaacccaagcccaagaggtccttacccactgaacaggctttttatcttgaagtctt

SEQ ID NO: 2127 - DNA, 4001 bp, Homo sapiens
aattatcaaaatctactaaataaacattgggaaatatgacctgaatatgatattggttccagaaaatcaagttaactgagctttctcggtcataaaactcttggatttttaaaatcagacaaagtcacaagggtgaagaatttttcccccataaactctttaacatttcaccgaaactgtaagaagatattccagattcaactcaacagtgcccccggagccatcttaatactgcctacaactcattgtgcaaatgaaatacccacccctgctttgtctgtgtctgacgtggtggataagaaaacgcccaagctaatagtaaccaataatgttgaactcctattgtccctcaggtttaagcttccttgcccaacagcaagcaaaatgtttatgaacctctagattttgacttatatttgctgccgttatgtcatgaaaaatgctgtatctcttgttgatctttttaacattatgacttttgtagacgccagctagtaccaaaaacgtaggatgacaggttcccaaaagctaggaattaaaatcagaggcagcgacaagatttaagaaaagcagagaattagacgcagcaccggacccaggatgggcgtggccctggtccgggcgaggaaaagaggaccggtcgcccccggccaatcagagcacgccttgcgctccggcccctggccccgcccccttcctccccgcgccttttcgaatctccccgaactcaacaccccggagcccgcgcgcgtgggaaggggaggggtgggcggggctaacggtccaatccgggtaactccgcccctgcctgactccccctgcgcggacgccccccccaactcccgccaaaaacacctccaggccgccgccaccacccccttcacagttcagcgggtggggcaggccccgggaacaggcccccgggtggtcccgcggtgagctcgccaccgcctcccgccgtccccatgcccaacctgccgccacccacgctgtccgcgcgtccggccgcgaagacagaagaaccctcgtggggcccgggagcgccgcccctcaatcaccagctgcggtcgccaggggacggtcgcagggagggtcgcggccctggctgcccgcagtttggtcctaaagccgctggtccctggggcaccgccccgtcccttcagacaatggggaacccggcggggcccgcagggaagggagggagggagggaggtaaacgagggcccacgccccctattgtctcctcgacggcaccccggagcggacgcccggtgatcgcccagccccctgcccacgaacagccgcgcccccggagagcggggacaaaggcgaggctccgcccgagccacacacaaagcggagcgacccccgcccaccaacccctccgaggcccgcagccccgcccgccgccctgcagcagggggtcgctgccacggcccagcccctcccgccgaccgcgtccctcttgctggcctcagccagccgccgcctcctccgagccccgcacccacctgctcagtccgagccgcctgaccacactctgagcaccaacagacccgggcgcgcacaaaagcgccaaacagaggcacgtgacctccgcgcggggctccgcattggccgagagcggcggcacgtgccgcccccgccccccacaacccgcgtggagcgccgccccccgggaccccgaagcacctcgggaagtgtagtcctgtcccggagggcaggaggacaatgccgggggttgcagggcgcctggggagcatccccaggtgtgggcctgggactaggggggtggtctcgccgtggaagagggcgtggcagtggaccccggactaggtccgaaccagctccccattctcgagaacaagggcagggcggagcaggcggagggcgggggggtccttccctacctttccaaactttggccgcctggactccaccttgtagagccacatgcccgcctcgccccaagggcagcactcggacagagcagtgccccttctagtgcgccacccacatgggtgcctaagacgcccgagcccctgtgacagcacaatgccactccacgcccctgcagggccccctgcccccggcaccctacaccgacaccggcgtgtcacccatattgtgacatcatcgtaatttctaatccactcagcccacaggtcgcgggcgtggcccttccctcactgtgtgcgttcttgccagcatcctcaggttcccgagccggtgaccagggacctgtgcgggaaagcgtggggctctggaatttgatcgcctttggtctaacaaagccactcagcttaaatgcagactccatctgttcttccaagccttctgcggatgataggggaggaagagcaatagccgttctagactacacagattgcagttaagtgttgcttttgttctcagagcacgtgctccccagagcagcactgggttctttttaaaaatcgaaaaaggagccacaaggtcactgttctccctgacctggatagctcagaacctcagcaaaggcacaaaggaaattggtctgaccgtgccttagaataactggccctttctctcacaaaaaggggaaaaaaataaatgaaatgaacatggtccccgcctcctcccattctctgaccaagaccgtgtcctcggttggtggtcaatacaccaagacacctgctttgagatcttgactaagcagaagagatatctttattttattaatgagctgcatctccccaaatcaagaaacaaatgtgaccaaccttcctgaaacaacagtcctaatttagaaagactctcatgcctagttagtcaccagggatgtgccagagataaaatacaactaaggggtgcccaagacaataaaaactggatcatacaagcagcagcacactacacaaagcaaacaattagcaatgcgctgttgcctgaaatatgcttgttgcggcattttttccaacaatcgcccttgtgtggggtcggcctcccccccaagccaatcgaagtggttttcacttagcctgtgagcaggaccaggaataattcagatactgagccttgaaaggcttcttctcagaccaaacttagcttcaaaatggctaggtgcttccgtctgtcatttttctgaacagaatctcagacatcattagaaaagttggagaaggatgggcatgagacccctcaggaaagcgacagataggcaggcaacacaaatgagcaaggaacccaagcccaagaggtccttacccactgaacaggctttttatcttgaagtctttgtatttgatctggaggttcacagaggaaggtcccactcatttaatgcatttttttaagtacaataaattgccacacaaaagtctcacattcctgactattaatgttgtgacagaaaaaagaaataaatctttcaaaacactgataatttgaaagcacttacactgcttccccccacattttctttctccctagagcagatgtctatttccatggaaaccatagcaaggaacgtagatgttagaactcatgttcatttttaatcttttttagcaatgccacttggcttctgggtttgttgggagatgcctggttctgccagtctgtgacaatgttccaagctcctcacagctgcttgaggactgagagggctgggttaaagtttcccctagaatgagcctttgaataaaaaggtgcttttgaggtgggattcctgtccttttattattattattattattattattattattattattattattattatttgacttaaaaaaaattgagacagggtctcactatgttgcccaggttggcctcgaactcctgggttcaagcaatcctcttgtctcagcctcccaaagtgctgggattacaggcatgagccaccacacccagtctgatccttgttctttagggtggggctgccttcccaagagccagatcacagctcattattgtcagcttttgtgggtgtcctatataagccttggaataggaag

SEQ ID NO: 2128 - DNA, 4001 bp, Homo sapiens
cacattcaagtgataatcatttttaaattcttctcctattcataaaataggttttggtaagaccaaaacataagtgccaaatcaaaggcgaagacctgagccatctcaatctaaaatcataagcccattacaatttcagattttccaaatagattacctaccagaagaagccatggtgaatagaagacaagcgacaggcagtgtattctgcacaatcaactgggataaggaaagtcctgaaaatgattttcaaaaacatgcaatcactttctttgcctttctatatgtcatcaacccaaaaaaatctcacatcacatctacatacatcgtcagaaaaatacgtggaataaagacgtctaaattaaccacgaaaaaaattatcaaaatctactaaataaacattgggaaatatgacctgaatatgatattggttccagaaaatcaagttaactgagctttctcggtcataaaactcttggatttttaaaatcagacaaagtcacaagggtgaagaatttttcccccataaactctttaacatttcaccgaaactgtaagaagatattccagattcaactcaacagtgcccccggagccatcttaatactgcctacaactcattgtgcaaatgaaatacccacccctgctttgtctgtgtctgacgtggtggataagaaaacgcccaagctaatagtaaccaataatgttgaactcctattgtccctcaggtttaagcttccttgcccaacagcaagcaaaatgtttatgaacctctagattttgacttatatttgctgccgttatgtcatgaaaaatgctgtatctcttgttgatctttttaacattatgacttttgtagacgccagctagtaccaaaaacgtaggatgacaggttcccaaaagctaggaattaaaatcagaggcagcgacaagatttaagaaaagcagagaattagacgcagcaccggacccaggatgggcgtggccctggtccgggcgaggaaaagaggaccggtcgcccccggccaatcagagcacgccttgcgctccggcccctggccccgcccccttcctccccgcgccttttcgaatctccccgaactcaacaccccggagcccgcgcgcgtgggaaggggaggggtgggcggggctaacggtccaatccgggtaactccgcccctgcctgactccccctgcgcggacgccccccccaactcccgccaaaaacacctccaggccgccgccaccacccccttcacagttcagcgggtggggcaggccccgggaacaggcccccgggtggtcccgcggtgagctcgccaccgcctcccgccgtccccatgcccaacctgccgccacccacgctgtccgcgcgtccggccgcgaagacagaagaaccctcgtggggcccgggagcgccgcccctcaatcaccagctgcggtcgccaggggacggtcgcagggagggtcgcggccctggctgcccgcagtttggtcctaaagccgctggtccctggggcaccgccccgtcccttcagacaatggggaacccggcggggcccgcagggaagggagggagggagggaggtaaacgagggcccacgccccctattgtctcctcgacggcaccccggagcggacgcccggtgatcgcccagccccctgcccacgaacagccgcgcccccggagagcggggacaaaggcgaggctccgcccgagccacacacaaagcggagcgacccccgcccaccaacccctccgaggcccgcagccccgcccgccgccctgcagcagggggtcgctgccacggcccagcccctcccgccgaccgcgtccctcttgctggcctcagccagccgccgcctcctccgagccccgcacccacctgctcagtccgagccgcctgaccacactctgagcaccaacagacccgggcgcgcacaaaagcgccaaacagaggcacgtgacctccgcgcggggctccgcattggccgagagcggcggcacgtgccgcccccgccccccacaacccgcgtggagcgccgccccccgggaccccgaagcacctcgggaagtgtagtcctgtcccggagggcaggaggacaatgccgggggttgcagggcgcctggggagcatccccaggtgtgggcctgggactaggggggtggtctcgccgtggaagagggcgtggcagtggaccccggactaggtccgaaccagctccccattctcgagaacaagggcagggcggagcaggcggagggcgggggggtccttccctacctttccaaactttggccgcctggactccaccttgtagagccacatgcccgcctcgccccaagggcagcactcggacagagcagtgccccttctagtgcgccacccacatgggtgcctaagacgcccgagcccctgtgacagcacaatgccactccacgcccctgcagggccccctgcccccggcaccctacaccgacaccggcgtgtcacccatattgtgacatcatcgtaatttctaatccactcagcccacaggtcgcgggcgtggcccttccctcactgtgtgcgttcttgccagcatcctcaggttcccgagccggtgaccagggacctgtgcgggaaagcgtggggctctggaatttgatcgcctttggtctaacaaagccactcagcttaaatgcagactccatctgttcttccaagccttctgcggatgataggggaggaagagcaatagccgttctagactacacagattgcagttaagtgttgcttttgttctcagagcacgtgctccccagagcagcactgggttctttttaaaaatcgaaaaaggagccacaaggtcactgttctccctgacctggatagctcagaacctcagcaaaggcacaaaggaaattggtctgaccgtgccttagaataactggccctttctctcacaaaaaggggaaaaaaataaatgaaatgaacatggtccccgcctcctcccattctctgaccaagaccgtgtcctcggttggtggtcaatacaccaagacacctgctttgagatcttgactaagcagaagagatatctttattttattaatgagctgcatctccccaaatcaagaaacaaatgtgaccaaccttcctgaaacaacagtcctaatttagaaagactctcatgcctagttagtcaccagggatgtgccagagataaaatacaactaaggggtgcccaagacaataaaaactggatcatacaagcagcagcacactacacaaagcaaacaattagcaatgcgctgttgcctgaaatatgcttgttgcggcattttttccaacaatcgcccttgtgtggggtcggcctcccccccaagccaatcgaagtggttttcacttagcctgtgagcaggaccaggaataattcagatactgagccttgaaaggcttcttctcagaccaaacttagcttcaaaatggctaggtgcttccgtctgtcatttttctgaacagaatctcagacatcattagaaaagttggagaaggatgggcatgagacccctcaggaaagcgacagataggcaggcaacacaaatgagcaaggaacccaagcccaagaggtccttacccactgaacaggctttttatcttgaagtctttgtatttgatctggaggttcacagaggaaggtcccactcatttaatgcatttttttaagtacaataaattgccacacaaaagtctcacattcctgactattaatgttgtgacagaaaaaagaaataaatctttcaaaacactgataatttgaaagcacttacactgcttccccccacattttctttctccctagagcagatgtctatttccatggaaaccatagcaaggaacgtagatgttagaactcatgttcatttttaatcttttttagcaatgccacttggcttctgggtttgttgggagatgcctggttctgccagtctgtgacaatgttccaagctcctcaca

SEQ ID NO: 2129 - DNA, 4001 bp, Homo sapiens
agttttcaaaatataaagcaaataagggatggctgggtgggggcaaatatttgactctcttgaatattcacagaatgctaggtttcatcagaacacagtttaaaaactcctgggggaagttcactgttggacagttctaattgctagaaagttccttcctgtatcaaagctgattctctctctctttttttctttttctatccgtcctaattcccacccttggaaccaactcaaagtaagtctcatttctcttccacattggtgattttcaaaatgcaagtcatagtctgtagtcttttgtgaagttttagtttgtcatatgcgtgtgtgcatgctgggtcacaatataaaatgcatttaccatgagtcacagtcaaaaggtttgaaagccactgttctatatgactattctgcaagaatttgaaggcagttgtcgtgccccaccacctaaagactaatcttcttctccacatgggacctccctggcttttgccacatatctccttgctgcatggggagctcctttcctcaccggacccaggcatcgtcctgcagtcctgtcacaaaattcacgagactctctgctcaaaccttcttagggatgacttccctgaccaccctctcttaagaagcaccaacccatctctctctagccccttactctgctttatctttttcaaagcacttttcactacccaacattatattgtatgtttattactttatttgtttatgatcttccccagtagaaagttcaactctgaatcttcagtctatttcctcacatacagtatttgctcaattggccaggcatggtggcccacacccgtaatcccagcactttgagaggctgagggggaaggatggcttgagacagaagttcaagactaccctgggcaacatagcaaggccctgtctctacaaaaataataataatagtattgagaatttttaaaattagtattttcttcataaatattggtggaatgaatgaatgaatgaatactagaggtagacaccttttagcaattgtgtgtacagctgtgctcagaatatatttccagcgggagttagattctacaaggacagctcacatgatcacaactataggcacagtttcattttatcatctcttgtgtttttaaaaaacgttatatatgctaagtattacagtttacattatacatgttactgtacagggtatataaacatgtactaaactatgtatactgttactttagatagaatttttttggatgtcctgagtagtttcgtctgtaggcgatttttatctactcagttataagcatcttggaagcagcttacattttttcaaagcactctcaggtaaataacccattcgatagtcttcataggctgagaaagtgtatcagggagctggaaggaaatttagcggcgggctagtgaccaccaggttccaatctcacccttttattttacagatgggtaaatcgaggcccagagcagggaagtcgtttgctgggggacaccccctgagctggggtgaacctatgagtagagatcaggtctttggcgtccacccactgccaggcactgaagcctcccaacttttgcgcactcgcggagcctgagccagaagggtcggacgcccacgcccctggcaggagctcggtggagcaggcaagccccagttgtcaccacttttcgggtggaaacaccgaggacacgccccgacgcaggggcaactcccatggtggcttcttcccgccctcggggctccacctagctcagccctggaattccgcaagcacccggaggccggggggtctccgcgggcgtcccatgcggaggacatggtgcgccgtgtcctcttccccacgacctcagggaccggtccccccgccggaactgcttcctacctggtccggtcccggcagctgaatctggccagcccaacctcccggtcgctatggcacccacaggcctaacattcgcgagtccaccttccgccgtccgcgaggtaactccagccaatggcatcctctgtttctttaacgtgaaaagttgttgaccaatcattagaggcgtttcaaagtccgcagagaagccggccgaattttagggcttaggttaattacatcagggcctgtagcggggtggggaactaataagaggtttatctaggccatgcttcaaaaatcttgtgataaaccaaaagcctcagaattttgctcactcaaaaatcctgcttcaaggaatatacctaaaagaattaacattcatccaagccctgtttcttttttttttgagacagagtctcgctttgtcgagcaggctgtagtgcagtggcgcaatcttggctcactgcaacctccgccctccaggttcaagcgatgctcctgcttcagcctcctgagtagctgggattaccggcgctcgccaccacgccaggctattctttttgtatttttagtagagacagggtttcaccacgttggccaggctggtctcgaactcctgacctcaggtgatccacccgcctcggcctcccaaagtgttgggattacaggcgtgagccaccacgcccggccccaagccctgtttctaacagaagaaaaaaaaaaaaattgacatgggcgactatacaagggcagccacttagtattccaggagcccctcttcacacgcttcagggcagggcggtctcagcgaccttgtcactcccctgcttaaagtcctccaatggctcgcctttaaatttagggtgaaatccaagcttttttttttttttttttttttttgacagggtcttgctctgtcgcccagctggagtgcagtggcgcgatctcgactcgctgcaacctccgcctcccgagttcaagcgatcctcccgcctcagcctcctgagtagctgggaccacgggcgctcgccaccacgcccggctaatttttaaatttttttgtagagatggggtcccactatattgtccaggctggtctcaaactcctgggcttaagtgatcctcctggcctcccaaagtcctgagattacaggtgtgagccaccgcgccggcccccaaatatgttatttataaactgtccctggcccgtccctcagatcgcaggcccaaccacgcccccagaaaaatctctcaccagccctgctggccttcgggcagtttctacaatgcaccaactcgttcctctcccatgttcccaaggagctttctctgccccacgatctgagactagaactgcctctttctcattgttgatgtctaggcccaaatgacatttcttcatacgtaaaacgggcttcaagtctcactcatggctgtgacgatctgaaagcaaatgcgtgtatatgacaacgtgtgagcgatgagaagcttgtcatctgtaaaactccatgcgcatgttaattatcatggccgtgataattatgtacattatagaaacattaaccaagcgctgggctcgtttcaggaccttcagtattgctgggaggcttggtatccgacaggtgttccaggagggcaggaaaggagagatatgtttggtcccaagtctcgcgagggctctggggagcgctgggtcttcaaggacgttttggatttgaatacttggtgagagcgtcgggtaggggaacagcaggagcaaagcccggaaggtggctatgaggataagaagggaggacacctggcaggctgctaaaaccaggcccacctgccgggcaggtggaggcgagcaaccacctaagctctctgggacagcgggagagggggcaggggagtcgccgcaccattcttcctgtggccgctagggggtccccgctccaggtgagcgccaagctctagccccaggtcgctcccttatgcttcaagcaagctttgcagcgcagccaattgccaggggctgtcccgcctactccccgtcctcgcagccacttgcctgcgcgaaatgcctgccaacttctgactggcaggcagtctggcaaatcaaatcgcgacctttgaaag

SEQ ID NO: 2130 - DNA, 4001 bp, Homo sapiens
cattttttcaaagcactctcaggtaaataacccattcgatagtcttcataggctgagaaagtgtatcagggagctggaaggaaatttagcggcgggctagtgaccaccaggttccaatctcacccttttattttacagatgggtaaatcgaggcccagagcagggaagtcgtttgctgggggacaccccctgagctggggtgaacctatgagtagagatcaggtctttggcgtccacccactgccaggcactgaagcctcccaacttttgcgcactcgcggagcctgagccagaagggtcggacgcccacgcccctggcaggagctcggtggagcaggcaagccccagttgtcaccacttttcgggtggaaacaccgaggacacgccccgacgcaggggcaactcccatggtggcttcttcccgccctcggggctccacctagctcagccctggaattccgcaagcacccggaggccggggggtctccgcgggcgtcccatgcggaggacatggtgcgccgtgtcctcttccccacgacctcagggaccggtccccccgccggaactgcttcctacctggtccggtcccggcagctgaatctggccagcccaacctcccggtcgctatggcacccacaggcctaacattcgcgagtccaccttccgccgtccgcgaggtaactccagccaatggcatcctctgtttctttaacgtgaaaagttgttgaccaatcattagaggcgtttcaaagtccgcagagaagccggccgaattttagggcttaggttaattacatcagggcctgtagcggggtggggaactaataagaggtttatctaggccatgcttcaaaaatcttgtgataaaccaaaagcctcagaattttgctcactcaaaaatcctgcttcaaggaatatacctaaaagaattaacattcatccaagccctgtttcttttttttttgagacagagtctcgctttgtcgagcaggctgtagtgcagtggcgcaatcttggctcactgcaacctccgccctccaggttcaagcgatgctcctgcttcagcctcctgagtagctgggattaccggcgctcgccaccacgccaggctattctttttgtatttttagtagagacagggtttcaccacgttggccaggctggtctcgaactcctgacctcaggtgatccacccgcctcggcctcccaaagtgttgggattacaggcgtgagccaccacgcccggccccaagccctgtttctaacagaagaaaaaaaaaaaaattgacatgggcgactatacaagggcagccacttagtattccaggagcccctcttcacacgcttcagggcagggcggtctcagcgaccttgtcactcccctgcttaaagtcctccaatggctcgcctttaaatttagggtgaaatccaagcttttttttttttttttttttttttgacagggtcttgctctgtcgcccagctggagtgcagtggcgcgatctcgactcgctgcaacctccgcctcccgagttcaagcgatcctcccgcctcagcctcctgagtagctgggaccacgggcgctcgccaccacgcccggctaatttttaaatttttttgtagagatggggtcccactatattgtccaggctggtctcaaactcctgggcttaagtgatcctcctggcctcccaaagtcctgagattacaggtgtgagccaccgcgccggcccccaaatatgttatttataaactgtccctggcccgtccctcagatcgcaggcccaaccacgcccccagaaaaatctctcaccagccctgctggccttcgggcagtttctacaatgcaccaactcgttcctctcccatgttcccaaggagctttctctgccccacgatctgagactagaactgcctctttctcattgttgatgtctaggcccaaatgacatttcttcatacgtaaaacgggcttcaagtctcactcatggctgtgacgatctgaaagcaaatgcgtgtatatgacaacgtgtgagcgatgagaagcttgtcatctgtaaaactccatgcgcatgttaattatcatggccgtgataattatgtacattatagaaacattaaccaagcgctgggctcgtttcaggaccttcagtattgctgggaggcttggtatccgacaggtgttccaggagggcaggaaaggagagatatgtttggtcccaagtctcgcgagggctctggggagcgctgggtcttcaaggacgttttggatttgaatacttggtgagagcgtcgggtaggggaacagcaggagcaaagcccggaaggtggctatgaggataagaagggaggacacctggcaggctgctaaaaccaggcccacctgccgggcaggtggaggcgagcaaccacctaagctctctgggacagcgggagagggggcaggggagtcgccgcaccattcttcctgtggccgctagggggtccccgctccaggtgagcgccaagctctagccccaggtcgctcccttatgcttcaagcaagctttgcagcgcagccaattgccaggggctgtcccgcctactccccgtcctcgcagccacttgcctgcgcgaaatgcctgccaacttctgactggcaggcagtctggcaaatcaaatcgcgacctttgaaagcaaaacactgcagcatcttggcagctctgaattgggaagggatgaaggaggctgtgcctccgggttgcacgaagagtccgagtcatttctcagaaggttttgataggtgggccttagaggagacgccgccggtgagtagtgattaacaccgggaggaaggggaattgaatttaaccttcgtttttttctggaaaaagcgaagtcacctaacgtcccctagtgtacatacccttccttcttactgtcaccagcctcgccaacctgggtcccgttgccttggaatgttctttccagttttgcatcgaggccaagaggagcgggggcatgggctaccttactaaaggtgatgccaggctctaccaaaccaggaagtgacatggagttaactttgccagaatttctcctcttcgtgccgagcggctcgggcttcctggcggcagcagatggtggagttagcaggtgggatgaggggaggcgttcttggtctaagcccgcttctggaacagaggtgctgtctcctcgagttgtaagtttccagctcagtgggacgggacggaagaatgtaaccttctcgtgagccaaagccgaggaacgggaagcttggcagggaactggcgctcacctccagaagccagatcgtcgggtggtgggaaagagcgtgttttattgatttgttcagaaagaggcaaattcgaatacagacgctatgagccacggctgtctcatttgtaaaacgtgctctgtgggattggtgaaatccgtcatcgagataaacggggtgggaatggaagcagagcacctagtgaattctcattccttccttgggtcagtgaccacgtgctctaattgtggggtggttgacaacgcagaggtgactgcttgcctctcgggcatatgtaggtcctgaagaaatgcttcgaaatcaggaaaagagagtcaccaggtgaaaagtatgtgtcttataagggagtacagcttgcaaagggttcctccaggctttcagtccggactcccacccagctgagggagagccttcaatctttgcaggcgatgcttcagaggcctgcgagttcctgaggcagagagggaagctgctttttaaaagaaaaattaaaccacagcaatgccaaccaccacaaacaaaagcaaaaccagaaaagcacttgggcaaactactctgaaggatgttaggaggcctgggttcccaccactcccttgattgacatgtcgctaaggtctgttggctttctctgacctcctgtgggtggggctgagtatatctgcttgttgaagctctggagttgtggttgattaggccttagaaa

SEQ ID NO: 2131 - DNA, 4001 bp, Homo sapiens
aaactaccgatttcagctatgactaaagaaagatcatggcatcagactctctataaagaaatggatttagacaggtctctgcttaaatgtgtccatttgactggtctttcatgtaatgagtctatgaggaaatttttttttttgagacggggagagtttcgctcttgtcacccaggctggagtgcaatggtgcaatctcggctcactgcaaatctccacctcccaggttcaagcaattctcctgtctcaggctcctgagtagctgggattacaggcaccagccaccacgcccggctaatttttgtatttttagtagagacagggtttgatcacattggccaggctggacaggaactcctgacctcaggtgatccgcccgcctcggcctccccaagtgctgggattacaggcgtgagccactgcacccggcctctatgtggaaattaaagggtacaaagagaaattacaattcgtcagagggtatctatttgaccattcgtagctactctggaaaattttaaaccatttttcaaaatgataactcctctcatgatgaaggtaggttcacccccctgcactttcgtaatcttccacttgaaaaactgagtagttaacactgatgtccgtcatcccaccatgccagggctcctaaatggtcagtgtttttgtttttttcaaataattcactccaagctcaaattacgtctacttcgggcttgccaattgttgacatgttttctcaggggtttagccttgctaacaaaaaataaaagcttctgaggaactgattccacaggtctaaaggtagtatcattgctctttggtatgaattggtacattatgcttggacaactaggaattccctctcattaacttggctgatcagtttggctgctgatcaatctaggagatggcatagtaagtgctctgggaacctgctcattaagaagccctaaaactccgcgacatgagtatcttcattcatgaattctgcaaaaggaggcagtgggaggaattccttaacttggggtgaggttactagtcagttccagactatgccatctccagaacggcaggaacggctcactagcgagacaggaaggaatgttgggtcctaacgcatgcttaaaatgtctatttctcatctttaacagttcagtatcaggcgcactgggcacaatagcccaccacaggtactgttaacccatggcctgatctggctcaggtcagaagaacaggacatgtttccccctcctactctactctcaatgataattagctcggtccggctctaagttccttccagatcctcgccggcgccttccctgcccacacgcgccttcctctgcgagcggcaggacccaggagctggagcccgcgtgccagggacagacgcccgagatgattaggttgggggcgcggcagcccagcgccctggagtgcaccaagacccccgactcctcacccccgagctggggcgagagcggcttccccaggggctagggcctcgaggccacgcccacagtcggggcccaggggagcaaaccagcagtcgccggccacgggaagctctcccgggcggcggagctagagcaaggactcatgctccagaccccaggagctgccagcctcgcttcctgctcctttcgctgtatagtgacagttctcggccggactctaccgagccctccgggaagcccaacctggcccctagagtggccccgggcccgggacccccggcgccgcccgacccggtgcgagcctcgccccccgaagctcctgacctctgagtctttgcgctggttgcggttgaactcgcgggctttgcccccaggcaggaggcccgcggcggcccgcggtgccccgggtggtggctgtgcggctgccggcggcggaggtggcgggggctggggctgtttgttgttcacgatcagtgggcccggaccgccgactgccggctccatcttggctgctccacacccccagcttaactcgcgcacagccgccgtgatgcaactctcgcgtgattttctccaggaaatttccctggccgccatattaagtgtggcggccagtgttagaagccatcttggctgaccaatacctcgcgatattctgtctgcagtccttcccttgttgatctttttagttttccaccttcctttcagtttcagtttagatgtaattttatctgtgaggcttcccttagcttcttcagtcagtttagttacccctccttcctctaaatcgctttgcacttataactcatagccttgttcaaggcttaggcggaattttgtaatgaacaaaatggataggatcctagtcttcacagagttaccgttgtgacaagtgcttgtcattcattcattcaacaaacatttaataaatgtctcctgtgcaccaagcagtgggataaaatgaggaacaagtgtctgcagtcacggtacataacagtgcttggtgggtcagacaaacaatagacaaatatagagaaataaatgctgaaaagtgttaaaggaaaatttgttcatggcactaattaaagatggtaaggcagactttatgtaagagagcccatggtgatagttacagggaccactacaaccagatcttgcagtgaagaagaggaattagactcaactctgactccaacaagatatagtggggatttataaccaaagagcaggatgagggtcagtggacggaaaactactaagagaaacatcaaggataagaagtttcttgctaaactgacctaacaggattattgctgaaagcaggacagggtgctaagatgttgagggtggtcagataccgagtgctatggtttgactgtgtcccccaaattccatacgttggaaactcaatcctaaagttcatatgttgatggtatttggaggtggagccttgagggggtgattaggattagataaaatcgtcagggtagggcccctgtgatgggactggtggctttataagaagaggaagagtgatctgagctggcacacatgctcttgctttctcaccgtgagaggctctctaccatgcagtttaagaaagccctcaccaaatgcaacccctcgactttgggctccccagactccagaactgcaaaaaataactttctttcctttatgaattacccagtgttttgtattctgttatagcaacaaaaaatggattaagacgccaagagtggagagtccctgcacaaactggattcaacaaggacagaaaggaagcccaaacggttagtcctagtaggcagaggactcacaggagcctgactagagttttggccaaagaagagaatctttgtcagaagtaacaaaaattgagaggttaaaaggtggcagtggggcggggggcaggggttggtggaggcggagaatgtggctataatataagcatgctgcccaaggaaggcaggcctgagggtgtgattttagatgagttctgaaagaagtgaggagaagccctgcaaagttccaggaagggcacacagacagatgaaacagctaaatgcaaaagccctgatgttagtgtctggaattgagtgagccaagggagggatagtaattgatagagccatataatgataatgcagggaccagaagaatgcagggccttgaaggtagtgggaaggagtttgaattttattctaagtgaaatggaaaaccattcgagggtgttaaccagggagatgttatggtgtgatgtttacaagttcaatctggctgcttttggagaagggattggagagttgcaagagtggataaggcaagacatgttaggggaccatgtagatggagatgatggtgcttgtaccagagtggagcattgggttgatatttctatattgtgtaggtagggggacaggatttgctggaatcttatcagctgggtaggggaaataaacaatgacccccttgatctaggtttgggcaactgagtggatggctgtatcactttcataaataagtaagctcgagagtaag

SEQ ID NO: 2132 - DNA, 4001 bp, Homo sapiens
ctcaccgtgagaggctctctaccatgcagtttaagaaagccctcaccaaatgcaacccctcgactttgggctccccagactccagaactgcaaaaaataactttctttcctttatgaattacccagtgttttgtattctgttatagcaacaaaaaatggattaagacgccaagagtggagagtccctgcacaaactggattcaacaaggacagaaaggaagcccaaacggttagtcctagtaggcagaggactcacaggagcctgactagagttttggccaaagaagagaatctttgtcagaagtaacaaaaattgagaggttaaaaggtggcagtggggcggggggcaggggttggtggaggcggagaatgtggctataatataagcatgctgcccaaggaaggcaggcctgagggtgtgattttagatgagttctgaaagaagtgaggagaagccctgcaaagttccaggaagggcacacagacagatgaaacagctaaatgcaaaagccctgatgttagtgtctggaattgagtgagccaagggagggatagtaattgatagagccatataatgataatgcagggaccagaagaatgcagggccttgaaggtagtgggaaggagtttgaattttattctaagtgaaatggaaaaccattcgagggtgttaaccagggagatgttatggtgtgatgtttacaagttcaatctggctgcttttggagaagggattggagagttgcaagagtggataaggcaagacatgttaggggaccatgtagatggagatgatggtgcttgtaccagagtggagcattgggttgatatttctatattgtgtaggtagggggacaggatttgctggaatcttatcagctgggtaggggaaataaacaatgacccccttgatctaggtttgggcaactgagtggatggctgtatcactttcataaataagtaagctcgagagtaagaaaaacaggtttagaggaaagatcaagacttcagttttggacacatcaagtttgagatactcatcagacatcttagaagtgttgcgtaataataactcttactattatctgttgttatactgtgaaatccttaaaggcattttatccatctttgtctctccagctttacatattgcctgctttacaccccaggctcaagtccagaaagtccctgtgatacaactctccagtgatttcccctgaggtccaacctagtaggtgcttaaaaagtctttgttgtaaattaataaattaatccaaaaccaccacactgctatttcctcctacctatcttcctgtgcctatcataagctgtatcacccggggaaaaacatttttcagctaaatttagaacagggagggttttggttccataattccacttctagtaatagattctaaggaaataatcagatttagataaagataggtgtatgataatattcaggcaatggtgttttcaatagtgtaaagttgggatcaacctaatttgaaaaatagccaataagaaaatggctaactttgaggggccaggcaccgtggctcatgcctgtaatctcagcactttgggaagttgaggtgggaggatcgtttgagcccaggaatttgagaccagcctgggcaacagagcgagaccctatctctaaaaaaaaaaaaaaaaatcaaattaaaaaaatttttgaaaaagaaaaatggctaactaatggaatggggcatgcataagacagaatatacagatctagaaggaaaaagaatcccaaatgtgaaggagcagaagcacagctggagagctcactactctaacttgctaggaaactttgcgaaaagcacaatccagtagagagtagaagctgtagaagtgtcttcatgcacttctcttttttttttccttccccatctgtaaaatgagaataatcccacctgtatttttgtcagagatgtgtgaaccacagcaactccatcttgaacaggggctgggtaaaatgaggctgagacctactgggctgcattcccaggatattagagcattcttagtcacaggatgagatacgaggtcagcacaagatacaggtcataaagaacctgctgacaaaacagtttgcagtaaagaagccagcccaaacccaccaaaatcaatatggtgatgagagtgacctcttgtcctcctcacttttacactcccaccagcaccatgacagtttacaaatgccatggcaacaccagaatgttatcccagatggtctaaaagggggaggcatgaataatccacccgttgtttagcatataatcaagaaataagcataaaaatgggcaaccagcagccctcggagctgctctgcctgtggagcagccattcttttataccttcactttcataataaacttactttcactttaccctatggacttgctctgaattctttcttgtgagagatctaagagccctctcttggggtctggattgagaccctttcctgtaacattttcagccatggtggcatgcgcctgtaatcccagctactcagggggctgaggcaggaaaatcgcttgaacctgggaggcagaggctgcagtgagccgagactgcaccattgcactccaacctgggtgacagaggaagactctgtctccaaaaaaaaaaaaaaaaaaaagaaagaaagaaagaaagaaagagaaaagagaaaactataaagcattgtttgttttgtttgttggtttgtttttttaaaaaaaggagaattattaccaagaggtgatacccaaggtgagaagcccttccttcaccacgagcagtcattgttcaagagactggaggaagaaatttcctatttgagccattctagtattgcaggagttgcaagaacatagtggctgctccagttgggctctgtagaaggaaactggcatgtattctgtgcctacagggtgtcaggtactgggtaagatgtttcacattcattgatacctaagtatatgctgggatgcagagtgagcctgtttctagcaatttccatcctagccctggactgtaaatacattgctggtcactgaaatgctcagtattaaagtaatctgtatagcatataaaacatctgtgggtccagtcttaccctctagttactgtgtcacatggagttctctccattaatggttatgagaagaggataatattaataatgttttggttaattaactaatagggcagataactaatagttaattctgtcttccaaagggaccagccagcttcactctgtctcaggtcagattaacttataaaatctcagctttcttatataaacatgaattagtcaaaagactaagtcaaagctggtcatggtagctcattcctgtaatcatagcgctttggtaggccaaagtggagggatcacttgagatcaggagtttaagaccagcctgggcaacatagtgagacctgatctctacaaaaaaattataaaattaggcattgtggcgcgcctgtcatcccagctactcaggagtctgaggtgagagaatcgcttgagcccaggagttctgggctgcagtgagctgtgatcctgccattgtactccagcctgggagaaagagcaagaccctgtctctaaacagaaaaacttttttaaagattaagtcaaagtattatgtaatatactgtgtctttaactatttcctaaacacctgggaaattctcaatttcaaaacataggagattcagagaaagaattccagacctgtattttattatcctttgttggcaagagaccctgacaaccagatcacatgagaaaacgcgccatctggtggttgtagtggagagctacgccacaagacagccagatgaggaagaaaggcctggatcaaagacaagtaccctcagggccacaacccaggacaattccttctggaggacattttaaaatgtcttcaaaggtcgggcggggtggctaacgcctgtaatcccagcactttggaaggctgagg

SEQ ID NO: 2133 - DNA, 4001 bp, Homo sapiens
acatgttgaatgaatatttcgcaaatagatattaaaattagatttagcttcaacaagaaaatttcagccttgaactagaattttctgatctaacctgtattacagctccttcacaaaaggaaactggaacaaacagtactatactttctaaccagtggtcatattaattttttttacttctggattttaacaggccacatattcttcctttcacttccagagtctcaatcccttttgatcagaaactttctacttctcaaattctacaatatacatttagatttaaaagcaaagtgagcctgggcaacatagtgagaccccatccctacaaaaaatttaaaaattagcctggcacggtagatgcatccttgtagtccttgctactcagcaagctgatcaggaattcaaggttatagtgagctaggattgtaccacttcactcagatcactgcattctgcctgggtgacagaagtagactctgtctcgaaaaaataaattaaaaatattttaaatcaaaaaaattaggctaggcacagtggctcacgcctgtaatcccagcactttgggaggctaaagtgggagaagtgcttgtgcccaggggtttgagaccagcctggccaacatagcaagacttcatctctacaaaaaagaaaaatttttaaaagtttaaaaacgaaagcaaagtgacactctttaaaatatagaatataattgtaattcaggactaactagttctacctattaacagagtacgccaagctcacaaaacaataataaacaacaaggatgatgaccaccattctttccaagtaaagctgctgctgatctcctgtttataaggctccaagatgattttcaagcacaagaaacaccctgtatttgactcattcagctacagtttcactcagaccctaatggggaggagggagttttaagacaagcaatagcattctgaattccaccaacaactctaccatgccttacttgctatgtggttgtggctaagtgtcttagcttccctgtgtaccagatttgttcaagagcagctaagtagggaaggaaaacaaaagcctcatctgcctgaaatccaaaaatacaccccaattatttgttacaaaagacaaaataatgtaaattgaaatgctgttggtgaattctctttattaaaatgaagtcatcccacctttcaaataccagtcattgtgtctgatttccgaattcattacaggaagaactgtgtatgaagtcacccaaacacatgcactctccacttcccttaattgaaagttgctgatttccgaggagccaggggctgagcagaatgtaaacctaaaggctaaatcagtaaacaaccccatccaaactggtctaagaggaaagcgaggtgggtggggaggaaggtgggtgacaggagaaactcggctgaccactgcgccaagtcaacgcactcacagctctcgaggtgacacacactccccttcccaccctcgggctgtcaagtcggctgttttggtcccagcaccgtgggggcagaactccagagaagcagctcaagcttcagctggggccggggaccctcgggcaacccgggcctgacagattgggggatggcagcccaccgcccccagggtggacagcccgagacagccccaggtgtggcctcggccgtagccccagccgggccctgcgtcccggcagcctcacccaggcctgtccccgggacagctcccgccccccagctcggtaccccggctcactggcttggctgatccgctggatgttgccgctgcacgtctggatgatgctgctgaagtcccggagctggggccccgagggccccgggttccggtacatgtctaagggaccgtatgacatgacgaggagctgagacctgctcgctctacaccgctctcctaccggaagcagccgccagccgggacccgcaggctgacggagaaactgggaagagcaagggcggggaaggagctaaggctgcgtgcgcactagccccgccctcacgcggcgcgcacgcgtcctccccgccccggtccaaagtgcgcaggcgccgctgggactggagctgggactggagctgggactgtagcttagagacaggactccccgaggcttggggatgcagggcggggagatgacgtcacctagttggggctgagattggatgagcttgggtggaggtgttgtttctcgccagggcacagtgacaagaggcaagaattttcgatttgcataaaactgtaccagatgatctcagcccttacatcctattctgttctgagaattcaggcccaaatatgggagaattcaacgttgaaactcagacccggaaccaaatcgtaacccgaaattcctctctacttccatccccagggctttggtagtgtttggggtttccaaaccactttcatttctccctccacccctcttctaatctaaacaataaaataatgtttattgagcacatactatgtgaatcctcaccgcaattcacttgttcataagatttttcacagcaggggacgatgctctatctatatttttatcattagaatagataacggagagtcggttttttaaatgttgaagtaaagtaattcatcaaagtaagcattattattttccctcttaccgatgagaaaattaagaccagcgaggttagttcgccttgctgaaatttgactgcaaaacccaaacgctaagctgactctctcctcacctcgctacttctctaaaattcattctcgtctaaatctctcccaaatagctcgttcatctatatcccaagccgggatatcttggagaactagattcctaaaatttaaaaatcgttcccttaagtaatttggaatgcatgacctcaatgttcccacagaaaactgcatttttgtaagcctatgttaaaaggaaagacataggattttggtttgggaggagatcaagatagtgagaagtgaaggggaactggctgcgtttcctgtgttctacaccccaccccaccccaccccagcctgctttgtagtctttggaaaatgcaaagacagaaagctgcttgcctggatgaaaggagacccaaagtgaatgagcctgtatatggccttaggattttttctttattttattttttttgagacagggtcccgctctgtcacgcaggttggagtgcagtggcgcgatctctgctcactgcatcctccttctcctgggctcaggaggtcctaccacctaacctctgagtagctaggattacaggcgtgcgccaccacgcccagctaatttttatattttttgtagtgttggggtttggccatgttgtccaggctggtctcaaactcctgggctcaagcaatccacccaccagccttaggattttttaagggtgactatctctatttttcgttggagaatttatgagagcattttttttccctgtctctagaaagagacggatgacatttggggactcttattttggttattttattttattttatttttgagacagaatcttgctctgttgcccaggctggagtgcaatggcgcaatctcggctcaatgcaacctccgcctcctgggttcaagcgattctcctgcctcagcctcccgagtagctgggattacaggcgtgtaccaccacgcccgggtactttttgtatttttagtagagatggggtttgaccatgttggccaggctggtctcgaactcctgacctcaggtgatccacccgcctcggcttcccaaagtgttgggattacaggcgtgagccaccgcacccagcctgttttggttattattataaaaccttaccgtttcttagaatctgtagttttatgtcaaatcttaagcaagtcatgtaaattgcacttttttacctatataatagtactgatgatttttttcatttacatttgacactatttaaagtgaagttcagtaaagatatttttcttttaggaattaaaaatattgttttctttctccatg

SEQ ID NO: 2134 - DNA, 4001 bp, Homo sapiens
aaaatgccaagacagaagaatttaggcttttgacaaattccataaaaagtcaaacaaaaaatttctgatcatctctgatctctaccgccagagataacctttgccaacctaagcattaagaactttcaatcaaggaaaaaacatctattttaaaaattaacccctaaatcaatccttctaataaatatcacattttctaggtagggatacacatattaccagtaaatttacaactcagcattttcccatctaaattagagtaaggtgaagaaaaaaaactttccagggaaatattaagaagtagtataaatgtattttactgcataatcgataaagtatttcacctaaaataccatttaaattttctacaacacttgactatacaacggccagcttgcaccactacagaaataggaagctagcagcaactagtaaaaagcaagggacattctgtggtgatcagtactgacctgggaactttgcagttttcagatttttcatgtttgacatttaaaacagaaaactgacaagtttctaataagaaactaaaagttacatcagaattgatcttcttgcatgtgtttaatggctacgaagtggatattacaaagtgcagttgaagactctatctccaaagaaacaatcgagcaatcaaagatgagctaggatagcttgtaagggaacagaaggcagtcctttctattctgaaaggcagaagaaataggagaaacctgtcaaacaacctggatgaaatcaaggagttaacaagcaacactcatttcctttagcactgtgagaaaattccggttgctaatagaaagctgaggaaagtttggtttggcttgtttcattttgttttccttccaaatcatcactgagtatgaacgactgctttcctctcctcacattactcagtaaaaactcccccattgaattgtcttccggtgccctgctccccagcctcccagaacggcccccgcccccgcctccctcccagcaaacgtgctcagacgcctctgggcttgttgtggtctcgccagtctgcggacaagcgctccaaactcaatggacaatggagctcacccccgtcaacgcgaactacaaagctcaggagggccatttcccttttcctgcccagatgctgttttcgctccttcgaagcaagatcccatgctcgactagacggccagtgtgcgccaggacccgcgtgtctccttccccacctgcagagctgctgagcccctcggcccccaaataaattgtaccgcagcacacaggccaaaaagggccccccaccaccaggggcttggctggggacagtggcttcacggtccaggtagggatggagggaacgtctcttgacgcttggtcatggccctcaagactaagccgtctccactgttccccctccccagctccaacttgcctcccctccccccactgcgagaagacctaggaggtgcgggcaggcagcaccgccacctcttcctccggtggagcgctcggccgacactcaccctttcaccacaaagaaggggtcctccatggacatggcgtcccggccccggccgccttcacctcctccgcgcacagggcgcccgtgcctcccggtctccctccgcccaccccgcctgttcccgcagctgcccgcgccttagtctgggtgaagccgagcagcgggcacgcgcacaggccaggtgcacaggacggccgctggtccagcactcgctcagcaccactggccgaatcccggactcgggcgccggccccctcggcagcctccagtcccggctcctcccgaagcgtcggagggcctgaccccacccccgggaccctcggccgcggccaatcacgaacgccgcctgaaacacgacttccgcaccccgctcacgtgaccagggcatatatctctctctctctctctctctcctctctctcctctctctcctctctctcctctctctcctctctctcctctctctcctctctctctctctctctctctctctctctctctctctctccccccccccccagtgggcggggcttacgcctgcgtccctcggccctggaggcggagccctcggggcggtggaggtgggcgggcttctacagccctctcctcaagcttgagggtgaggagtggcttgttccctcagaactaggcagtcggcttttcaggataagctgtagttgtacctgatttgcaaaatcctcttacctttcctctacttttaatacttaattttgacagtatgtaatttataaatctatctggtcctcgacttaaaatgaagcatagtatctgattataatgttacacagatcctttaagtaggtcttgctttgtgttggacagtgtgctaaaggttgtgtatgcatcatctcagtatcctttgggggaaagtattattcccccctccccctttttggggggcagggtctctctctgtcaccctggctggagtgtagtggcacaatcacagctcactgcacccttgacctcctgggctcaagcgatcctccggcctcagcctcccgagtagctgggactacaggtgagcgccaccacgcccggctaatttttaaattttttatagagatggggctctcagtatatttcctaggctggccttgaacacctgagctcacatgatcctcctgcctctgcctcccaaagtggtgggattatgggcgtgagccaccacaccatccatttttctcattttgtagataagaaaataagttcagagaggcttgaagacttcctgtagtcacacagcctggacagggcagaactgcagattctgtgcactttccaccagatggggtgtactttctgttgctgtacattctgcaaataaccatgtaaagtaatttttcatacagcatatggtgcttcccaggagagcacaccttcgaggaataaagaaggggccaggtatgacaacttcctctcactgtggttcaagagctattcgagaaaacattttgcccagaaccattaaccaactcatatgctagatatgctatgaaatttgtggatggggattgtggactttgattgctgaaaatcattgagcacttactgtgtgtgtgtgtcaggcaggatgttaagtgttatctcagttgctcttacaatgtgataattactgctatcatgcccattttataaatgagaaatctgagactcggaggttaagtgacttgcccaaggtcaccagtctggagctggcacagtccttggagcaacacaaaccccgtttaaaccttggctctatcattcagttcctcatctataaaacataaataataatagctagttcatgggttgttgtgatggttaaataaaaatgtgtgtaaacctcaagatcccaaaggactaagttactgaagtcaggaaaaccagtaaggacgctgctaaagtcatgtggcctgaagggatgaggtccagaccaggatgacagcgattgagaacagagaaggagtgaatctgacagatgtttcaaaaggaaaacaagactaaacacctagacatgatgaggggctgaatgggtttcaggaggggagagaagagaggggtgaaagccaaaatccctggaggagcgaatgatggaaggcagatgtggggaaaggaagcagtgtccaatactagtgattgctaatgtttattgggagagaactgtttaatttacttagctggggaggtgaaaacgtgtcatcgttcattcattcaacaagcacatgtaaattgaggggtaggtgagcatggtgttgaagaccatccttggagtctgattgcttgagttctgctgcttcctgactgttgcatctcaggcaagccgcttcatctctcactatcctcaactgtgaaatagacaccgtaataacagcttccttatagagtgtcatgaggtgatgtgtgaaaagtgcttaaaacagtgcctgacacatgttgtgctcctactgtgtgctaagcactgagacacaggcatgaacaa

SEQ ID NO: 2135 - DNA, 4001 bp, Homo sapiens
gagagagtttcaccatgttgctcaggctggtctcgaactcctgagctcaagcaatccacctgctttggcctcccaaagtgctgtaattacaggcgtgagccactgtgcccgggcttacgctagctatttatttatttatttagactcagggtcttgctctgtcacccaggctggagtgcggtggcacaatcaatgtccactgcagcctcagcctcctgggctgaagggatcctcctgcctcagcctcccatgtaggtgggaacacaggtgcatgtcaccaaacatggttaattttaaaatttttttgtagagatggggtctcactttgttgcccactcctaggctcaggtgatcatcttgccccggcctcccaaagtgttgggattacaggcgtgaaccactgcacctggccataattttttcttttcttttctgctatcaaaattttttgccacctcaaggtatttaaaaagcaatttaaaatgttaattacgagattgtgaagcaacatgaaaaatgttgagtcaatgtcagttgtttaaaaaaaaggaagtcacagaatgacagataataaaaacaatgtctttatctgtatgaggatcagaaggaaaatgtgaaaaagggaaaagcttatgattcaatatgtaaagaactggcttaaatacatacatgcggatgttaatcacatatatatcttggaaattatacaacacaatttgttacccattttcacataaatgtatttaaataccattgttttaaaacatctcaaatcttaagtcagccatgtaaatcttgaaaaagcaaatgccaaccttaaaattatctaatcttttaaaagataatttcatatttttcacctatttatacatttgcttagtgcctgctatatgttaagcactatcccagttactgatttggatttttaattttagacaaggaactctaactcccagaattctgctgactaaatcatttgttttttgttcaacaagttggactaagaaatactaattagatgctactccctttccactactaggccataattatcttgaactcagagataccaaacaatgatggttattcctgttgggtggtttcattctttctctaacctgccagacctaggtttggagcgatgtttatgaaagttgtggatgataccgcagaacatcagtaaccaataaggagtccggtcctaacagcagggaggggcccccgagagtagggaaaacggaaggagcggctcttgcccaggctatgcaggaagatgtcacggctggacaccggtcattccaatggtctcttctcaagaacttttcagaaagtaggctcctctcggaataggggaagatgagtctgttaaacagtgaggttttttgaaaagcacgggttgatactaacacgaataagcagaataaacagtccttgcaaactccagtgtggggtggagatgggggcggaataaacagcgcccgaattgtctcggatggagagacatccccaactggtggagcgcggacgggagcggagaagagtggggagcgcggccgagggcacgcacgggctccgcgggagggaaagccgggccgggcggctcacccggggcggagcttcgcggccagagcgcggccgaggcgagggggtgcccgacgccaacgagaaggccgcgtcccgtcgcaccccgcccatccctggtgctggcaaggaataaggcagggcaggaaagcaggaagaagtcctcacacaggtcccaaagcaacaagtgctcgcggcggctcctcaacagaccgctgggttggggctgcaaaacgaggcccggcacggcagcctcccggccttccctctctcaacccctaccccaccgcactcactctgccacacgacgctctttagccccctctctgccaccggcggcgccatcttcccgacactgcggagcagcagccaccaccttccactcccaacctactttggccgcagaagcggcgttggggtggccccgccccttgctgcaggggaatgccccaccccctctagcagaccgcgccctccggtgacgtcacgcgcgtcagcaagggaatttccgcccactcccggacggaggctgcgcagtacaggtggaacctccgtgggaagtcgggagccccctagcgggaggctgctgtcgcccgaggttcgacgtcctgtggcctaggaacgcgaagtgccaaaccgatcgtgagccaaggccgtctatgaaattccgagttcacacatacacgaagactggaggatcctccccattacagaagaacccttcacttcgcaaggcgattcataatagacttcactcagtagccagcccaactacccaatggaaaatgtactgtccccaaatgattatttcattcattttttcaaggacacagtaattgcgtagaactgtgaggttccctccagtgtgccaagaactgtgctggacttttaggaaactcaaagaaatgagagatcaactctttcccctgaataatttacaatctaattaaagagcacaattcctggaatgctgcaggtagttaaaacttagtttaaaaattgaatgccttaatgataagatatacataaatgaaccaacaaaagaataatcatttattaacaaatttatgcaacaaatgtagggagggcctgttaatgcttcagaatctacaattattgttgaaagttgattcacagaggaggagatctgagctcagaaagtttaggtagagatctgtttactgagatggttcctttgggactttaaatcaaagtaatcaaacgtaagtgagatcagtttagttgctaagagccctaactgtgagataaccatgtgacattggcagaaagtaggctttcctagaaggatttgcaaagaaccagtggctgtaaagattcaaattggtcacacagggaagtagaagtggttagatactactactaataataatgtctaatatttactgagtgcttacttaccatatgccaggcaccatgctaagtagattacctcactgatcctcaaagcaacacttacaacaaggaaactgaggcttaatgaagtcaagtaacttgccaaggatgcacttagtggtggagtgggaacaaagatcaggcttgggctacatggaaagcaatagagtagtctgtggggtaacctgcaatttttaggagaggaaaggcaaatgaagaattaagaacaggctgggcatggtggctcacacctgtaatcccagcactttgggaggcctaggcaggaggactgatagaggccaggagtttaagaccagcctgggcaacatagcaagactgctgtctccaccaaaaaaaaaaaaaaaattaataaaaaagttagctgggcatgatggcgcatgctacctgcaagctgaggagtcgtagctacttgcgaggctgacgtaggacgactgcttgagcctgggagttccaggctgcagtgagctatgatcatgcaactgtactccagtttggggaacagaatgagaccctgtatctaacaataaaaaaggccataaaatgggttctggcacaacctatggctgagtggtttttctgttcaaggcttatatgagaatagaagctggagccctgacctcctttaaacctactctaaattgattcagttgctcaatgttttaaacaagtgcacatatgatttccctctcccttttcattttaagttaggttctgcttagtttagcagggtgaagccccaatccataagaaaaatatgtgccagggaaaattcacccttctgaggtgaagccccttgctctgaagagccaaaccaagagggaagagtgagatgggtgaggtgcctccatctcttacccttcaggagaatgaccaggtgccagggaataatacaggtccctctgggttggaagtttgactctggtcacatggggtgcagttctggctcatgctcctgaaggccagagtccttggtggcactgcggaat

SEQ ID NO: 2136 - DNA, 4001 bp, Homo sapiens
attgtcacacatctttgaagaaattccctgggaggaaagaatggcttttccaagtacggtgacagcagtccctcgacttacaagctttctctgctcctcaaaaaactccagaagtgcctgggattaacagaaactccgtaaaacttaaggagtgctttagggacaaagcactcttcccgccttgaaaatacagcatttaccttcccgtcactaaggggcattaccaaaaactactacacacactacatctaagacaccctctccaccaaaccaattgaaaaagtgcttcataacacacatacacacacgccccccaagtttccaaaaacagcggcccgagtgtacttgggatcaaacgctgtgcgagaaatgtccaggagaactactgcttatacattactcttaccttcatgaccactcacgttttaaaatcgcacgtccggaacgcatcacatccgacgtgctttatccccttaccacactaagaacgcaaagactggcggcaaatcggagcaacttacttaccatcaatctgaacacccaccccaaaccctgcaccgtctccaaggggtagaggaactgagtacaaaggcacttggtggttccctctaccttggcacctctctctctcccactgagtctctgtaaattccaaaatacaccatgaaaatctccgcacagagcactaccagaccagtcagatggagagtcgagaagtaatcggtttgtcccttccacgggggccttggaaacccggaccctaaaagccaaaatgaccagggggtgtgacctgggctgctccctcccatttactcccctcacgggaactcccttgtcgtcgcggctactcaccagaccagagagcacagaaagaggcaggagaccagggccaaggcccgccggtgcttcttcatcttctcctccttcttccccctgccagaaggcggcacatcctcccggcagccgccactgccgaggccaagatggaggagccggagcaggagcgcgagaatgtgaccgatagtcctaagggctatggcgctggctgagcggctcctcagtggctcgcgtcctggcagccctctctgagggccccacagaggcgcggacaggggcgcttcacaggactccggggaccgccgccgctgcagccaccggctcgtccacgcccgcctcctgcagccgccactgccgccccatatcctccccgcccgccgggggccttgctccgtgaggccagcgaccaacggccgccgcgtactcgcctctcaacagccaatcgccggcggggccgcgacacctcacacaccgctgagctggaaagggacgcgtcacccaagtcccgcggcgcccgcacccccaccagcctctgcgcaggccacgcccccttcgacgtcgcaggcggagaagccggaggcaggagaccacaaagcgcaggagcagatgctctcgccgctccgcccgccccaggtcccgcccacttgctggcttgcgttcagaaagccgggaggagcccagtgatcctcagcatttccccttacagtggaccgcccttcgtccctcgcgcgctgagtccgcgcaagggcctttgggagttgtagtttgccttccagaattcgtttttctctttcccagtccctcctagaatccatggttttgttagagaagtctatagtttcgctgctcaccacgagactgatcagctttggaactgttgcactgttttcctcttttgagcacagttcgtggaatggcctagaatgacgtgtgtgttgtgagggaagctgcaccaagccctttccctgtggcaatggactgccccattgagctagatgttgattggtagatagaaaggggcgtgccaagaatcctctcatctgattggttgcagcggaaaacctttcgctttttcttctcttcagcaagaatttcgccgcttgccgggttcctcactttaagtgtgcttcgttgcttttcgttctgttggtttcgaactttgggttctctgcgatggagtcggaagggaggagttgtccccattagaggagcacccacagacgctccaagtcctggggttcacctaaagtggggaaggcagtcgcttacactcacctaagaagagcaaaaagtgaccacttctcaatactaagtaacggggcagcatgcccattccaagtgtttacgccgctgaggggacggaggctgcaatggtctgtgccttggaacatggcataatgtttagtgtgaaaaatgtttaaaggacgggttacttattgttcatgtggccgtagggaaaaaaccctcagtaaaatgcccacctaacgcctaattttgagccgcggaatttccttatgaaccttctaagttgaattggatgttaattatagtcccaaagaactgaatgatttgatccgctctgtgattcttggatataagtcaatttgatgttagagaaattatacaaagggtgataatttttgttttaaaggagttcaccctgaactgccttttctggcagtaattaggtacagttccacttatctgctgatgccactcttagtatatgacaataaaatcctttcatctgtcacctattgcgggaagcaagtatttatctcacccaaaaacagtatcaaatgattaatatgcaagtttaaaagaaagtaggggcaatgaaagggtagggataaattgacattctttaccatgttggacactcttttcctcttactccaggaacttttattcaggataggaaacagctgaggtatccctcagctgatcctcagtgcatcacagccaaagaagttatattagaatacgtgcttatctcaaatctaggaagttatcaagttacatctcctaaccctctcatcccaaactcacaaacccatccacttattttccaccaagtccctgcaatgattttttgaaacatgcaagtacaaataattttacttttttctttctctttcattccttccttgactgcctgcctgccttcctcccttccttccttccttctcctgcagttggagctttattaatacccccgtggtaggctttccattcacctaattatcatccaattattagcttttactatttcaatctataaatgttcttttctctttttgcagcttcatttccatggtttcatgttaaggtttaatccttcactactccgagctttttccatttttctcttgagcaattttaattttcaactatactgttgactcctaaacctatatcccatcctcttttcaagtagttgctggacatattattctatcacttccaattttacctgcacaaaattgaactcattttccccataaattagcttcttcacgtgactttctatatttgtgttgattctttcctattctaagacttcagatgaaataaatagaagttccatagagctgacctttaaagaactggtagacatttttccacatatctgttaaatataatgagaaaaagaacagagaaaattttcttacaactcaatagacaagtataagaaagtgagtaatagttatataaaataaaactagtatagatgaatgtcaccatacttaaaagtataacatatgccaaaaatggcaagaaagaatatagaaaaagagcatgtataatgtataatctttcatatataatatttaattatatatataatcttttaaggcttaggctaagtaaccactatcaaccaccccttaactataatacagtaattctcaacctggggcagacttccccccagggtgagattggcattgtgtgaacacattttttgcttgtcacattggagaagtactactggcatctagtgagtagaggccagggatgctgtttcacatcctacggtgcacaagaaagccctccacaacaaaaattatttggccaaaaagtcaaaagtgccaaggttgagaaaccctgctgtaacagaatctcccaattcaataaaatctataaagcactgaccacacaca

SEQ ID NO: 2137 - DNA, 4001 bp, Homo sapiens
gaaggtgagaaaacatactgagggttagcttaatcaaaagatagccagaaattcccaaaagaaatagaagcagagttaacttaaatttacaaatgattgtaagaatcacattctattgcttgatttcgtttacaccatccaattaaaaaattaaaaaaagccagagatactggtgtgtttttaaacttgaatgaaagtgttcaccttttccttattagccatttcagaaacttttgatgatgaataacatggtttaaagatgggcaagaccaagaagaaagaggaaagaaaatacacagtctacaaatataactaggcagccccagaaagagatggaaatgaatacaagcttcagtatctacaaatttaaatttaaaatgaggtgagtggatttatctcttacaggcacttctccgtacccaacacagtaagtagaaaggggaggattttattaaaaacaggagacgggtattaaaaggattcagaatgaaaggtaataagtcaattgtttttgttctcaaaaacttctatcattcttccaataaaaatccctcagccaggcgagtgttttctcttccccttgtttatgtattattttatgtgagcaacaactctacaatttcagtgcttctggaatccataaggcatccataaaaatgaaaatagtgttggtgctttgcagaaataagcaaaacaggaaacttaatttctattttaatataacaaacagcaaatcgcctagactgaagaagcatcttttcagtcatcaattgtcacacatctttgaagaaattccctgggaggaaagaatggcttttccaagtacggtgacagcagtccctcgacttacaagctttctctgctcctcaaaaaactccagaagtgcctgggattaacagaaactccgtaaaacttaaggagtgctttagggacaaagcactcttcccgccttgaaaatacagcatttaccttcccgtcactaaggggcattaccaaaaactactacacacactacatctaagacaccctctccaccaaaccaattgaaaaagtgcttcataacacacatacacacacgccccccaagtttccaaaaacagcggcccgagtgtacttgggatcaaacgctgtgcgagaaatgtccaggagaactactgcttatacattactcttaccttcatgaccactcacgttttaaaatcgcacgtccggaacgcatcacatccgacgtgctttatccccttaccacactaagaacgcaaagactggcggcaaatcggagcaacttacttaccatcaatctgaacacccaccccaaaccctgcaccgtctccaaggggtagaggaactgagtacaaaggcacttggtggttccctctaccttggcacctctctctctcccactgagtctctgtaaattccaaaatacaccatgaaaatctccgcacagagcactaccagaccagtcagatggagagtcgagaagtaatcggtttgtcccttccacgggggccttggaaacccggaccctaaaagccaaaatgaccagggggtgtgacctgggctgctccctcccatttactcccctcacgggaactcccttgtcgtcgcggctactcaccagaccagagagcacagaaagaggcaggagaccagggccaaggcccgccggtgcttcttcatcttctcctccttcttccccctgccagaaggcggcacatcctcccggcagccgccactgccgaggccaagatggaggagccggagcaggagcgcgagaatgtgaccgatagtcctaagggctatggcgctggctgagcggctcctcagtggctcgcgtcctggcagccctctctgagggccccacagaggcgcggacaggggcgcttcacaggactccggggaccgccgccgctgcagccaccggctcgtccacgcccgcctcctgcagccgccactgccgccccatatcctccccgcccgccgggggccttgctccgtgaggccagcgaccaacggccgccgcgtactcgcctctcaacagccaatcgccggcggggccgcgacacctcacacaccgctgagctggaaagggacgcgtcacccaagtcccgcggcgcccgcacccccaccagcctctgcgcaggccacgcccccttcgacgtcgcaggcggagaagccggaggcaggagaccacaaagcgcaggagcagatgctctcgccgctccgcccgccccaggtcccgcccacttgctggcttgcgttcagaaagccgggaggagcccagtgatcctcagcatttccccttacagtggaccgcccttcgtccctcgcgcgctgagtccgcgcaagggcctttgggagttgtagtttgccttccagaattcgtttttctctttcccagtccctcctagaatccatggttttgttagagaagtctatagtttcgctgctcaccacgagactgatcagctttggaactgttgcactgttttcctcttttgagcacagttcgtggaatggcctagaatgacgtgtgtgttgtgagggaagctgcaccaagccctttccctgtggcaatggactgccccattgagctagatgttgattggtagatagaaaggggcgtgccaagaatcctctcatctgattggttgcagcggaaaacctttcgctttttcttctcttcagcaagaatttcgccgcttgccgggttcctcactttaagtgtgcttcgttgcttttcgttctgttggtttcgaactttgggttctctgcgatggagtcggaagggaggagttgtccccattagaggagcacccacagacgctccaagtcctggggttcacctaaagtggggaaggcagtcgcttacactcacctaagaagagcaaaaagtgaccacttctcaatactaagtaacggggcagcatgcccattccaagtgtttacgccgctgaggggacggaggctgcaatggtctgtgccttggaacatggcataatgtttagtgtgaaaaatgtttaaaggacgggttacttattgttcatgtggccgtagggaaaaaaccctcagtaaaatgcccacctaacgcctaattttgagccgcggaatttccttatgaaccttctaagttgaattggatgttaattatagtcccaaagaactgaatgatttgatccgctctgtgattcttggatataagtcaatttgatgttagagaaattatacaaagggtgataatttttgttttaaaggagttcaccctgaactgccttttctggcagtaattaggtacagttccacttatctgctgatgccactcttagtatatgacaataaaatcctttcatctgtcacctattgcgggaagcaagtatttatctcacccaaaaacagtatcaaatgattaatatgcaagtttaaaagaaagtaggggcaatgaaagggtagggataaattgacattctttaccatgttggacactcttttcctcttactccaggaacttttattcaggataggaaacagctgaggtatccctcagctgatcctcagtgcatcacagccaaagaagttatattagaatacgtgcttatctcaaatctaggaagttatcaagttacatctcctaaccctctcatcccaaactcacaaacccatccacttattttccaccaagtccctgcaatgattttttgaaacatgcaagtacaaataattttacttttttctttctctttcattccttccttgactgcctgcctgccttcctcccttccttccttccttctcctgcagttggagctttattaatacccccgtggtaggctttccattcacctaattatcatccaattattagcttttactatttcaatctataaatgttcttttctctttttgcagcttcatttccatggtttcatgttaaggtttaatccttcactactccgagctttttccatttttctcttgagcaattttaattttcaactata

SEQ ID NO: 2138 - DNA, 4001 bp, Homo sapiens
aagcccaacttattacacctctcctccacttttgctaatttttcactcattttttttccattttcacctttgaattctctgaaacagcaatattttaaaacgctaaaatggtttatttacatcagtcaatacttgcttttcaaccaaagataatttatttatatattaacagtatctcagctccttttaacgtccacatcagcaagctctagagaacgtttgcaatggacaggaatgatggacagcaatgagcagtggaggcagggagactaggctctcaaattcagacaggaactccatctgtcttcctctaccacaactaaaagatacccctcccccagaaccaaatatgttatagattagccgcccacggaggctgaggctatcaattttatttcagctaacttctacttcatagaagagcaactgactttattccctgaaatcatacctcgatgagcaaagcaatctgtcagaggcacacctgaaagaatacctctgcacctcctccacgcccccaacatacacatacatgctgcacacacaggggaagggaaagttaactttcaaataaacctgccccgcagccagtctgaccacgtttccagacccttcacattctcaaaggtggttcttaaactcttgcttaaatccagaggctgaaatctgacctctatctgctgaaggcattggcaagaggtccacaaatacaccactccccactgcccccaccccccacccctcccccccccgcccccgcttccttggccaaagtgggaataatgggccaggctttattgtctttccttgggagaagccaggcccggaggctggtgggaagctccagacagaatgtgggtgtgtgaatctgtgcgggctccacatgggaattttcagggaactccagcggtttcggagaagggcggccataggctgggacgcaggcaccctcgcgttgtcagatcctcctgaagtctgggtgtatgggggaggggtgcagggctgtcctggcagctaggctctttctcccctctgggccatccccaggccctcccaccacagctgggtcactcaccgcccgtgagctgtgcagggccgaagcacagcgccagctgaaaccacaggatcacggccaagagtctctggggggactgaggttgctgctgctgctgctgctgctctagaaatccatctccattgctcgggttcattccatgatacatctttcatccacagagggcatccagcttgcaagagtctgcaaccagaagcggaacaccacaataagccagtctgtccgggctcgggggccacgctccccctcctccgctctgggacccggcgcctcggcttcccaggctccatcctggttcctcccccgcgcggcccccgccccctttcccacggcgaggtcccccgccttcccccgagccgggtgcactgagtaacagccgccgtgggatgctgcgcgtgctgggggatggaggacaggagggagggcaggggttagcgcacattggctccgcgccggtccccgggattcagcagctgtgcccaccacaggaaagtctagagcctccccgcgtctcggggccgcgaagacacttttccctgggcctatacatttcactctgggaatctcacaatgtggcaccgtctcccccagctacttctctggttttcctcgggattgggatcgatcctactgccccagtccccagtgagatttctctgcgctgtcaaaaaaaaaaaaaaaattctcccttggggagctgcaccaggcaccaactccccctccccggcctgcgcgcgcctcctcggaatggaagacccttccgggactgtcggtcttacctgtgggtctcatgcatgcagcttccttccctcctccgcctcctccccccgccagtctaacccgcatctgtgcgcgacctctgctgccgccgctgcgcgagcgagcgagacggaagcttcggcggcggcgctcggctccagctcccccgcccgcgcgctccctccccaggcgcccccgagcgggcgggtgttgggggaggacgggagcccggccgcgcgcccccgcggaggcgcccgcgcgcccgctacctgaactcgcgagcgcgcggcggcggcggcgcggagagagggagtgggtggggacggggtgagtgggggggcggggacggggcgaggggtgcgcgggcgcgcgagcacgcgcctctgccaacccagccggcgccgcggcgtggccggagactggcgagggcggggacggggaaaggggcccgccgccgcgaccaatgggaagcccgcgcgcctgcacctgtcggggcgcgaggcgccggcggccggtcttgcacacgcacgcagctcggtcgccccttccccggcgctggactgcagcccctgccccggctgcgcgccagctcaggtgcccgccccggcctccgcgcggcctctggtgcccccagcccgcggcgcggcgcgggagagcgctccgccctagaactaccgccgcggcggtggctgcagacccggggcgagtgcgcggccggcagctcccaaccccagaactctcgccacagacccggttaacttgagcaccgccaattgcccgagtctcttaatttcccgcgttaacccctccccgctcccatctccgccgaagctctgcgcgtccccagggagcccgaaggaccatctgaggcggctgagagacactctccccctcccccacacccttggtattttccctctgccagccgcaggtgttgcgagtgaggacccctgtccggtcttggagatgcgcggggccctcggagccttggcctgggaggcgctcccgggggcggggaggcgggggtagcgggtgattggtgacacgcagaaggttgggtacctggaggaggggaggcttccggggtcgtagatgggaagccaagggggtcggtggtaattgccctcccagccccaagtggagagagttggcctggtcggtcccctgtctctgcgccgattctggtgtcggagctcagcccgcagtggttgcagctctcactcgccgccggctctgatcgcccgcggtcggtttcaagatagggaagcccacattccagccacagtgattaagaggtgtcagctaatgaggtggcgtccaccggcagcgctttagagccagtgacactccatgattctgtagcaatttgtggatatgaaaactatgttcctgatacagctactaaatcatcctttgcttctatcgactttcccaaaatctcacatactgatggtagttgggaaattacagcttttatactgtgtcagctcttactgggagtaattttaacacattctttcaggatagattagcttttagtagataagtcaagctccgttattttgttttttgcttttgcgtgtgtgtgaaattgagatggcagctttgcacaaaataaacaagatgttgactagcacaagtccagttttgctacagcttgtactttgggaccccaaaatcttagtaggggaccatccaccttcccaaggtcctgtgactgtcctctacagtttgtatatttattccatttttctttcttagtaaattttctaaatctttttaaatatccaccaaatcaacaacggtcagaaatatttgttgaccatgcacatgttcttaacaattataagagatatatctaagtgccattgaaatctgttctttggctggagtacaatctaattttaacagagaatgttgggactgaaaggaacattcaagtttatctgatccaaacatgggatctatgcttgagtttcctctctgacatttctaataagtggtcattcagcctcactgaatactcatcaaggtagcctgtttatatttgccagcaggtctcttagaaaagtctttcttatattgaactgaaatctacttccctgaaacctttacccactgattctggctctcctctgtgggcccacgcagctaaatagaattcctc

SEQ ID NO: 2139 - DNA, 4001 bp, Homo sapiens
tcattaaaacacacacacacacacacacacgcacacacacacacacgccctggtagaagacggtaagcaatgctatgtggttcagagagaagcactggcaagcagcgccttatcccctcaggacagatgtaagcagtggaccacggtgaccagaagcagtgacccctatgtcaccttttcttcatggttcagggcccaaccatcccccatgaaagagctggaactgcggaatcccctcagcgcatggcaatttgctagctttcctctctttcctaaccaggatctcccctccagccctgaaggaggcaggacccaccaggagccatactctatgtttgttgaccctatttccccctgagaggggcacgtagggcagggaagccttccacaaccacagcaggatatgaggtctcaacagccagcttcctcagggccagcaagcccaggaggtcaggagagaaagaaagaagacaaattctttgagctggtgaggaagtggtgctatttttagcccccaaaacagcacagggtggctaagcctgggggagtgagacaagacttggagaggtggaggttaaaggagacaaggttcagggttacaaggtcctaggctggctgacttcacctgacaggaaaaaatgtgcccaggagattttctgcagagggtggagacaggcaggggactccagagcaaatgctttctttcagaacagctcatccagccctgggtccagaaccccccaccctcccagtcaaagcccctgactttggggtccacccagatccccaggccttcctagctcaggtgacaaggtcattaaaaagcaatcacttatcaaaacgtccgcgggggcgggggtagaatgtgggaggtgcgggagcaccccttccccatgacagcccggtcatcgaacttcagcccccacccaggaccatcaagactgcgcctcccctccccacatcctaccaaggttaggaagataggagcacccacagttctgagggataaaaatgagggtgtcagctgagaatgcacactgaggaatacggagaggcagagagggggacgcagggagagacctccgcatgcacagacatagagaccgcccctatcagcatttgcagcgacccccccacaccccatcttgcctcagctccggaataagggaaaagcccccagaactgactaaatccctgctctgagcacctcctccacccttggtcctgctgctagacaagtgtccaccttcactcaacatcccttccccccaccccggagcaactgccgccagcccccgccatccatgcccccaacacctggcggctctacatctctgtctccccagtatttccattcttcactccccttccctccatccttcacctgcccttcttcccctgccccccacccacccaagtccaggcgtgcacactgaggcagcatccattctccagccccagccaaggtcatttatcattcatcctgggggtggggggacgtcaaggtgaggaggggataggagtttgagggaacctcatcccacctcacaaccccaccaccacgttaatctccgaaggggatagtggggacttggttaaggtagagaaaaacacccctcctccccattcaccaatattatacatatgcgtgtgtgtgtgtgtgtcctgaagagcacaactgaaataaatgtccatccccaaaccaccaccaacccaccaacccccctcacccctagagaggggatcgtcaccctccccataagcaaagcatcggaggataaaatggctgcaaggcaaggcaaagatgcttctgccaggggcggggaggaggtgagcgactgagaaaggggtctcacctggtctaggttccccgggtaaggagtcccgggcgaggacgggggtcccggccgcgggcggaggcggcagcggcgactgctcccggcaccagggaagcggcaatgcagacctgccaccccccttccaccactccagccccgcctccgcccccccctaccccgcgccactgagcatcgggagagaccattggtggggagaggagaaaagaggatggggagggagtcagggcacggggagaaatgatgaaagggccggaggttgtcacaagaacagctggaaatggcacccagcccttcccaggcccttcctagtaaaagatagaaggaactaaagaaaaaaacagtgatgttaggaagacaagtgggaagacagggagatggggaatgtggcagccccttccttagcaccccagtctcagtatggcaggacccaataatttcaggggcttttgctgccttcaaaacacctcccttgccttctccactgctctcaaactcctttttcacaacagtctcccaaatccagagtgctcctattccaagtttacctggacattttagagaaagcagagataacaaggtgtggtttctatcctgaactgccagagtcagagacccctggattccttccatctctttcctcacaaaacagtccaggttacttatttacagtggacacctcctcatcctgtccattcagttggtggtagcagaagtactggggaagttgagggatttttacagacctgaccaaccggacagttccccttccattaatttgctccaatgactcaaaaaggatcctctcaatacccttctccattttctcttactctcctctacctccctcccctcccctccacacacttgtacttcccgggcaggaagaagtaaattgtttcagcttttcccttcatctttcctttgctcttgcatcaataacctggactcagagatccaagacatgccacttggtgacacttgatgaccatccctgccgaaggagtgagagggaatatggtgatttggggaaatacatcctgaatgtgtctatgccagataaggtcaggaccttccagacagcactgacctgggcttggacctgggttctcactgctaacaagctgtcaactcttggtcaagttctccacatctgtgaacttcaggtttctcatctggaaaaggggggcttggactagatactgcatcaggtccctctcagatctaatagcgtgtgattctgccttactaaatgtggaggcttcagaatgctgatatatatacatggagaaggctgacaggctatgtccgaagagaccacacaggtaacatttgccaggttgaatttacctctgacagggacacgggcctgggctttgcagactccaaagctggatcttggaaataatcattcatgccaacaaagttcacaatcttctgaaatataaagccataatacataaatattaatttatcataaatatttaactgtcactcagactgaaaactcatatctacatgtctagtacattctctccctgaagccaaatcagaatcataatgtcaatgtataaatgcacaatgacattactggaggatttgtatctttaatggcatctggccatctgcaataagcagccatgccaatgggtccagaaaactcttcttggcaacaatcttctacccccacctctttgctattggcagccttgccagcactcctggactactctgaatgtgacggctttccaggatggtgcttggactggcctcagggactctccctttactagactttcattgctgacccgtcttcaggttaacacacattctttttctttttttttttttttttgagacagagtctcactctgtcgcccaggctggagtgcagtggcgcaatctcagctcactgtaacctccacctccggtgttcaagtgattctcctgcctcagccttcccagtagctgggactacaggcacgagccaccacacccagttaacttttttttttttttttgagacagagtcttgctccgtcgcccaggctggagtgcagtggcacaatctcggctcactgcaagctccgcctcccgggttcatgccattctcctgcctcagcctcccgagtagctgggactaca

SEQ ID NO: 2140 - DNA, 4001 bp, Homo sapiens
tcccaaagccctagagaccccttcactgcagcacctgcccccgggtctcaggcagcttcagggccagagagctgccaagggcaagggcagctgaggcaaagaggatgggtgcagccttggtgattcccacgaaggatgtgaagatgctgatccccagcacagctgccagcttacacagggcattcaggaagccaaaagctgtggtcctgctcaggagtcccccagtgcagcacggcgcaaggtacaggagggaggcaaaggaagagtggagggcagggaagtgaagtccaggaagatgcaggcagtgtccaagagggagagagaaggttggagagatcagagaggtaaaggatgtacaccaggaatgtaaataaattgagagacaaagggaaaggagaccaaaaattgaggttaacagttaagactttgaggagtagatacaaaagctaccagatttttttttcctttttttttttttttgagacggagtcttgctctgttgcccaggctggagtgcagtggtgcgatctcggctcactgaaagctccacctcccgggttcaagcaattctcctgccttagcctcctgagtagctgcgattacaggcacccagctaactttttgtatttttagtacagacagggtttcaccatgttggccaggctggtctcaaactcctgacctcaggtgatctgcctgcctcggcctcccaaagcactgggattacaggcatgagtcaccgtgcccggccaaagctaccagattttagaggagaaaatggaaatgtatatcctctcacccctaaggatgctcttcccattcagccctccttcctcaccccacccctcccctgaatccactgccctgcctccaacacattccaactacctcttgtctgaggggtagagttcaacagtcaacacgtccagcgcattccaggatgcaatgctgaccccgccaaaaaggcagagcagagcgatcatggccgactcactgttcccaaaagacaggaagaagcaggagacacaggacatcacgctggagccagctggagccaggagaggagagagcaacatgagcctggccacagtgaaacccacccacagcccaccctgtcccatcagctggctttcagatagcccaggatgagacttgttccgaaggtatccaaccaaggtatccaaaaggaaggcttttcactcctcctcaacctcccttataattgtttattaataatatcagtaaccatcatttattcaatgccagccatgggccaaggcaattgatgctttacatgcattgatctagcacatcaaccctatgacacaggtactattatcacctccattttgcagaggaaacaaccaggctcatagaggtaatttgccagaggccagaggcaggtggtggagctgagattcaaaacccataacctcaaagcctgtgccctaaccacttgcaattctgcttacctcctttacccccagagaagcttctgtgccagtccccaccccatcctgcagcaccccctaaacagaaaacatgagagaggaactctctgaccaatctcttccacagcccaaggtgagaagcctgttgactgcctcccgcagcccctggcccctactatcagatctgactcagcctctcccccttaccaagcattctgagcctgccgatcttgtccatgagcagggcagacacgatattcccaggaagcactgccagtgtccccaggaagctcacaaagtataccatgtaggcaccttcgcccgtccctgtcacgtctagcgggcagccctccttgttgtgcaggaatgtactgtttatcagacggctgttcacaaacttgtactcgaacaggtctgtgggcaaaggccaagataagcaggcagtcatagcagatgggagagggaggctgttacggcttatggctcagggctctgcatgtatgaaagttagtaggaggggctctcaaaattattcacagtgctaatcacaaaacatcaaataacatcaccatgggaactagggatctttagagcagaaaatgaccatcatctgtccaacagtgtgactttgtccaagttctcccattaatagtcttagctgcttattcattctttctgtccgtgctagctgactataagcagtagcgatgccgtggacttaggaaatttttctgagaaaaacatttaaaataataaaaagtcctatccattgttgttttcctgcaacatggaaaaagctcgcccagtatgaggtgggaaatttcagtctagctcacaaaaccagcatttcgtgtgcatatactgaagtttgagaatcactattaaaaaggagtggattcatgcaatgatccgcaccaaataccccttttattgattgtttttctttttcccaagaatgctattttggatgatttttaccttcttcaaaagtgcattaattttacctcactgagttataatttcagccaaaggcaaataaacttgatgtttttgtcagatattctattacaggaaaatgtccaacatccattagattttcagaattattggtggtagctatcaggcccctctgccaccttcccacaggggtccagggatctcagcttgagaaccctaagatagtgaatgaaaaaggttccttctcatcaaggtccacccaaccctttggtctgacacccaccagccaccccgccttaccagtgttatagaacacagtgttgatgaatgtgcagttgcggaaaaacgtgttgctggatgtgacatcctcaaaataacactcttcaaacagggaatcctcaaaggacactgacttgagccgcagcccaatgaacctgtaaggccaggatggtgaaagacactcccccgtcatcctcatgccccctccaagactcactctttagcgaagtaatgggaagctgggcattgagaagaaaccacaagtgtttgccccccaaatgtcttgtcttgaacccctagactcataaaagagacgaggtagaaggaacagggaagaagtgaagtttaaaagtccccacatacttgtcattgaagtactgcccgcctcggtggatctgattctccaacgtgaagttaaaagttacatgctctacgcgctccccggggaacactttggtgcgggatgcgtagtccactgcctggagatggcggatcatgtcaggaaaccagacggtcaggccatagtagctgaagagtcaaggacaatggaaacagacaacagggcttcagacaaggctcagagattagaatcaggcagaggagaaaacggaaatgtgtatcatctcagaacaagggagaaatggagtcaacctctgttaggaccttgctcctctccagcctcaccagcttctccctgctcctcccttcaacagttgctgcgctcctgggggacttcagggtctcgcacagcagccactatactttttcttacctcccaagcatttgcttttccctctgccaaaaacactcttctccaccccagccacccccactccacctgtctgactcccattcacctttgaggacttaggtccccaccccagcccaagccccaagtgctcccactgcccttcccccacccttctctcatcaccctgcttcatagcaagtttcgtctcacttcttttttttcttttgagacggagtctcgctctgtcacccaggctggagtgcagtggcgcgatctcgactcactgcaacctctgcctcccggattcacaccattctcctgcctcagcctccagagtagctgggactacaggcgcccaccaccatgcccggctaattttttgtatgttagtagagacggggtttcaccgtagccaggatggtctcgatctcctaacctcatgatccgcccgcctcgtcctcccaaagtgctgggattacgagcctcatcgtcctgcttcttaaccaaaacataaactccaggaggaccttggaccacatctgtttcatcccagcacagaatag

SEQ ID NO: 2141 - DNA, 4001 bp, Homo sapiens
ggacactcaaacagcccatggaaaggctcgcaagggaagaactactggcatcttgccaacaaccagaaccaactaacagccaggcatgtgagtgtgttacctttgaagctgatgatcctgcacccctaatcaagtgacatgacagcagccctggcacatatcttcactgcaacctcaggagacccaaagccagatcaacccagaaagtcatttctgagttcctgacccacagaaactgtggagtaataaatgtttactgttgttttaagctactatgttttggtataacttatgcagtagcaatagatgaataacattatttaattcttcaaacattgacgattccttcttcaggatgtcttacaagcacagaccatgcttagaaattcttacaaaaattcccacagaatccagacactaaaatctgacccttttaatctggtttccagctggtgttaaatgacattaacatactgaatctagctttcagttaaccatctagtcatttagaaataaaaaatcatcatgaacgacagtaaaaaaaaaaaaaagaaatgagaacaagaattattggatgatgcacagatatagttagcatttctgtaagttatagtcagtgttatcccatttttaattgactgttgagccatgagtcaactacacattcaggaatactagataaaagctgtacgggacgatcagtaaaagggatttaggactataactcacagaagctccacagggataatctgttcccattaaactggggagaggttaaacacacacacacacccctccagatatatacttcttaactatagggggaggagttaatttccagttagtgcttcaaagtgccaaataatcatgctatctcttccccggggttctgaaacaagtaggaaacaaatagaccaagaagattggcgtttatcaacttaattaactaagaaaagctaactggaagcgcgcgtcttgttcttgagactaaattgggcttccctctcctgccctgatgcctagaaggttcggaccaagcccaagcagggcagccagaaagttcacgtttttctcctttctgtcccagtggatttatcgcggggggacagaagaaagaaacaagaaaggctcgaatgtcaagtaggcactaagagtgaaggggagagaagtacgggggacaggggactcgctagcatatgttttggggatctgaaacgcatcaaaattaaatgccccgaagctctacccactcagagctctggttattaaaagcctgaaaacaaagcaaaatagagcaaaacaactaatttctatccactggccacaccgcagaactgctgatactggcaacatgaagactaaagcaaaaataaaaacaaaggaaaagagtgttcgggtcacggtgtaggtgagggtgcgaaatgaagaacagaccctaattccaagtcagctggatggacaggcaagctcgtcagctgctagtaaaccgccgcgggcccgcgggctccgcacgaaccgaccagaccccaacaccgggcaaggggcagccccggaggcaagccgggccagaaccacaccctccacggagctggctcgtccccggacccgcccacagagtcgccccgcccaggtccgtgtgactcctgagtccccagtccggccggccgcccgcccgccagtatacttggggcgggggacgagggggaacctgcccagcaaaacgtcaacgcaccccgcagttcctaccttaccagcgccggcggcagtggcaactccggagccccaagccaaaggagagggacccccgcctcccaacacacacacacaccccgccccaccaactgtatgcctgctgggaaacgtagttctgcgcccgcatccgcactacctactcaccgccccacagcgctcgcttagatttgcatttacttcctccgaggcttgaactccggccccgcccccagactgcgcagtgtatcctgggtgctgtagtctttgttcggtttggtggttggccggtgggccggagacgcaccgtagaaaccgaaccctcttacccaattggacgccgtccccagtacgcttctgcgcagtttgtggtggcgtcgtaacgcctcggggaaagggaagcggacgggcatctggaatcgctgcctctggctttctgttttctactaacaggatttggtcactggttcttcatcttttgtctgttgcacgcatcccgccctccccacttgcttccccactccttggatccagccctgtgggcattcacgtcagttctctgaccccgccgtgagccccgctccgggtccccgggcgggcttggcacggaggcggtaactatggagaatatggcggaggaggagctgctgcccctggagaaggaggaggtggaggtggcccaggtccaggtcccgaccccggcccgggactcggctggggtcccagctccggccccggattcggctctggactcggctccgactccggcctcggctccagccccagcccctgccctggcccaggctccggccctgtccccgtccctagcctctgcccctgaggaggctaaaagcagtaagtgcagaaggcccagatctttctgctgcagaagagagaaagtgcgccttgctgggaagtaggggaggcccttcaccgggatggtttttatggggcaaggcaggtttaggaaaatggtggggaggaaagaggggcccgtgtagcggctaaagcagggttacagaatgggagacggcatcttcataagcctcgaggatgtcacggtgagggatatgcggagagcaggaatgctgcagatagaaggaaataatgaggttaagggctttttcttaaaagggagtctttttaaggtacaaaaataggaagttacacataatttggtagtttcccgcagtccagtctgccatggttaactaagttctttcaaatgtgacatagtaaccgaggcaacctgtttacggtagtagatcctagctgccaacatttctaaaccattactgtcaactagcttttctgcttcgacagccacaaggagatgagtttttctcatttcagttttcttttcccccgctagcagcttgcctccgaaaagattttgaggctgagtagtagtttaggaaagagtcgactaaatttacggatgttttcccccatacataaataccaattgagttttgtactccattccatcagaaatagactgttgagaattaatggcccatattattgtgcttctgaatgtgcctgcatgttttctaagtggtggtttattggaccatataggaatttaaaagactgatgagtaacactttcttaaggatcttctaacattttaaaatgtaaggtctaagaaagacataatttaagttcttttaacatttagtttgtggtcataagttgacctttatgtgctttctgaattggaacttaaaataatctttaattcattattttttctacttctaggccagttttgagtttaatatttataaaaggttagatagttatagataggattattttgcagttttgaaacaacatacaaattgttatagatttcagagtagggctaatcacaggaaagacaaaagtcagaatgcttcaggtaagccccttctcattatataagatcagagcttgtaggtacaaaataaggccagttgtttcttcaactacagtgggtagggatcggggaggcatggggagctgagagggttccaccctcctaagtagcctcctacctcacttcgaagttgtatttgtttatattagtcagaagtggttcagcagctttgggaaatgcatgcattctctacctcctcaccatcaaaaatatgttaaacatagaaaagacttatctatatattccaaaatttacaaatatgtaatttgaagaaggtatactatatgggaaactgaaaatgcattagtaggacaaatatgtaatgattgagaagtctgaaatgcattagaac

SEQ ID NO: 2142 - DNA, 4001 bp, Homo sapiens
tgctacatagtggtatgtggctaaatcatataagatatcatgacgtctgccttgttctgtcttggactgctcactctagggaaagtcagagtgtcatgaggacactcaaacagcccatggaaaggctcgcaagggaagaactactggcatcttgccaacaaccagaaccaactaacagccaggcatgtgagtgtgttacctttgaagctgatgatcctgcacccctaatcaagtgacatgacagcagccctggcacatatcttcactgcaacctcaggagacccaaagccagatcaacccagaaagtcatttctgagttcctgacccacagaaactgtggagtaataaatgtttactgttgttttaagctactatgttttggtataacttatgcagtagcaatagatgaataacattatttaattcttcaaacattgacgattccttcttcaggatgtcttacaagcacagaccatgcttagaaattcttacaaaaattcccacagaatccagacactaaaatctgacccttttaatctggtttccagctggtgttaaatgacattaacatactgaatctagctttcagttaaccatctagtcatttagaaataaaaaatcatcatgaacgacagtaaaaaaaaaaaaaagaaatgagaacaagaattattggatgatgcacagatatagttagcatttctgtaagttatagtcagtgttatcccatttttaattgactgttgagccatgagtcaactacacattcaggaatactagataaaagctgtacgggacgatcagtaaaagggatttaggactataactcacagaagctccacagggataatctgttcccattaaactggggagaggttaaacacacacacacacccctccagatatatacttcttaactatagggggaggagttaatttccagttagtgcttcaaagtgccaaataatcatgctatctcttccccggggttctgaaacaagtaggaaacaaatagaccaagaagattggcgtttatcaacttaattaactaagaaaagctaactggaagcgcgcgtcttgttcttgagactaaattgggcttccctctcctgccctgatgcctagaaggttcggaccaagcccaagcagggcagccagaaagttcacgtttttctcctttctgtcccagtggatttatcgcggggggacagaagaaagaaacaagaaaggctcgaatgtcaagtaggcactaagagtgaaggggagagaagtacgggggacaggggactcgctagcatatgttttggggatctgaaacgcatcaaaattaaatgccccgaagctctacccactcagagctctggttattaaaagcctgaaaacaaagcaaaatagagcaaaacaactaatttctatccactggccacaccgcagaactgctgatactggcaacatgaagactaaagcaaaaataaaaacaaaggaaaagagtgttcgggtcacggtgtaggtgagggtgcgaaatgaagaacagaccctaattccaagtcagctggatggacaggcaagctcgtcagctgctagtaaaccgccgcgggcccgcgggctccgcacgaaccgaccagaccccaacaccgggcaaggggcagccccggaggcaagccgggccagaaccacaccctccacggagctggctcgtccccggacccgcccacagagtcgccccgcccaggtccgtgtgactcctgagtccccagtccggccggccgcccgcccgccagtatacttggggcgggggacgagggggaacctgcccagcaaaacgtcaacgcaccccgcagttcctaccttaccagcgccggcggcagtggcaactccggagccccaagccaaaggagagggacccccgcctcccaacacacacacacaccccgccccaccaactgtatgcctgctgggaaacgtagttctgcgcccgcatccgcactacctactcaccgccccacagcgctcgcttagatttgcatttacttcctccgaggcttgaactccggccccgcccccagactgcgcagtgtatcctgggtgctgtagtctttgttcggtttggtggttggccggtgggccggagacgcaccgtagaaaccgaaccctcttacccaattggacgccgtccccagtacgcttctgcgcagtttgtggtggcgtcgtaacgcctcggggaaagggaagcggacgggcatctggaatcgctgcctctggctttctgttttctactaacaggatttggtcactggttcttcatcttttgtctgttgcacgcatcccgccctccccacttgcttccccactccttggatccagccctgtgggcattcacgtcagttctctgaccccgccgtgagccccgctccgggtccccgggcgggcttggcacggaggcggtaactatggagaatatggcggaggaggagctgctgcccctggagaaggaggaggtggaggtggcccaggtccaggtcccgaccccggcccgggactcggctggggtcccagctccggccccggattcggctctggactcggctccgactccggcctcggctccagccccagcccctgccctggcccaggctccggccctgtccccgtccctagcctctgcccctgaggaggctaaaagcagtaagtgcagaaggcccagatctttctgctgcagaagagagaaagtgcgccttgctgggaagtaggggaggcccttcaccgggatggtttttatggggcaaggcaggtttaggaaaatggtggggaggaaagaggggcccgtgtagcggctaaagcagggttacagaatgggagacggcatcttcataagcctcgaggatgtcacggtgagggatatgcggagagcaggaatgctgcagatagaaggaaataatgaggttaagggctttttcttaaaagggagtctttttaaggtacaaaaataggaagttacacataatttggtagtttcccgcagtccagtctgccatggttaactaagttctttcaaatgtgacatagtaaccgaggcaacctgtttacggtagtagatcctagctgccaacatttctaaaccattactgtcaactagcttttctgcttcgacagccacaaggagatgagtttttctcatttcagttttcttttcccccgctagcagcttgcctccgaaaagattttgaggctgagtagtagtttaggaaagagtcgactaaatttacggatgttttcccccatacataaataccaattgagttttgtactccattccatcagaaatagactgttgagaattaatggcccatattattgtgcttctgaatgtgcctgcatgttttctaagtggtggtttattggaccatataggaatttaaaagactgatgagtaacactttcttaaggatcttctaacattttaaaatgtaaggtctaagaaagacataatttaagttcttttaacatttagtttgtggtcataagttgacctttatgtgctttctgaattggaacttaaaataatctttaattcattattttttctacttctaggccagttttgagtttaatatttataaaaggttagatagttatagataggattattttgcagttttgaaacaacatacaaattgttatagatttcagagtagggctaatcacaggaaagacaaaagtcagaatgcttcaggtaagccccttctcattatataagatcagagcttgtaggtacaaaataaggccagttgtttcttcaactacagtgggtagggatcggggaggcatggggagctgagagggttccaccctcctaagtagcctcctacctcacttcgaagttgtatttgtttatattagtcagaagtggttcagcagctttgggaaatgcatgcattctctacctcctcaccatcaaaaatatgttaaacatagaaaagacttatctatatattccaaaattt

SEQ ID NO: 2143 - DNA, 4001 bp, Homo sapiens
cagccttattttttatattaagtattatatctagcttttgtgtcaattatacttatataatacttatgttacattttcaataactatcgatgtatgtaacacaatgtttctatataagctgatacactgcttttccatgctcctacctgaatcaatgttttccccatttttggagagattagtctttgcaaatggaaactcaaaatcatcttcagtacatttgttgaaactctagagacacaaagaagttcttaaatattctgtttcataccactctgatatactaatagtgtaatatatacatatgtaatatacatctgcttaaaaaggttactataattgcaaatcctttaatgtacatacagtgtttaaaatatcaaatgccttttctatataaacaaagaaaaaattctaattagatatttccacttgtaagatgaagctaaactataaattactcaatatatggctttgtaggtattcgagaataatagtaaatctaactagtagtatagaacaatattagtagatttcttcagtttatgatttcccttgatagaattaaagattgtctttattgaatagcatttaataatatattattgcctatagcagccacaagaattgttttacagcatatacaagtaaaatattcattgcatcattgcatctccaatataaggatccacatgataaatttttttaattaatttttaaagctctgtttcacctgagaaacttggtataattcctcctatccaatgataacaccattacataaatgaatttccctctttgccctatccactaggaagctcagagccaaatctgaagctcagtcacaacacgaattattattcatatataggcatttgtccaaatagtcctcatttttcttgataattttcctaattttatcctaacatattctactatctcgtagtatctgtcctataagttgccacgaatcaaatacggaaagaaggagaattaaaataagcacgttccactatgtatgcagagttctacggcagcagtcattatttaaatgaatgatgcctacacaataatgctcactgttcatttaaagcaatgggattcaaaattcttgggtaaatgagaccatttattgagaagaaataattataaaacaccaccaggaagaaagtacacttttcttcatttccctaaagttaagaagagtccaattaagagtcacatggaaatttaccttgaagaaagtggaatcgcctcccagggtctgaggtttcaccgcagacacctgactgctgcttgatctcggtggtacgaacaatgcaaagggcttttgcttttccattttctctgttacggttgtaaatatctactgccccgggggggcgggaggggaaggaaagttttttttcaccgagtgtcatgaatacactatgtattctttaaagtgatgtttacaaactaaatggctaaaaaaaaaggaatccacggggctctcgctacagtggagccctacaacgtcgcttaccgcggagtgggcaacggaataaaccctcgtttccttctccctttcgccctaccgcccgctgccacgctggcctgaaaagaaagcccgttcccttctcctgtcccattaaattccatcacatcgccaggaggaactgtcttaagttcctggaccactacccaaaagaaaacagcggagggctgcggcggggaggtgcagtagcacaacatcgccccgctctgggctcagtccccaggaaaataactcggggcacctgccctcacctttgaagaactagcgggaaaccgtgggttctgtgcccacgcgaactgctacatacggtctatgagggcaacagaaagaaccaatggctcccgcctcagaacctcagaaaaggcgggaaatcgctcagcctgagcggcccggagcgcgtgggccccgggcggctggcagttcaacggctaaataaccgtcgctgtgtgggcttgccaggctcccaggacctgaatctcgcgagatttccctaatcgctaggaacaattgtttcccggattctgtatttccttggagtggaagttctttaggcttctgctattgtcaaagaatgctagggaaactgtcaggctctatgacagactgaagctgagagtgaaaaatccatttctgccctccaagaggtcacaatcttaggaaggaaacagatgggcaaacaattaaaatgtcctataatcatttagggtaattcctatgataaggacgtaggcaaagtggctcttagggtggcttggggagtcaggagaagctccacagatgtggtatagttctgttactgtttcacataagaatgagtgaatggagagttggctaggcgggccggtggctcacgcctgtaatcccaacactttgggaggccaaggcgggaggactgcttgagcccaggaaggagttcaagaccagtctgggcaacgtagtgagaccctgcctctcctaaaatagccgggtgtggtggtgcgcacctgtgtcctcagctacttaaaaggctgaggcgggaagatcacttgagtcttggagacagaggctgcagtgagctaataatcctgccactggctccagtctgggcaacagagccagattctgtctcaaagagagagagagaggagacagaggagagaaaggaggcagagggaggaaacggaggagagtagggaaagaggggagagaggggagagcgggggaagggggagagggagagggagagggaatggggaaagagtattgctggctgacgcaaggcgagcaaaggcattggagttgtgagagagattattacaactaagtccaagaagcgttctgtgtgaggattaagtggggaaaatggcaagagatgacactagagatttcaagagcaagtattagccgagcgcggtggctcacttctgtaatcccagcactttgggaggccaagaagggcggatcacttgaggtcaagagtttgagactagcctgaccaacatgacgaaaccctgtctccagtaaacatccaaaattagccaggcacgtggcacacgcctgtagtcccagtgactcgggaggctgaggcaggagaatcgcctgaacccccggggaggcagacgtcgcagtgagccgagattgccccattgcattccagcctgggccacagagtgagactccgtctcacaaaaaaaaaaaaaaaaaaaaagagagaaagagaaagcaagtattatagaaaggccttggaaaagtgtctggatttttgactttgtggacggagatcttgaagaattttgagcagaaaggattacacgatcgagttcagaagaaaacttgtagtatgaagaatggtttaggcttaagagaccagagtagcgagacagttttaatagcctgggtgagacatgaggacttgagctatgacacggacagtggagtgaagaggaggtgtcaaatgtaaaagatatttaagaagtaaaattagtagaattttataactttttagtagtaagaagtgaaagaaagggagcagtctaagatgactacctggtttcaggcttgagtaactagctattatcatcatcctagtgctaagttacttaattttgagcaataaaataatgagctccattttgaatataccattgactttgttttccaactttctctgggcatcataatataattgatgctttttctaaggactttagcaatatttttaatagctcattttgtataatcagaaacaatcattcccgataaaataaaatttttgagcagtaaaggatgatccagtttaactccttcattttactatttagggaaactgagtctagatactctgaaaaagataagatactccctcagagagatgatactaagaatatacacaaagtaccaccagaggcaataattgatctaattaaaaatttttattcaattgaggctataaatctaatatcccaatatttttaaaagttttacaaca

SEQ ID NO: 2144 - DNA, 4001 bp, Homo sapiens
tgaatcatttgatttgtcttcattgtttgataagaagttttgtgaactttgtttctccccactgttgtgtgtttattggttaaacaaagttaatgtgtataaatccagtcctgtaggatttataattactaccagagaaaccgccaagtactgtgaataccttttacatttcaggatttaatgttttccaaattattcctgacttataagtctttatgatcactaaaaatttttatatgtaagagtattcaaaagaccatgttgttttggctcactttgaagatattatactcctttcaggaaagatattttgatatttacaacataattgactggtttctagaattgataacctaaaccttcagtgatagttaaaaatcatgcacatacaaaatagggagcttaatcctattataaggatcaatatactttttaaaaaactaatttacttctcttataaataggatttaagtttgcaaatgactgctttaaaaacaaaactacctgaggaacatttttcttttgattaaaatgttagtgtccttgatttttcacaataaaaagattactttgttgaggtttctttgtcggggggaggcaggtggagagatggtgtatgtgaaatactacctgactaaaaaattctacttatggtagggttttttttgtttgatttgtttgggtttttggttgtgtgtatgtatgcatgtgtgtgcgtgcctgggagaggcaaaaaaaaaaagttgtaatgagtaaaatgacagtttatgaagcctataaaatctaccttgaatcaaattcaaatttacaaactccacaaaagtctacggatttgcctagagctacaaagaataaaaatcaagacagtgccgcccatctgtaaacctactaaaagtgtgttatacttaacctttactcctttaggtaatacttagggaatagacacactggtttttcgagaagaaatcacaacctcaattcttcatgccattgtctgattaaaaagaaaaaaaaaagcaaaacgagtaaatgcattacattaagtaaccccgaaattactttaagctgccacttacatgacacttactttcgcccggtaacgtacctgtcgcaaaaacataactttttcttggctcttaagacagaagcccagtcggtaaacagtaaggctcgcggtgctagcattttcatcgcaaagtatcctacctgtcagcgtaattctttggtctggaggcaccgacaggacacggttttcacgcactttcaaagcgcccacatttggggaggctgcctgcgttcctgtgactttgggagccgtcccacgggcacgacccttcattcccagggacagcagacgccctttgtacatccacttctgcagcttcttgactgtcactgccggcggcctgaggaaggaggggccttcctggcggtctcctttgccactgcgtatcacagaggaccccgctggatccctgaaagggcttcccgaggagcagccgtggtccttgcagcctggaggctggaggccggtgggtgcagccgcccgggcgcggtccccactccagccgtccatcctgcctccacgtggcgggggctcgtcccagtcccggtgcgcgccgcacctgatccagctgtcgctcggccaccgctggaagggaggcggcttggcacccacccggaggctctcgaggcttctgctgcaggacggccgcatccgaggagtccgcagctggcctccccgcggctccctctgaggcgaccggggcggggacacctgctgccgagggcgtccgccgcctccccgctccccgtcccgggggcaggctcggcggtacgcggcgccgcgggaaggcggctggcccggagcccgggctcccgcggggaagctgtgatccgccaagcccctgccgccccgccgcgcgcccgagtcagggggcaggtcgtgcatggcctggatcagcagataataggcctctcgcaactgggtccgcagcctgcctgtctccaggcggccgccctccgcccccagggaggagcccgccgctgggggaggcgggggacgccgttccgcctccgccccctcaggctcgggcgcagactgcgagccgccgggcaggttttcgtagtagtcggcgtcgtagtcgtcttcgtccttgtcgtcttcctcctcctctccgctgtcctcggagccctccggggagtgcggaggggcgtgagcgagcccatggctctggggggcggcctcctgcccgccgcgcggccgaggcccgagcgcccccaactgctccgggtgccctccggggacccgcgccccgggaccccacgcctcaggtgacggcgagggctgctgtaggctccgcccgtgtcccccggcgtgctcacgtgggagggtgtctgcggcaccccaggcgtctcccgcggctgccgaagaggccgccaccgcagctgcggctgccgcccggagccctagccccccggtgccgcggggaccccgccttccccggagcctggacagcgtcctcctcagagggtccgccatcccctctgccttagccgcgaggctcacccccgccagggggagaggtcggagccccgctggggagaaaaccgcgctcgcggaggcggaggcggaggcggcggcggctccccatgaccggcgctggccctcgccggctcctcacatacttggcataactctgccgcgggaaggcgtgggggagggcggtggcgccgcaacgcgcatgccccggagccccgggccgcgacggggcgcgcgggccgggggcggcagaggtgggttctcggggtgggcgagtggtgcaggtggaggcggagggcgcgggccggtaggttgagtagtaggtcggctgaagctgaccgacggaagcaggggtgggcgcacagagcgcgaagggtgcggggagagttgaggcaggggaaagaagaacgagcaggaacgtgagtttgggctggtggctgcaaagttttggttagggagcccgagaaagggaaagtgccctcctggctgtcaccccagcaccttcaccgccaccgctgcacgaggtgtgtcttaggcacagcaagtcctagcttgagagaaaacaaagattgttttgacggacaaagtacgagtgcaggtgtatctcggtgcatgtgttctagaaatgtatcaatcattttaatcgcccagagagctagctagctaaaagaaatttgcagcgattccttttctataagagttcttttatcaaaaacaaaacaaaacccacccaccgatgtctcttttaagtctgtttttccttctttatttcagttaatgcatgctaacaaaattattacatcagccaaaacttgtaaaatggagccacaaatattatgtccctcatcaccctacctacaagattatcatacaggtttgcagctttctaatataaaaaagttaacacttcattttaatttaaatagtgagttgagaagcaattgaattgaagttgagacacagtgtaatctagaaataccggctgtctcccaaaaacgttaaattccaggttctgggcagcagttgcaaactcaagtacccctcgttgccagagattaattgattcagtgactgataagaatcagtcgtgctatcatccctgatttgagttactttttttagtgtttacatagtagaaagggcctttttctgagttactcataaatatgctgacacctagcacagtgcgtgcacttagtagatactcaaatacttaagaaaatatttgttgaataaataaatgtttgcattactgaataaaatgaaataattttgccctaatttaccttatttgcaactgcagtatattttcctatgtcagttgttttcttgttgtccagtggctccaatctctgaatgtgctttgactatactacctttattagtacctagtctctgctttctggaataattgttacctgcatctgagatttgcagataagagagaatatttgcagaa

SEQ ID NO: 2145 - DNA, 4001 bp, Homo sapiens
agattaactttccctcggcaaagagagatactcctcccaactaccatccctagtatattcttggccctggaaaagccctgcaattaaagacgccaagaacatacctacggtcaacaaagttgagtctgttgcacagaagagagcaaaccacggggaaccgtgggcatttgagtgacagggtgttaggaagggcttgttccaggatttgggtttgtatcaggtgactgaggggagggttaaggatgtggattgggtactgtcagaaagcaggggctttctacaattaggtatcttagattttttttttttttttttttgagatggagtctcgctctgtcgcccaggctggagtgcagtggtgtgatctcgactcactgtaagctccgactctcgggctcatgccattctcctgcctcagcctcccgtgtagcccgccagcacgcccggctaattttttctatttttagtagagacggggtttcaccgtgttagccaggatggtcttgatctcctgaccttgtgatccgccctcctcggcctcccaaagtgctgggattacaggcgtgagccaccgcacccggcccagtatcttacatttttatataggaggcagaagtaacggagtgagactaatgctgtatttgttaataacagtcactggtgttagtcagaagaaagaaatatgtggtcattcttgtaatttgaaaagtcttctttgttttgtctcactacaacagtcagagtgattttgggattttgtgaaaccatggcctagctgtcaggtcactccatggtgaaacaggggctgcttttctctttctctgctccaactgcagcaagctatttgctggactcttatccctaatacaaattctctttctttgaatttgttccctttgcttggatatctctttctctaactcctttagttgtctggctttcaaacagtagtttaggtgtcacctactacatgaggcaccccctggagacccacaaactgcattcctctctcctcctctgcacctccagggcacttaaacatcagattccctatcaactggctgaactaccacactgtagactttcaaaagtttgccattttttttattttctttttattcttttcccccagaagtcccaaaaacagatgattattttcttttcactcaaacagattctgacagaagattattattttttaaagtgaaccaggtctcttactgacactagacaagtttcttcctgtctctagctctacatatttccctaggtaaaatgaagaatttgttggaatcacggagcagggaggttgttagtaatggagactcccaaacctaacccagatacattaaattggatgtgggtgggagaggggctggagtgaacagttatattttcaaatgttctcagaatgatcccaatgtgctgccagggttgagtaccaccgaacagagctttcctctcagatgatcctgctctgttggtctgtcagacgcagtggtgtggcttcctcgtcccctctacaaaagcgcacaggcttggccagatgacggatctaagccggcctccaagactactcacccgcatcaggtgcagctcccggaatttgcgcagtctctgttcgcgcttctgagcggccagctccgccgccgcagcgagggacccctcctccgcgctgtccaccagcacctgcgacaaggagaactggcttcaggcagagccggctcagcttctcccaggactgcccaggccgagtccccgccggtccccacaggctgggcctagggcctccaccgccgacttgaccccacagtgtctgagcctccctgaagcgaaactagacttcgcctccacctctctccaggccgctccccggaaccctcaccaacaaaacccccggtgtacggtgggtggaactcacctcggatgcagctatagccgccatcacaacctttctctcttcccacttccggcaacaagatagagcacttccgtcaaccttcagacaaacgggccgatacgtacgaatgggctaccataagccccgccccttccgggaggtctccggaagttgggacccttttagctatgaaatattttggattgcgtagggtcttgcgcagccgcgaaaagtagcgtgggccaggacagcgggaggtaagtcgccaagaaaagggttgggaagagctcagaatcggacggctaggaagaaatgaccaaaaggagcctgatagccccctattctgcacgctgttcctggaaaccgcctttgcaaagacagtgagagaaatctaacatggctcactccatcttgcttctagcctcgcaggccggctgtcttcgctcattcctgggcataaaccaagctaaccatgggagaatttatagtttaacttttaagcaaggatgatcatagtcccttccttaaacagggcccctccttgtttgggggctgaaactgcctttataaaactaatgaaagaccgggaggttaggattatgaggggagaattctgctaaaatgtagtaaacgataaccagccattgtttcggaggacatcggatgtgtaacttccccaattattcctgtagataacgttatcgtagcacctaagattggtcttttgaggcatttttcagactttcgcattctggcaactaactgaccccacccagactcgtgacccatgacccaaccgcttcttctgtcccactcctcccccaagaggcggactcagctgttgaggagtgtagtccacacccctgtgattgcatctccaaccaatcagcagcatccattccctagtgccctgcccacaccaaactatgaaataccctaacctctgagctgacccttcaggaaaacttacttgagtggtaacccttcttccctgaggccagcctcaggttaatacaactgtatactgcagtagcacttttcagtgaattggttttgtctgcagtaagcaggaaaaacctgcagtgccattcattcccatgagtggaaagttctttccatttagagcttaaggtgttgtcactttctccaagaagcaggtcttgcccttggcctggtgtggtggttcatggctgcaatcccagcacattgcggggcggaggcgggaggattgcttgagcccaggagttcaagaccagcctggacaacaaagtaagaatcagtctctaaattaaaaaataaaagtaatttttttttgtttttttgttttgagacagagtcttgcactatcacccaggctggagtgcagtggcaccgatctcggcttactgcaacgtccggctcccgggttcagacgattctcctgcctcagcttcccgagtagctgggattacgggtgcctgccaccatgcccagctaatttttgtatttttagtagagatagggtttcaccatgttggccaggctggtctcgaactcctgacctcatgatctgcccacctcagcctcccaaagtgccgggattacaggcatgagccactgtgcctggccataaaaataaatttttaaaaatagaagcaggtcttccctgactaccctgtctcacttttagtactgtcatttgacactattttaattctctccaattgcataagttttatttttgtctgttgattttctatttttctcatcagcgttattactggagaacagcagagtccacccatcttgtttactcttacatgctcagcagagaggcaatgccagaattactaacagtgctaaagttactaagataagtaaggtgctggatataagaggaatatatgaaaattatttttttctgcactaacaactactagttagatacagaaatgaaaaagtaggccaggtgcagtggctcatgcctgtaatctcagtactttgggaggccgaggcgggcagatcacgaggtcaggagatcaagaccatcctggctaacacggtgaaaccccatctctactaaaaatacaaaaaattagccgggcgtggtggcgagcgcctg

SEQ ID NO: 2146 - DNA, 4001 bp, Homo sapiens
gcacagagtaagaactcacacaaggttccacaactgttgtaagtggtggaggctggagaaggcctgcagtatttaccaccctcctaggataggcgtgaggtccaaaagaggtaactacagcacatataaaaagcctggcatgcagcagtcacaatatactttttttttttttgagatggagtttcactcttgttgcccaggctggagtgcaatggtgtaatctccgctcactgcagcctctgcctcctgggttcaagcaagtctcctgtctcagcctcccaagtaactgggattacaggcacacgccaccacgcctggctaatttttgtatttttagtagagccgggtttcaccatgttggccgggctggtcttgaactcctgacctcaggtgatccgcacacctcggcgtcccaaagtgctgggattacaggcgtgagccaccgcgccgggcccacaatatacttctatctatctaacaaatttctactcatccttcaagccctgctcaaacttcatctcttccgtaaagtatctcccagacagccccatgtgtgttctcagggcactctgtatgcagcacatcttcacacttattgctccagttacagaagtacatgtgtctgtctccctgatagtgagtttcctaaggacaagcagagttctcattctgctctatatcctagggtggggctctgtaagggcagacaggcagaaaccagatgaactccaaggaggaaatctgcccaaggtcgaatggcaaagctggaagtaaaacccaggcctcctgacctccaagctgtgctgttagcacacatcgtgctgcctccaccaccccacccatggtgccaggcctctgctgggtgctgccctcacacagccgcctcttttaaacagagagaggagggaaagaagcagatgacaggaggctcagaggagaggaagccagcttagttggggcccctgacctcgggcttccttgggccctgggcagcctgcctctgccactctgtccctgtccccagagaaccgcagagctctccaaccctgttcagggatgtggctgggagtccatgtgacattgtgcaggcaagagtccgtgtgtctgactgtagctgtaggtgtggacagcagtatgggtgagtgtgtgtgtgtaagaccgctcagctttgtgcccctgtgtgacagtgaaggggtgtcgggagctatgtatttgcaccctcacctcttggtacactgggaagtcccagagccacagtatgacctgggacagaaatacacctcaccccaaacccctcagccacaggtcccttcccccaataatcagccgtgccctgccaggagggatagtggggagggcccctggacccttcccccacccatcccaggccagacgggagagaacaagccctgacagactcttaacttcaagctggcagatgcccagccttgcaccaagtggcttccacacagccacttcagcaggggaggcctctgtctccaactgacatttgcagggaggaatgaaggctagcgagaagtgtctttggctgctatgggccaaatggcacttgagcggtggatgcccactcgcctggaagggttaattttcatgtagtcccgggagggggaggggtattataaaaagccacagacaaacggaggtgccaggaccccgggacggcccgactccccgatgtcccctcacgaggcggctccagtgccccaccccggctggaccactacccctagacaggcgaaagacgcccgcggtcggggggaaagggaacccgtccagcagcaccccttccccagcggggcggcgacgcgggcccggcactgtcctacctcgcggcctgggcggcgccgtccccgccgcgccggggctccgggctggccatggctgcgcgaccccgggctggcggccgcgttattaatagccgggcccgcgggcccctcgctccggcgcccgcgcccgccgcactgccagctgcaaccgacaccggatcccggccggccccgggccgggcgcgcccacttggccggggctcctgccgggggaggagggagcggccgcgcggacctgggggcggggagaggctgcccctcccggaccagcctggggcgggggtgggaacgggggcctggagctgtctttccaaacctcccagccccctcgtcttcccgaaccttctctccacccttcctttcgtgaggtcccgttgcagggggagtcagaaggggggtctgaagccccagggagcaccttccctgtccagcctgggagggtggaggcagggttgggcgggctgctcaaagggagccagcacccctctcccgcgagtgtttgggggtgtccgctgccgctcagcgccctctggtccccacccaagaggggaagggccgcagccaccctctgggcactccgggctgtccccggcagctgtcgtgaagggcggggcagggcgcggccggggaggagggttcacggccacaccccgcgcgtttggggacagcctggagcctgggggcgggctgggtggctggggttagagagaactgcggaggagtttacgcctatcacattgagtccatatttaaccccactttctgccccaccctttgaggcttcctggggtctctctcctgctccacctgtcaccccactcagcccacttctgtcaacttcaagacatacctccccccacgtcctcagcccactagtgtgagggtcaaaccagcactgacgtctttctccccaagagagaagctgctgggccccttcccagacctgggcttcaggcgttcttccttcggattcctttttccacttagctaccctgtctggggaggtctttgactcaatcgcagaagaatgctggcaccataacaagccccaggggctggggtgcctgggaggccggtgggggaagcatgccgtggtgttgaatgtgtgtgggcttgtgtgcccctgtgtgactctgcggtgattgtggggtacatgtctgtgtgtgagcatgtggatgtgtgattgtgtgatctcagggtgaatgtgtgtggtgattgtgccatggtggagtgtctttgtggggctggcggttttgactctgtgtggggggcatgcatatggtcccgcttgtgactctgactgtgtgcttgtgcgtgactgggggttgataaatgttcattcatcctcgcgtctgagtgtgctgcctgtggctgtatatttatatttctctgtctaatgcaagggggtggaagatttaacacccagggcagccaaatatacccttgtaaggtacgcacgagaaaaagccaggttttgaggctgctggtcattttctgacttacccccgaactattccaggggaggaggctggcgaagcctcagctgctgggcatttgacatctgctgcccgccagaggagagctaaggcagcaagggcaggcctgccagaggctctgtttgctgtggtaccaagcaacaggcggcaagggtggcattcagaagagctggctctgcccctccaacccccagcccaggacctggccttaggctgtccctaggactgaatttctgacccgctcctaccctcctgctcagcgcttctttaggctgaaaccctgaattccccagggtcccagaaacttccccacctccaagcctttgttgttgttttttttgttgctgttgtttcttgcagtcagggtctcactctgtcatccaggcaggagtacggtggtgcaatcatggttcacggcagcctcaacctcctgggctcaggtgatcctcccatctcagcctcccgagtagctggaactacagatgcacaccaccacacctggataatttttgtattttttgtaaagacgaggtctcactgtgttgcctaggctggtctcaaactcctaggctcaagcagtcctcctacctcagcctcccaaagtgctgggattacaggagtgagccaccacacccagccaggccttttctgctgctcc

SEQ ID NO: 2147 - DNA, 4001 bp, Homo sapiens
gcagtaagaaaggtggagagtccccaccaggtcccagagtttgcacttgggagctcccaggctggcccgataatcccaaatgcacttttgcccctgggttccagatttgattattctcatccaaaccatgatttaagaactggtgtcacagtgctaattcttgtctccaaagccctgtagaactcaatcctcctcagtattaatggtaacttattccctagctgaattctgtactgagagcacattaattaagttattcacacaccatttggtatgtggattgtctaatttaaaatctcttctgcaatagtgcactaaatgccccctacaagtctttatgatttgagaaattgactgcacctgtccacattcctaatttatacccaggaggccttaggcactggcctagtgaagcaagatagtatttccactagactgtaacaggggaaactgaggacctgagcaagtgactttttcaaggtcacaaagtaagtctaacctagggccatattctggcacaccaaactatttagagcataaggagaccctaggaaggttctgatcaacatctaactagtgttggaaattgaagtccagagaaatgaattgcccaaggtgacatagctggaaaaggccagtctaggtctggatcccagggccccagcttctcagatcagtgttccattttattctacatgccacattttagccatgccgtgatttttattcttatttttttcttttatttaatcatagaaccacaagctccgttcattcattcatccactccctcactcatttacaggaactcggattactccagtgacctcaaaagggaacggcgagccgagagcctgtcccctgagcccagtacttgcaggatcatccaggccctggtgggtttgggggcaggacggtttccatcgcctgcttccttccctcctttgccctctgcggcttccctcttggtgaagagcggacctcgtccccgtcgtccttctcccccctcccgtcaccaaggagtggtatgtgcaggatcagagttctggaaaggttacacccgggtcctctcgcccgggtgaaatgtgagcgccctgggcaaaggctccttgcacatagaaggaccgaatccgggactccgcatgcctcgctcttcaccctcctgccactaagtccggagaagcagccccagcccgcccctcccccgcccacctgtcgccgccccccacccttccgccgtggcccggccgcagcacctccccagcccccaccctggctccattgcttcaggtcagcgtcacagcccaggctcccgaaatagcccggggccggggcagcgactcacccactggagaactttgatgaagcccagcggctcctccagccgccgccagcgcagccccacgagtaggcggtccacctgcggagacacagccggccggggggtcagggcggtggggaaccctgggaaggcgctggtccccttgccccactcacacgcggtccaggggtgggataagtgtgcagcccgacatctaggtggagaggggcgggtgagagtcctgggcgcgcagggactacctgctggcgcggcgacttgtccgccgtgcggccggcgctctcggtcgaggacatgctggcgcggcgagcgctgggcgcggcgtggtggcttggctctctggccgggaggcggcggacacggcgggggagcggggagctgcaggtccggggcagagcaggcgagcggggccggagcgcgagcggccgtcggtgggccggagtccagtctggctggctggctggctgggacgcgggggcgctgctgttcgtgctctcagaggctgcggccgccgcggtgccccgccggcagcagaaagcccccgactcggattcaaacttctgtcaaactcgcagcgaacttggccgccgggtcacgtggcgtgcgctcccgaaccctcctcccgccccctctgctccctttctccgctcgccgggcaccttaaagggaccagaggcctccgtggttagttccgccgcggggcgggggggactccgggtcctcctcgccgaagcctccgggaccggtccccaccgagacaccgcggccgtcggaaaccctagccaggcgcacctggacgcacaggcttcaggtttatccttccctattttcctggattgcaaactgcccagcgccggtttttctcctcttccataccagaatatccagaacgtaaaagattctcaaaaggcacgatcagggctgtgaaacaaggttctaagcctcacgattaacataccgccagtaccgacaaaagggcgatagaatataagctgctgattttttatcctgtctagctaggtattgttttgatttttttttaaaacaacaaaagacatttgtatgttagtgatttaaaagttattggccaggcttggtggctcacgcctgcaatcccagcactttgggaggccgaggccagaagatcacgaggtcaggagttcgagaccagtctggccaacatagtgaaaccccgtctctactaaaaatacaaaaaattagccgggtgtggtgatgtgcgcctgtaatcccagctactcaggaggctgaggcaggagaattgcttgaacccgggaggtggaagttgcagtgagccgagatcgcgccattgcactccagccctggcgacagtccaagactctgtctccaaaaaaaaagttattaatctttaacaagtagaaacttaatctcctttaaaatggtcattaccatttaaatgagagtgaaaaaaggtctttgaggaatgaggcgcaaagaatatattgaaacgtactgaaaagttgacgtctggctaggcgcggtggctcaagcctgtaatcccagcactttgggaggcggaggcgggtgtatcacttgaagccaggagttcgagaccagcctggccaacatggtgaaaccctgtctctattaaaaatacaaaaattagcagggcgtggtggcacgtgcctgtactcctagctactccgaagggtaaggcacgagaattacttgaacccgggaggcggaggttgcagtgagccgagattgcaccactgcactccagcctggacaacagagcaagactgtgtcaaaaaaaagaaaaaaagaaaaagaaaaaaggcagacagaagtggggagagagagagaggaaaaaaaaagaaagaaaaagaacgggaagggaagggaagaagggaagggaagggactggttgggttgaagtcgttgcatttttttaactgtaacttggtctctaacttttgaaaagcatttggcaggggtgagcagttgagaatattccacacttggtttacgagagcataaatataagtagtaaaaggttaagtgatttgtccaaggacaaattcctgtgcactggcttgtaaatatgtatccgtctcatccaagtcattcctgcaggtccgcccccccaaccgctccccccagcacatcagaatgaatgccttttgaacaaacatttggctattatctatacaagtcgcttccctattgagtaagtgccttcccagagccttgggatttagagagagacgtgaggaaggcagctcgggctggatcaggccacatggacttgaaggaaacttctccagtggatttccatgcaaatctagactaagcaaggaacagcttagcccagtccccagtccacagtttaaaaattgttctgccgtcttaggttcctgttctatggaatagggataataatttatgttccactcacttcacgaagctgtcataaaaattaaatagtgtgatatatgtgaatgccacactacacaaacacaaaaacatacacattaccaatgtcttcaacaatatacatacagaatacaacacaatcaaaaaagaatcagaataacacaacaaaaatccacttacacaccaaccagccttgttaatctttaactcttttttgtctcaaatccattattttctttaaatccat

SEQ ID NO: 2148 - DNA, 4001 bp, Homo sapiens
tgatataatttattttccctttcccaataatagtccctctaagagaaatcactatattatgttccacaccatctccttttttcaaggattctggaactgcagttagagaaaggaatctgttggaagggaataagaagaaaaagaacaggaagaaatcatggattgctcatgtgatcatgaaagggacttttgttttggaaacttagaactcaaagaataaagatgcggaaggtgaagtggaagaaaaaataccatcaagatttagccttgtggaataagtgagaacaagtagttaatgagtgtgaagatcagttatctgaacacatctgatttgatttcttcttccttattctgaggggatagagcacactggattctgctcatttcactgtacctcttattcaggaatgagaaaagccatttcctagctggattgtgtctccaccctaaaaactggagtcccgatgctcaaacctactggattgtctgagggatagaatccctgaaggaataagaaggttctttggcagcaactctcactggcttcccccatctaaactgaatcaaggagaagcagggcaattatattttatttatttgatcaggaaagcataacacaggaagtttgctcctttagcatatactgcaggagtccccaaagaggaaaaaacttccttctcaagcttgtctttgccaccttcttccctattttccactccactttctgctccagagagtgtaaaactaatcttggagcccacagggctgggtcggggaccagccgctctgaaatgacgtaatgctttctgcggtacacaaagcggcctcccccgggctgggcctctttcgcccctccccctccggcctggatcgcgcccccgccagcatcaacgctggtcagtccccctttttgaaaaggcggcccagggaaacagggaacaaaggccccggaaggagagcgtcggcgctgccaggaggcccagaaatagacatcacgtcatcccccagcccagcagcgccaagcgccatttggtagcatcggagggaccccaccattacgatgcggaatggagcttgcagggctcacgtttcctcctagccccagcatccagctgaccggcttaaggagtggcttcctttttgctccccaccccgcacccctctttccccagaggccgccgcctcccctggctgccagccacacggcccacagtctccaagctgccatcttgatgccccatcccccttgtcacttccctcccccgcagcccttaggaatgggagggggaggaaggggcaccgccctgtgtgccccaagggggagggcttggcctaccccacctctcctcccccagaaggaggggttcacatcctccgcacgcttgctgtttctcacctccagcagtgctgacagtgcaccatacaaggttttagcatcctggacttccccaccctcggtgtggctcaggccctgccagtccctgcagcccatagctcaagttcatgcactgtcaactgcccactacccactacccaccaccacaggcccgattttagtggggctggcattttgaaggctctggtctgggctgcattctctgccctgccgctgggcccccttggccttgcaaccattctgaccacctcaagcttagttttcccgagtctacttaccaaagctaggtcggatattggtgatctcagccatgtcgtaatcagaggctgttgctataacgtttttgcaatggtgagacagctctgggaaccctcggtcagtaccgaggcagcagctgtagagctctaggtcagggaagggggaaggtatccagcggacgcctcctgcgacggtccggcccctagttgtcagctgcgctcagctcttaagatgctccggggatgcgctgagctaaggatgcaggtgcagtcagactggtcctgatgagaggtaggctccgccttcttccgaatggtcctcggaagaagactccgcctcttccgaatggtcctcggaagaagactccgcctcttccgaaagattacggaagtcagccctcgcccccttcaggaagctctcccggaggggactcctcccaccgccgagttttcccgagaatgaggccgcgcccactgacgcgctgtggttccaaaacgagaaagtactgaagggtaagaagcataggtagattattatatgaaatcctctgatttcagttttctgggctttaatacagcagcaaaatgttctcggtcctgagttccagaattttgggaaaataaaattctgtactgcctggatttcagtatcgactgccatcattatgcatttctgagaccgctaaaggttattacagaacttttttttttggcttatatttcacagtggatggaaactgtcttaaacctcagaaactctgatgaaagaccaaacctggggatggttgcacaactctgaacatttactaattttaaaaaaacagccgggcacggtggctcatgcctgtaatcccaaacctttgggaggccaaggcgggcagatcacttgaggtcaggagttcgagaccagcctggccagcatggtgaaacccccatctctactaaaaatacaaagattagccgggcgtggtggcacacgctacttgggaggctgagacacgaggatcgcttgagcccaggaggtggaggttgcagtgaaccgagatcgcgccactgcactccagcctgggcaacagaacaagactccgtctgaaaaaaaaaaaaaaaaaaaaatttggttgtacacgtaaaacagatggatattgtggtatgcaaagctgtttaaaaaaaaaaaaaaaaacaactaatgaaaagtgccaaagttaatcagtgttgaatttttttcatgaacctcaagtgcttagggtttcgtatgagagaggccaaaccgaaagatctgtgtattctgtaggtcaaagaacaacacacatgaaactccgagcttctggagtcttccttggtatttgggagagttggtgtgattcaggttagtcagactactgccatgtttgcataaatttcaaccttcattttggctgtggataatttcatccgttggattctgtttacagataggattagttcaaatgtataaatttgtgttggtggtttacctgtaaaatgagggggttgaaagtatttttccaccttttgacattctgttttttattatttttttaatctccgtggattccagacattgtttttctagaaaagtggaaataacatcattttagaagtcattcattcattcgctcattcaaaaagcacgtattgaattattgaacatctgttacaccccaggcagcctcctggacactgggtcaatgcattattagctagagttaggagacttaatacctgattctccttgatagctgtctgtgtaccgttgtgaaatcacctactcagatgagccagaactttgtcctgtgcaaactggaatatgatataataatcttacagtctattgtggagaccaagtcacctaagaaaatgtgagagcattttgtaaaatgcagaatattgtacatatatgaataattactatagcctgagtccaagagtgccttagttttaatcaggagcctgcactatttgtaatttagagacttctttttctggcattttatgacttcttcagtcccttggtcctgtgttccaggtgactcgtagtgagaaaaattagttgttaatctttttttttttttgatacagagtctcactgtcgctcaggttggagtgcagtggcacgatgccggctcactgccacctccgtctcccgggttcaagcgattctcctgcctcagcctccggagtagctgggattacaggcgtgcgccaccacgcccagctaattttgtatatttagtagagacggggtttcaccatgttagccagggtgatctcgaactcccgacctcaggtaatccgcccgcctccgtctcccaaggtgccgggattacagg

SEQ ID NO: 2149 - DNA, 4001 bp, Homo sapiens
gagcacagttaggctaattcgaactgccatctttatctgaagtgctaatattaattacagtttctttgccaaactagaaaagatataattcctgatctttgtattatgaaaacttaagcaaatgcttcagtatgaaaatatttatgagagtatctcaaacacagaagaatctctagaatgtgaggatttaaaaaatcttattcttcaaacatgttaagcagtaggcagagtaaaatgccatcaggtgacatggaaaatgaatcagtaacacttaactgccagtagaaagaaaggaagaactaagaaaaaacggaaaaaactgaaaagattttaagaaattacaagttatagcatcatatccgaatggcatctgcctgaaggattttcctcatgctctgcctaaacctttctactttcacgtggtgtggtagtgtggtagtgtggtagagtttcacggcttcacaagaaactctaccacaaactagttgggaaaataaagtacacaacataaatcagtgggtttggtttcttgatttttaacctttggtaaaaggacagtgagggaaacaaatgttgaaagtactgctgcagataacaggaacatcatagattataggtagatcttattccccaccattttaactcaagcagacatttgaaactgtctgaatgtgtcttgcatacaataggtactccctctcttaaataaataagctacatgtaaacacacagctaactctactttggagtccacatgatccgacaaaaagaagtccccagagatgcatactaccagtgattgatcacttagaagggaaacgctttaaaaagttttacttaggaacacactttcaatgtagagaaataatgatatagctataggtaccttgcacagctgcacagatgaatatacacacacagggaaaatttacaaattactttcactgtttgagttaatctaagagacagggcctggaagatgtaatctttcacataaatatcctagacgtgtgaaattaattctcacaatctcttccttaaaaacaaggcaaaatatagacacttggtcccagttacatgtttctggaacaagagaaaaatacactttagtgtcaactaccttatctaggaacttaatttttattaagctgtttttcgaaatatgagcattgtggcactataacacttcatagactggtatttgcaggattctaagaatgtgtgcttgttgtaaagacgttatttacttcttttcatggagaaaaacagttttgagtgttggcggggaacaaaaccacttgaggaggaaattaacctaaccccaaatttcctggaccccctacaacagcaaacagaaggggaacgggcagagagtgtaacccagcatcagcccgagcgggcacagggaagggttaggaatgggacaaaaaactggactctcagtttggcaggaaggtgggtattgcggaaggatggtttgccgcggccggggaaagaaaagaaagggcagcctgagccccccgtggcccctcgctcctcccagcccgtcccgtggggtctgcagggcctcaccccgacctccactccgcgcggccggcaggaggcggcggcccggacgctgtacctgcccgccagcccgctttgccccgcgtgcggccgccgggaggccggcaaaaccacgaaggccggggcgagcgagccagtcgggcccggcgtcccagcggcgccgctccgcccacccgcctcccgagacgcggccaggacccccgcgcgtcttcagccggctccagaccacaggaggcggccccgtcagcgcctcggcctgccggcgcacctccgagccccccgccagctgggtggtcccggtcctcgctccccgctgtcagcctccacttaccttcaatcgccatgatgcgctcgccatggaccgcaccaactggatggcgggggcagcagacgcgagggctggcggaggacgcgctgagtccgccagcgagaggggcggggcccggcccggagtcgcccggctgtgcggccgcgaggggcgccgcgggcggggcgagggaggggccccgagcgccgcgagtgcgggccgcggaagaaatggaaccttcccggggccgccgctggcacgtgacgccaccccgcccccaccccaacctaccccaccccaccccaccgccccaccgcgcctcgcgcctcgattcgaaacaggtgcccggcccggagagccacgggcccgcgcccgagacccgcccgaagcgcgccgagctcgtgtgggggcccaagcccaagcttcctggcgccgggcgccctcccgtccggtacttggagcaaacggtgtccatgaaggaggcgagtggcaaatgatgtggtcaggaccatggacaggtctccttggttgaaaaggattcccacccactgactctcagatttggtaatagtaagtctgttttggtttcgtttggttttattttgttttgttttgcccgaatcagccacatactcgtctcagatctccgctgtggagaaacagctagttggcaaaaagcaaaaaggagagaggaatcctgagcacagcagtggtctctctctctctctctctctctctctctcacacacacacacacacacacactcacttcaccccttagcctcgctcttgataagccttgctgccacacagagcttggcttacctcttggaactctgagttggaatttgtctacacattgcaaacgcacatttgaagccacacaaaagtcagggtcagacggacgttttgacaaaggacctggaaagcatgtcacacgcaggtttttaaaaatttgtaaacctgtgaccattgtgaacagtcccaggccaaccctgagcacaacaacaattggccacttagtttttacttaagatacttgaaccgctcaaccatttacccaactctcaacttcatttagtaatttgagaacctggacaatcaacggcataaacaacattgagaaatagggagtttagtgattctctcttgtggaggaaatgctaattcctagagcaaaatagctatattagggactgaaacaaagaagaaaatattttacacttatgtaagtaaggttggactgtaaatctagagcagaaactgtcttccattgcttttatataacctctccctcagtcgcattttatgctcaatagacattcatcctttaccattttctttagttcagtgagtatctgtgaagccggcactgtgctgaaaactggctacaagcaagaattgttattgaaggatcaaagaaaatactgttttactcaggaaacattaaaatgcctatactttaggaaagctccatgagagagtttatgatggacatctagaggattcgggtaaaatgtttaatgacattttccccaggcagcctcccttaaaacagtcttgaactccaagacattgatctgaacttgacaccacagttgtaagttgtggtttctggctagttctgagtaacccaattgttcaaacttttaaagaatttcatattgaaagcccgaaaaatgtattcatcctttcctcaccaattacatagttactaagtaaataaccagattatgtgagtttccataacctagattaacatcgctactatttgtccaggagacttatttgtccaggagactcatgtggatgaactggggaagaaggaagatagttcctagaaggaggttgttggacagaaagaacttaacttatgcctagtgttccattattggaacgctaagcacgcgggagttgtttacatcctgctgctcaaggtcatcgccaaggtctgattgcaaaaattctaaaaattgcaacctcagggataaatgagttaagtagtaactacaaaggtactgtactgtctagacatccacctcttgtctaccttctaactcttttgcaagcacttgcctttcatcgtacttccctgcagttcccttacagcagagctatccaaaagaat

SEQ ID NO: 2150 - DNA, 4001 bp, Homo sapiens
aaggattaagcccaaaagatctccagaaaaagccaagcctctggggggagtcctagagggtgaagccagggatctgcctggcagccaagcagagcagaggcagccaccctgagggaaaggtggttcagtcggggttcagtgggcactggccattttccaggggcatgggaggagatgggttggagttggactccctaggctgcagtgtgcctggcgtggacccctgacgctgactcacccccagggccctgacacacgctgcagcttgcagtgcctgccagaccaccactctcattccacaggaccaggatgccaggcacgtcccactgcatcagagccaccctgcccccttccacctgccactcgggcccgcctttggggcactgggcatggcttttttcagcacctctgctggtcacagagatgtttctagcagccccaaagctggacttagtcttaagtagggagagatggttgaaaggattaagggcttccctgcttctgtcaccccctctaatgaagtgccaggttatggggatccagacagattggatggaggacaatctattccacctgggagaggccccgcagggcggcagcagtaggggagggagaagggcacccttttgctttccaggtcagaccccagttcacctttctggcttcctgggcgcccccagatcctaaggacttcctcctccttataagctaactcaacctgtactacctgcccacggggcctctgcccttccctccccactgcagtggcccctcctgggccagcacctcttctgtccttgcactcccttctcctgctgcggggagagcacctactctgccacctcagccaggggtaagggaggacactgccctgccaggagacaccccacgagccatgggctgggggtgtcctggaggcacctgtggaatgtggggatgaaaagggaggagacaggatgagggggcctggcttagtgggatgtgaaacgataaagctccactttttagttgaaaaataaaagccctgtgccccagaggtgggggaaggagcataggcaggggaagggggcaccccaaatgggaaaggtacatggaagagtccagaaaagggagtcgggctgtcagcacccgccaggctgcgagcctagcccttggggacagagctgaagcagggacggggcgtcctaggtcgtgctgagtcatgagatttggagagaggggaggggcgcctccagccccttcttgggcccctgccccagctcctcgtgcccgttgcttccagatggcccctgcagtctgtctccccaacctctccctgacccagggtctccggctcccagcgcccagaccccaccccccgccccacttcccacgacggcggtgccaggggtccccgaagcttgagactggggcaaaagaaccttccttggagaccgctagggctggcgggggctgggctagacgcgagtgggttcgtcccagggaaaggagagagggacgggggcgcagagccggccggtgcaggggacgcgtggcccgcccctctctgcagcaacccgcgggaggaaatctgcccccagcccagccccagtccctcagaggagccggctcctcgcccctcgggtccgactccccgagacgaaccttccatccggacgcttccaaactcccccaaaggacggggcagactcccggcccccttggcctcaaacttccccaaccctactcacctctcgggacccagaccaccccgtggcccctcgactcagtagcaggaaaggagaaactttggagagggaggtccgtgcccccaccggcgggggtatggacttaccggagagcgacccgaaggaggcgggagagatccggggtctccaatgtgagggggcgtcggacggcaaggacgcgtggctggcgacggtttcgcaggggcgcccgttcccctgggggcgcgaagtccccgctccaccgctgccccaactcggctccgaagtgcctttgccgcaagacttgctgagcttagcagtctgcgccgaggcggcagagggagggggcctgatcgatgggcgcgcgcggcgagcgctgcagtgaggggaggagaccaagcggcgtgggagggcggggaccgaggcggaggaggcccggaggaggcggagggcgggcctgccccccgggacgggttctttctgcgcagccccccaggcgctcggcgcccccgcctcctgctcaaggtcaaggaggctgcttccccagcaggaaggcggactggaaaggagctctatactccccaccccagaaggctggtctcctttctagccagctccttctctccaacttcccgaacccactgcagctcaaggctaaattattgggctcaggagcccccatccccatggccattttgggatccctgagcccctagcctcccctcctcccctctccgcttaggtcaccgctacctatattggccacctggatggtgggggcttctgagcctaaaggttgggtgagagagaggaggatgcttgagagaagacagcggtgcctgaggcctatggaaatagaacagcggaggggagagtaagaactgcagggtgacaaggagagaggagctggaagacggtagaaagaaaaggaggacgctactggttattaaagacagggtgttcacacatgttagtttgcttaatacgtaagacatccctttaaggtgggcattttgcgtgggcagtttgcaggtggggaaacagtccctgaatggtgcgttggaccaaggagctgcagacagttaagtggtggcatttcggaagagcctgggagaaagagaagggtggcaagggcaaaacagagcccttcctaacctacccaggagctgccagggcagcaccagaacttccttacagcacaatttgaatatccgctttaactcttttggagttaacttttttttttcttttttttttagacaagtctcactctgttacccaacctgcagtgcagtgtgcagtggcgcgatcttggctcactgccacctctgcctcctgggttgaagggattctcccgcctcagcctcccgagcagctgggattacagacgtgcgccaccacacccggctaatttttgtattcttagtagagatggggttttgccatgttggccaggctagtctcgaactcctgacctcaagggatccacccacttcagcctctcaaagtgctgggattacaagcatgagccactgcgcttggcctggagttaacttttataataggactgtagcatcctgcctcgcttttgggtacaaaaccgtacatggcctgaggtcagtcttcaatacgtactaggtgagtgagtgagaggtggaatgaatgcaatatgaggagatgcaaagaacaagtgggattcaggctttggggagagaagaggcagtggagggcacttttcagatcactgtgccaataataccaggtgttactggcagaccatccccagttggagactatccccagtttggcttgcctcagagcaaggcggcaagtggctgccgactcagtggatgttacgaaaaaggtgggggaagacctctggggagtcctcaatcaggctgaagctgtgctcacagcccctgaggcacagaggccctcccccttcacctgtggagcagccagaacaagggcagtggaggaaatggggagccaagttacaatggactaatgagacctttacattcaaagaggttacccaccacccccacccttagccaggtgtgttccaggacttgttgcttccccaaaggggctggctctactctattcattccttcctgctccccatgccaacaaccagtatctgcaggactccagccagaaagagggctgcagccccctcgcacagaatcaagccaagcgaactggcctgatgcgcttcaacttttccacggcagcagactcagctgcctactgttctgatcaaagccttgtgtcaatctggtgccccagctt

SEQ ID NO: 2151 - DNA, 4001 bp, Homo sapiens
gtcacacaaggtcacaaaattggaggcagagcctgtaaattaaactcagctctcttgtctcaaactgggactcgtccgcaacaccctaatgcccagtaagaagttattgtctcatctcaaccgaagacagaaccagagttcatccaaaaaggagttagattagactttcctatggcaaggactgtcacattgcacagtggggtgctctaggctattgtagtggagatctttctaaaacgagacaattccttcagatcttccttatctgagatgaatgcagccctgtctggaggtagagagcagaccgcatgaccttgtgaggtccttgacatcaccctttaacctatagtcatctgtctgtcacagccaacctttctctaggaaagaatctgccctctgcaaagaggatgtgtaatgctggaaagccggcctttctccccatcagctggattctgaaagtggggagagatgaccaatgaacaggctgagggtgtcacagccctgctactttgggatggggggtgcagtaggggagctacagtcttcccagaggataggtcattctacccagctaggtcattctaccccacccccatcctttcagtgggcaacacctgcagggtgttgggactgggagaaacctcagataccttaaattccaaaccccattttccagatgaagatactgaggcccagagtgggtcagtgagttgcccaaggtcataggacaggtcagaatggaagctttcggactctccctggggcgctgcgttcacagctccactttgacaccccctgccccggaagtgagcactgaactcacttaagagaggccagtgaccaaaggcagcgattcccaggtgcagaggctcgggcaggcgtgcccatgagcttgtccccccgcgcgccctcccccacctcgtccccattcctgtcttgggcaccatgcgctccatcatcctgagattcagagaggtgcagtagcttgtccaaggtcacacagcaaactgagtagggccctcgtttccactgcccagctgccccctcccatcgcccacccgggtctctgcaagcttgccaggatccccgcgagcctgcttcctccaatgcacagagccgtggcgcgtgtcaaagtgtgggaaagttcccgggagaggaaggggtggaaaatgcagccgctcatctcaaccctggacggctgcggcaaggcgggggcgctcagaaaggcagccagtcctgcaaaccgcccgtgcctccggcacacccccctctgcgccaggggctccccagtgtcgcgcgagcatggtcttccagctcctcctcagcgaggcaggcgctgcagggtcccatgcgccccgcacccacttctctccgcacgcccacttcatgcacctccccgcgcccttcccacggcttctctgcggcgagtcgccttcgcttcaccgcaggtccctggtcccagcgctaaggcaccgcggcttctctcgccttctctccgctttggacccgggctctccgcggggagagataggttgggggctaggggttcccgaaataattcaggacacctcccccgggtctagccaggtaattccgacgcccatggatttccggattacagttcccaccgcgggctcagtcctacctactcttagtttaccccgcagtgagcaccaagtcccaaaagtcggagtgtcaccgtttggcgaccccgcgtccgcccacgcctcaggccctagaggtggccactgtcggtcgaggcacggcttcgctcgggactactggctgccctcgtggggtgccccgcctggggttccctcttaccctgggacgttccgggcgcgttcagcctgagctggtggagagggcgggggcgggggcgggggcggggacagctggggtcccgaagtccaggtccctcttcccacttccccgccggccctgccgctgcggccctcgctcccgcgctcgctcgctctcgagtctctccctctctctattctcttcctctctctctctctgcagtagtaacaacctgatcccgcttcccccgcccgcctattgatatgctcctcacattcgcctgcacacagcgcgtgcggcccctccgagggcgatccccgcaaaccacgacgcagggcccccgccccaggcaatccccgctgctggggaggctgcctccgcgcgcccacgcctcccttctccagtccggactgccagcggaggggaaaatgggcgacaggagaaggggaggtgtgtgcgggagggactaggctgggggagaggggtttaaactggcgcggtcctacagaagtttgaggagggcggggccggctccgagcccccggagccctacgggactcccccgattctgccgaggagtccccgccagctccgtgcactcctgcaacactccccaccccacccgccagctccgagtttacagcctctcggttcgggggattagctgggggaggggaccccctggctgtagggaatggcctgcgggcaggggtgggagggaaacgatttgcttcgggagataaggatgaaggttttcctgagtcaagggagagaagggagggagaagagagatggaacaaaaggcagatgctggaggggaaggggagctggggagttcgccccgagggctccggcagcccgcggtccccaccctcagtctgtcctggagggtgaggtaaaggctggtgccagggctcttcacgggccacttggggaggggagaaagggcgatggaggggtacgggtgtgggggagaggaggaagagcgtctgctggcacaggaccccttgcctgctcccagacaggaacccagcagaagggctctgccacggacccgacacctcccacctccacaactctgctttctcccacttgggaaaagcgaggctgacacccacggtgagcaccaggaggggcagggaggaccgagagcctgggcagcactcctgtgcctcagtgtcacccttgggcctcaccctcaacccccaacctcacccgataagacctcggggccacagctcgccaggtggaatttctgctgctgtccggccattaaccacccctgaccttcccagctccaccccatcctcgccctctcccctcagcctctccttcaccctccatgcagctgctttctgtttgccttccactctgcacactcaggaccaggactcgagtttggggtttgacccaggaagtgacattcctcatcccccaacccacacacacaaaaatccagtgtgcatgtgtgttggggggggcagtcactcagggctttccagggcttctcatccccacagagtctggggaaccgggaaattcccaatacccgcagtgaatcccccttcttcccctcctccaggcatcccctgccccaggacatagacctcactcccgaagaagccggggactgaagtgctgcagcacccgctgctcctggccgggctggagcctctcttcagaagggcagcagctcgcttgtcacagaccctggactgcagaaaagctgattcagggatttccgggcggctcctcctgtgggggagtgtgcatctgcatacctgggtgttgggaagggtgtgtgcgtgtgttcatgtgtgggctgggggagaggacacatgcctgagcccctctagtcaggtctgctgacccctcactgttcttcagatggaaagggggacctggggtaaagggctcaaggtcagatgctcagcaggagggcaccaggggtttccccccactctgctacactcccgtaacctacccccacctcgtcatcccacactgaggaggggacctgtcacctgagatgggtgtgcgggctgaagagcagtacctgctgctcctcttcggtttctccctggggagaaaagtgcttctgttttgaaatctcccccaaaccttcttttgctaggacgagggaggatgggactcaaatttcattcagcaggctggattcaggttcgactttggggttt

SEQ ID NO: 2152 - DNA, 4001 bp, Homo sapiens
ctaatgtgttctgcgaatctccaaggcagggaatcaacttccccaacctccatctctgtaccaccctctaaaagttctttatgtctaacctcagtcccttctgctgcagtgatcaaaccattgactaaacattgccacaactagggacagcagcgcctcctacgaccctcacagggctcaggtgggctccgctcaccccaaggctggatacagccccctcacacacacaagcctccccttggcccaccgccccctcccccgaactgctcctcacgggtatctacctctatatacgacctttaacctcaagtgaaagaaaacaggaccctgggacctgcagccgctggggagtttaccccacctgtacctgctcccagaaccgccggtccctggcttctcgtccctggagcagcgcgtggggaccaaattcccgcctctggcagcccctttctccccttcccgcgccagcggtgcagagccactgagcaactcccgagtgctcctaggcccagcgctactggggtcggggtgggggaataaggagggatggagcctgcagagtctcctggaaccccggcgtcctggtccttgcaggatctccccacccccactccgcattatctccaggcctctcactcccccagcccctcccccatggaggggacgcgacccagtactccctcccgccccggaccctccagatatcgggacaaagaagccccgcggcagccggcgagcgtggctgccgggcactggtgcagcaggtaaataccctgggccggccgccacgtcgccgaccctcccgcagctcccgccgccagggcgcgacacgccattccccctgccgcgactccccggagacgccgcagctgcgcgccagggtccagcccggcggggatcgggctcgggactcacccgctccggcgagctcgactcagctcgggctcccgcctcggctaggcagccgcctggggctgcgtcccgcgcagggtcagcgcggatcgggcaggaggcgccctcttggcaaagtcggctagaggcgccagctcagtcgcgcaccggccccgagtccgagtccgagagggacggagggagcgagttataggggcgagagggggtgggggaaggacgccgcaacaccctcataccctcccccaccccgccccctgtcccccgccccccagcggagacgcggaaaaccactcgcagccggagagacacccggacacaaagacctcgtgccagccgcagacccaagtttctcccggagagactgggggtccgcccgcgttcaccgcgagaacacacaaacggacggacagaccgacgcacggacccggggacctcgacactcgctaggaggcaagccctattcctcagccgggcgcccctcgtctcccgctctctccatggacccctctcctggcaaatcgcccgcagagcgagcttggagatgcgagggaaactgaagccccaagggtgccccgtcctgggagcctggctgtctgcggggtcccccgcattccgcagtagtaatacaggagggccgggggcttctaccccaacctccgctccccttcgggtctctcctggctgtgcaagcgatgggccagagggctggacgaggctggctcccaatccagaatcccgagctggggagttctctctaggttctggggctcctgggaccggggctttggggaagggagatcgcaggacggatatccaggaagggagggggccctgggtctcccgttacctgcgcctgccgcgctgggactccgctctgggggctgcagctcgaagctccgacaagtctccacgtccagcccgagagggggcggccgggcccggcacagcgaggcgaggaccgcgagcgcctcctggcaccgaggcccgccggccccccacactccgctcatgccctagacacccaggcttgccgagcagcagctcgaacccgcgccccggccgcactggggcggggcacgacggccccaagaagaccctccctgcagcggccccctgcggctccgctctgcttttaatcacttccccgcagggtccccgcccctcacgtggcatcccgcggcagctggcgagtctggcgcctcgcggccgccccctctacactcagggactggcctgagtccggggggtgggggtttcgaggcgggaagccgggctgtcccgaatctcggagggtgcaaggccaggaaagagtccgggttcccactccgcattcactgcctggtgtgaccttgggcgtctctgagcctcaattttcctctccgtaaaggaggtgtaatgattttaagtacttcacggactccctggggatagaaagatcgtgtttgtgaaaacactgggtaaactgccacatgccacacgaatgacagagaaatagataaccccgtaacagaaagagcgacggtcaggcagggtctgggaggaccttggccgaggttcctgacgggagcagttagactggcccccgagtcccagcttcggaggtagaagaccccaagacaggcgggcgatgcgaactgcaagactttccgagctccgcaatcctgcggtccgcggtacccgcatgttgctatggcgacgggaggcagcggccgtctctctccatggcaacgggagggaaaagtttctggcaaacaggaatggggggtcatttcaagagggcgcagggcgctcagttccgccgacccacctccttgcttcggtgaaacagcaccagagatcatgtatctttctgctaagcataacaagaaagacagaaagctcaacgggaggattgaggctagacttaaagtagagatcccctcagaaactgtggagtgaggcccaggaacagatcggctgagaggcttcgagctgcctcactcagcgctggaagtctgtgagccatggtcagggaggccgggggaccagcgccctgcaggggcctatctcgggagtctcttgatctacacctgtcggcggtggggccccttctgtgtggggctcgcctgaagccccagactcaggtccatttgctctcccggagctgggaaggaagctttagctgcagcccctggaggctgctgggttggtgtatgcccgagtggctggcgagggagaaaggtcttgcctcttaattaacacgcttattggaagtgactcgggcagtgactcacgttccggagggaggagattcggagccttagctcctggcggtctccactgcgcgccatctgtgccaaccggcccttggacttgcgatcccctagcagctggtgcctggggcaccaagggctaaggcaaggcctgtgaggaccctggcccagccaggcggcttttccaccgtgaggcgccccctggctctgtccacggtgctgaagacccagttggtgctaccatcgcgtgggcataagtttaggggacgagggagaggcaattgttgaaggttcgcagcttccaccctgacccctgtgcctgtgatagcagaaggctaggaactcaggcagggaccaagcagacacgacgcaggcgatactgtgcaatccgggctgccttcctgctggaggtgtttggttgctgttccaagaacaagtggggctctggcatccctatgcgccttcctggtgcttctgaaaacccacctgaggagcctagaggccccattaatttcttttccatcacccgatgcagatctcagcacccagaagagcctctggctaaacgcttattagcagtttcccaagtggcaggtttgtgtttatgtaaaatacaaatggagaactgctctttgcccgtgtttatggcaactctgtcactcccctgctatttctccctccccctcgcgagttcctgggggaaattcacagaacaaagcaccttgttttgcctttgcagagaatgaaaaaacacaggaccattccaagggcccagacctgtgatgcagggaaatcaatattttgcttacatcgagtgggggaatttgcatctaaact

SEQ ID NO: 2153 - DNA, 4001 bp, Homo sapiens
gcagaattccatccttccagtgagaaggacaaacatcacataaatttcatggccacaagtaaactggagttaaccactcccggctgccagcctaagaaaaacagggaagcttgaggtctcctgtcaggtttctgcatttgctggagcacttctggacctctgcttgctaccttaagtccagaacccatgctgaccatacctaaacctctgcagcttggcttatggaaaaagttcattcatttctacaaggcaaatgacacaatgaaaggtggagaactgcttattagtgttcacttggggtgtattaaggagaatagcaggcctatggcttcagagtttttaaagaaaaaggggaaacttgcttttagtttggacagtttgtgtacaggtgtttccaagtcagggtctgattaactgagacttcctgtgcaattcctagcacagactctagcctatagaggagtctcagcaaatgacagtggagtctgaatctcagtctcagggtgttactagaaatctgtaagctagagacttagaacaggaagaagtcaagggaaaacataaaatggtaaacagagctgggcctgctctagccacttgcatttttcataaaactgcaacaaatgaaaagctctagcattgtgctggttggagaatctggacccagagagcaggctgggaggcggaacagctggggcctggtcctgaactccatggcatctccccagaccctctggtcacctaaattctcaaaatcccaaggccactctcaaccactatctttctcttgctatgatcaaagggtctgctcctgcctccccatatccctttcagcctctcagcttggaccctgggcttcctgggacttgtgactcagcagccaaagttaaagttttcctgagctaacaactagaactcatcttctgatgcagcctgcagggaaggcatagtaattcatctgggcctgccgactctcacccctcaggcttttctcaccctcaacctggccatccaggcacctgtcattccagattatgggtatctctgtggagtcagaacacctgtgcctccccctaccaagatgtgctgcacacatacagccctgccccacttccagcaacttccaccgtcacccccagcatttctgccctgaacagacaggagagtcagcttccatcccagatggaactccacaggtatgttctcaccctctaggctctgagggtcaggaccagcattaaggctccactggagatggatcattggtggaaaagacggaagggagctggggagtagggagaggcaggaagaggctccctgatagggaaaattctgtgtctggtgtgtatgcgtggtgtaggaggggatggcaccagagaaccagagtcttataataataacttgttaggcctaatgtgttctgcgaatctccaaggcagggaatcaacttccccaacctccatctctgtaccaccctctaaaagttctttatgtctaacctcagtcccttctgctgcagtgatcaaaccattgactaaacattgccacaactagggacagcagcgcctcctacgaccctcacagggctcaggtgggctccgctcaccccaaggctggatacagccccctcacacacacaagcctccccttggcccaccgccccctcccccgaactgctcctcacgggtatctacctctatatacgacctttaacctcaagtgaaagaaaacaggaccctgggacctgcagccgctggggagtttaccccacctgtacctgctcccagaaccgccggtccctggcttctcgtccctggagcagcgcgtggggaccaaattcccgcctctggcagcccctttctccccttcccgcgccagcggtgcagagccactgagcaactcccgagtgctcctaggcccagcgctactggggtcggggtgggggaataaggagggatggagcctgcagagtctcctggaaccccggcgtcctggtccttgcaggatctccccacccccactccgcattatctccaggcctctcactcccccagcccctcccccatggaggggacgcgacccagtactccctcccgccccggaccctccagatatcgggacaaagaagccccgcggcagccggcgagcgtggctgccgggcactggtgcagcaggtaaataccctgggccggccgccacgtcgccgaccctcccgcagctcccgccgccagggcgcgacacgccattccccctgccgcgactccccggagacgccgcagctgcgcgccagggtccagcccggcggggatcgggctcgggactcacccgctccggcgagctcgactcagctcgggctcccgcctcggctaggcagccgcctggggctgcgtcccgcgcagggtcagcgcggatcgggcaggaggcgccctcttggcaaagtcggctagaggcgccagctcagtcgcgcaccggccccgagtccgagtccgagagggacggagggagcgagttataggggcgagagggggtgggggaaggacgccgcaacaccctcataccctcccccaccccgccccctgtcccccgccccccagcggagacgcggaaaaccactcgcagccggagagacacccggacacaaagacctcgtgccagccgcagacccaagtttctcccggagagactgggggtccgcccgcgttcaccgcgagaacacacaaacggacggacagaccgacgcacggacccggggacctcgacactcgctaggaggcaagccctattcctcagccgggcgcccctcgtctcccgctctctccatggacccctctcctggcaaatcgcccgcagagcgagcttggagatgcgagggaaactgaagccccaagggtgccccgtcctgggagcctggctgtctgcggggtcccccgcattccgcagtagtaatacaggagggccgggggcttctaccccaacctccgctccccttcgggtctctcctggctgtgcaagcgatgggccagagggctggacgaggctggctcccaatccagaatcccgagctggggagttctctctaggttctggggctcctgggaccggggctttggggaagggagatcgcaggacggatatccaggaagggagggggccctgggtctcccgttacctgcgcctgccgcgctgggactccgctctgggggctgcagctcgaagctccgacaagtctccacgtccagcccgagagggggcggccgggcccggcacagcgaggcgaggaccgcgagcgcctcctggcaccgaggcccgccggccccccacactccgctcatgccctagacacccaggcttgccgagcagcagctcgaacccgcgccccggccgcactggggcggggcacgacggccccaagaagaccctccctgcagcggccccctgcggctccgctctgcttttaatcacttccccgcagggtccccgcccctcacgtggcatcccgcggcagctggcgagtctggcgcctcgcggccgccccctctacactcagggactggcctgagtccggggggtgggggtttcgaggcgggaagccgggctgtcccgaatctcggagggtgcaaggccaggaaagagtccgggttcccactccgcattcactgcctggtgtgaccttgggcgtctctgagcctcaattttcctctccgtaaaggaggtgtaatgattttaagtacttcacggactccctggggatagaaagatcgtgtttgtgaaaacactgggtaaactgccacatgccacacgaatgacagagaaatagataaccccgtaacagaaagagcgacggtcaggcagggtctgggaggaccttggccgaggttcctgacgggagcagttagactggcccccgagtcccagcttcggaggtagaagaccccaagacaggcgggcgatgcgaactgcaagactttccgagctccgcaatcctgcggtccgcggtaccc

SEQ ID NO: 2154 - DNA, 4001 bp, Homo sapiens
gccactgcactccagcctgggcaagagtgagactccgtctcaaaacaaaaactaacaaaaaaacctgcacacagcatatgcacaccaatggggataggcccacccggatgggttcacctagacaagaacaagtctggggacaaatatgtccctcgataaagatgtacataaaaatcatacagactttggcacacatacattgcccggctaactgggttgtgagctccttggaggcagggagagggagtcaccctcaaagccattactttgcacacaacagatggttggtaaaagtttgattaattaaatgcagaaatatgcctgcacacacatgggaatgcacacatacaaccacccacctagacagacagatacacacacacacacacgtacacacacacacatctgctcactcccccgcaccaggaacctcacagcctgggtcccctcctgccaccacctccaccctgccctggcccacttggccttcctgtctgaggcaacctcctcctcagcccacacccccaacttcctctcctgaggtaactgccgcacccactcccacggaggcctccaacccagggatgcccccgccgccagccctgccctgttgcctggagccacagggcccctctgttctggccacacagttctccccagaccaggctggggtcccggcggtggaggcctaggctagcgcagcagcccatgctcaggtaccacagtgactccggaaagaaagcatttgcccagcgctgaggggcatgtagacgtggcaaggggcccatgacttggtcagggctgtgtcctgagcccactgggcggcctctcctctcttccccgccccttccattgccacggctccaggtggggctgagaccggcggaggcagcttggcgggcaggtcctggcttgtgtccgccgcctgctatgctctgtcccctcccagctgagtcagtggccgagccccagcgatccctcttgacaccctcaggagcagaaggcctcagcacggctgcacggtgtgcattcactctgtggatacctgtgtgctccacaacagcagtttccctggacttctgtggccaacgtgtgagcccacgttcggcctcccctgtggattggggtgtgagcccacgttcggcctcccctgtggattggggtgtgagcccacgtccctctctgtgccctgttgtgtggctgtgtgggtccgagtctggtgggcatgtctgcgttgcgtgagtctgtgagctgtgtagttgctgtgtgtctttgtgtcctgttgcagtgtgatgctgcatggtgactatattgtctgtgtggtgtgttcagtgactttctaggtgacagcgccgtgtggggtgtgtacagtatgcattgtgcatttcctcctgtgctgtatgtgtgactgggctgtgtgctgtggggtgtcccctggtgccttgggggccaccaggtgtgtgtgtctgagtgtggatggaggccggggggacgttcggcagaactgagcctatttctgtccttcaggcctgcctgagctgggccatgggcatcagcccagcgtcctcagcagtgccccctccctgaagtcccctctcctaccaaccagaggcagaatctcctaccagagttaggtaggagtttggtcttctctgctgttttgacacggtgggacagacccattggtcaagaggagggtctgtccatctgtccagctgttccagttccagacatgtgcccacctcccccaaccccaaggtgctggagggtgctcaggataccaggtggcagtgcctgcgtctctggaccctggcaggggaccctggcaccgacacgtgttacctgtaggggtccagtatgggaggacaccttcgcaggtggctccagctcccctggcagccgagtttcagggaccgggagaagagccgtgagggaagaaggctgactcaacaggcagcccagccagcagctgccccacacggaggaggaggaaacacctcggcagggcctgatgcaaaaccgggcctggactcccagcgcccgggggtgcgcccccgcagccgactggagaggcccagcttggccccagctccactgagcaggccctctagaacgggtagcagccccaccttgcccacaacggggctgataggaactcgctttgaaagcaagttagaaacctttcttttccagccccaaggggaatggcaggatggcagactttgcagttagaccaccctgtgcagagtccctgctctgccagtgggtgtgtgatgtgaccttaagcaggtctcttccatttcttctgatgcaaactgtgggtagcagagtgcaaggagcctatactaagggaagtgaaagtgcccggtgcgagctggcatagtcggggtgaggtgtccccactccagcatagcctaatgcccacggccatctcagcagctgctgccctctatatccacatgcacttctgggacatgctggcagagcagccctctctgtcccctctgctgtcctgagccccatctgtttgaggaggcctgaactcttctagtgccaaggtgagggtcccacaccctctgtctatgtggagcccccctgaactcaccccattctacacctagattctgcccaccctgagattagaaggtttgggccctagattacattggcttcaggaccatgaacctcctgggttgtcttgggcacaagaggccacaccaaagctttctgactccccccaagtccacttcacttcccatggcctgccctggcccaaccccctcccctgaacctagggccatggattaaagattagtgggctcctcatagacccctgggagaggcaggacaaggggtggattctaaacaaaaccagtctgggcacagtgactcatgcctgtaatcccagtactttaagaggtcgaggtgggcggatcactctaggacaggagtttgagaccagtctggctaatatagtgaaaccccgtctctactcaaaatacaaaaattaaccgggcatggtggcaggtgcttgcagtcccagttactcgggaggccgaggcaggagaatcgcttgaacccaggaggcggaggttgcagtgagccgagatcgcaccactgcactccagcctgggcaacacagcgagactccgtctcagaaaagcaaacaaggctgggcgtggtagcttacacctgtaatcccagcactttgggaggccgagacgggtggatcacgaggtcaggagatcaagaccatcctggctaacacggtgaaaacccatctctactaaaaatacaaaaaaaattagctgggcgtggtggcggctgcctgtagtcccagctatttcccgagtagctgaggcaggagaatggcatgaacctgggaggtggagcttgcagtgagccgagatcgcaccactgcactccagcctgggcgacagagcgagactccgtcacaaaaaaaaaaagaaaagaaaagaaaagaaaactaaacacccactcttccttcctgtaatcagaaccgactcccaccaccactgagagacagaggaccctcctccacctcagaaccacagtggaggcttccctacttattttttgcaaattaatcttatttttctcatctgttaaatgggggtaatctctccttagagggttttcactaaaattcagtgagatccttgcagacttttttttttcttttttttagatggagtcttgctctgtcgcccaggctggcttggctcactgcagcctccgcctcctgggttcaagtgattctcatgcctcagcctcccgagtagctggcactacaggcgcccgccaccacgcctggctaatttttgtattttgagtagagatggggtttcaccatgttggacaggctgggctcgaactcctggtctcatgtgatctgcctgcctcagcctcccaaagtgctaggactacaggcgtgagccaccttgcccagaccccagtactcttgattaatgcatttatgc

SEQ ID NO: 2155 - DNA, 4001 bp, Homo sapiens
aggcttattcagctgttaaatgggggactgtactagctatttctaattgacttacccattctgaaaaactaaagtaagccccaatttctgctgaatcctattcatttttgttcatttgcctccaacttctctaacatgagggatttatgaccctttgaaacaggtgaggaaaaccaaagaaaggccaagatgcccaagaaacgtatcatttgcatgatattaaagttgtaagccaagcttttttatagggatgtctggatgattcactcagattagtggtaggcaataaacgcctgtaccgaaaatgttgcattttctggcacaaagtcactgataagcacactgcctagcatatagcagacactcaaaaatgctggttgaatgaacaaggagccaactgacacctgttactccctataaaatctttaactttcttaagccaaaactcaagaaagatggttgtcacattaagaactctactaaatatcctctgaacgaacgaatccttcaaattctcaattatgctaaatggaaaaacataaacaaccgttgagagaaatgctgaaccagcggaaaaaacttcaaagccaagtttcaacattcccgtagagctagatacacccactgactgctgccagggtcaatttcccggcctcttccagagctcataagcacccccaaaaagcgcttaggaaaaaaaacccagcgcctactctaccctggtacgctcgactcctcgcacacgtaaacctttaaggtggatgtcagtgcagccagcattgaacagacgcgaacacggggagacaaaaaaagcatctccccatattcacaagggtcaccacagacaaactctgaaaagaccaaattattcacaaatctaagagaattgacagatcctctttgagataaactattttcctacagtttctggaggcaaacaaaaactccaaaaacaagtcgaacggtccatctccccactcctctcccaagaatgtggctgttttacatatcacaccctggactccgacaagcgaactcctagaccttcccggggcctcggatcgctgagtggcagaggagctgccccgcagagctttcggttgctttggcagagtccccgtgagacctgcctgcctgcccacaaactcttcttggagtaaaagtgaaagagaaaaaaaacccgactcgtccaccgtgacggatggtgggggattttagcagagttgagtagcccaaagaggattcaatttccccccgccctcggctgcctcctcccgctttcctgcgaagccggacatgcctccttggtccgcgcaagccccaccaccacccacatggtgtgtccgtcccggtcagagcacaagaactttaaaatggtgcctcgggccacaaggctcatcggaaagagtcacagaggcccacggccagcaagtgggcgcggggggtcaggaaaggaggccccgggtggcgggtggggcgccccgggtgacgcgcgcgttagtgggcggagggaggcgcaccaggcaaaggaaaggagagaaatggatcgcggcccctttaagaggccttcacggcgctcaggaactgggggcctctccaccacccccagcccggcgtatggggcccttccttggggagaactatctccagacccgctccccggaggctcccctcacgccaggtctcgcccggccctgccatgggacggcggctcctccttaccccgctgtctgccgcctcttcccagctctcagcgacctcctcatcttccatcttactcgccgctttccctcctcccccaccccctccccgcgcctgcgctttgaagcgcgcctccgtcgcgggcgcaggcacgcaaggctttactcaatggaccccgcccgctgccaagcccggaagaggcgccaggcaaggtcccaagtgtacattagggcagccatcttggaagggggcagagaaggcggaaagatgccatctttcttaagggccaacgcgttatctgtcttacagaatgggcgttcaagggaagtcctcatctcgagtaccggaagtgtgttctgtggaaccatcttttctaagggcaggcaattaaagaaaactttttttcttttaaagtgagtcgtagttttcctaaactacagataatggtatcttcagaattctgaaaacatttttaaacaccaacaaatgatgaaaaatatctgctgatgcagaaaacattttattatttctgatagggtgaaaatcattacagtatttcctgctcataaagcagtattctaatcatttattaacactatatccgctaccgtaaggtaaagacggtaaagataatattgcacctcagttgggagaaccagtgggattcccagctactaagttctcctgggtctttaatggtagataaatacgttagtattacctctaaaaattactggccaggcgcggtggctcacgcctgtaatcccagcactttgggaggccgagacaggcggattacctgaggtcaggagttcaagaccagcctggccaacatggtgaaaccccgtctctactacaaatacaaaaattagctgggcatggtggcacacgcctataatcccagctactccggaggctgaggcaggagaactgcttgagccagggaggtggaggttgcagtgagccgagatcatgccactgcactccagcctggccgacagagtgaggctctgtctcaaaaaaaaaaaaaattatttatgtcagggcaggcgtagtggctcacacctgtaatcccactttgggaggccaaggtgggcagatcacctgaggtcaagagttcgagaccagcctgaccaacacggagaaaccccgtctctacttaaaatgcaaaattagctgggcatggtggcacatgcctgtaatcccacctactcgggaggctgaggcgggaagatcgcttgagcctgggaggcggaggttgcagtgagccaagattgcgccattgcactccagcctggacaacaagagcaaaactctatctcaaaaaaaagttatttatgtggccgggcatggtggctcacgcctataatcccagcactttggaagggtgaggcggggggatcgcttgagccctgcagtttgagaccagcctgggcaacgaggcaaaagcccatctctactaaaaaaaaaaaaaaaagctgtgtgatcttaacgcaagttacataaggattctatgtctcagttccccaagtgtatacattagagatagctacttcaaaagtagattgtaagaatttaaccagttactatgctgaaatgcctagaacagtgcctgacccatagtaagagtcctaagggttagctattatcattatgggagtgtcttgtctgcccgaggaagatttataattgtcacttctgtaatcatcctttcttaaaatataaggacagggagatgccaggcgcggtggctcacgcctataatcccaacactgtgggaggctgaggtgggcgaatcagttgaggtcaggagttcaagactagcctggtcaacatggtgaaaccccatctctactaaagatacaaaaattagccggatgtggtggcaagcacctgtaatcccagctacttgggaagctgaggcaggagagttgcttgaacccaggaggcagaggttgcagtgagccaagattgcgccattgcactccagcctgggcaacaaagcgagactctgtctcaaaaaaaaaaaaaaaggcagggagataagcaaacaccatgtgtttatattcttactgacatgttcctgtttttctctcagttttaaatacatgtcattcagtagtgttgcatttggctgctataaccaagttatctgacttggaatgtgttttttcttgtatttttagtatgccattaatctttctgaagtaaaaccttcctgctgtgaaatttcataatttgtattcttttttttttttttttagacatagtctcactgtcgcccaggctggagtgcagtg

SEQ ID NO: 2156 - DNA, 4001 bp, Homo sapiens
atggtctcgatctcctgacctcgtgatccgcccgcctcggcctcccaaagtgctgggattacaggcgtgagccaccgcgcccggccttgtttcatttttttatgtggctatcagaaaatttaatattacacatgtggcttgctttagatttctacaggacggtgttgtcctagactatctgcctaaaaggtatgttgcatttccccacaacatccctccacctcctttcactttaatctataatgaaacatcctctaaactgtttcatagtttttcttgtgttaatatttctgattgatcttgattgatatttctgatgcatgagctattctaccacctctgtgaacatgactattttaaataaggcatagtttcctaccaccatattcaatgttgggtcttaccacaccaaatcccagtgaactggagatttaccattctgtggctactttattacttataccatgaacaatatggttaagaacacaaggactggagcctggccatctgttttggagtcctgactctaatacttaatagctgtgtaactttgttacttttttttttttttgagacggagtttcactcttgttgcccaggctgaagtgcaatggcatgatctcagctcatcgcaacctccacctcccgggttcaagcgattctcctgcctcagcctcccgagtagctgagattacaggcctgcgccaccatgcttggctaattttgcattttcagtacagacaggctttctccatgttggtcaggctggtctcgaactcctcacctcaggtgatctgcccacctcggcctcccagtgttgggattacaggtgtaagccactgcgcccggcttactttgttactcttaatatctctgtgcctcagttcctaaactaaaaaaaggagatgatacagtgtccacttcatagggctgaggattaactgatattggtaaagagcttagaatggtactgagcatgcagtatgtatgcagtaatgaatactatttctatcattatacacatctctcacccttcccacctactgatatgttggcacctttcctggtggtggtgttttatccgaatctgagattttaagctcagatcttctaactccaaactgctagttcctggatgagtggcatttgagtaaggtactaaatctttctcatttttcagttttctcctctgtgagaatgccaccttccttgcacaagtctgaatgacacaacatatataaggttccttgcatgttccttagcatttaacgaatatatcatatcacctttctggtttattacatgtgattctcacaacacactataagacagatattttataaagaaggaaacaggatccgggaagactcgcctgaggttgcacagattagctacatgacagcgccaatattggaacgaggtctcagtccgactcaaatgtttttttcatgaaattaaagctgcttttctaaaagcatgagccctagaactaaataaattcatgctgtttatggtattccaatgcctaaagaaatgcaaaaaccagcaaagtaaatctactgccgtgttgcccattgaaactgcaacagaaagtcaaaatacaagttttgttaacaccgctataagtcttagagacgacgacgcgggtgacatgtcagtaaacaaaacaaagcgaacagttactcctttagctccccgaggaaactgcggaccgcgtcccatacacagtccgcaggggtaccatagtcgggccttccgggctgggctggtccctgccgaggctacgcagcccggccacccccagacctagaggaggccaacgccacgcctgcccgccggaccctccccctcggatctcggggcccagtgctgcgcccgcccgcccctcacctccggctccgggcgctccgaggccatcacacagccctcccgcgccggcccgggccagtgagggtgttccactcttgacccctgacctcgctacctcggcacccagcaggaaccggaagttggtgggagggccgagttccagttttctgattggtggacgaagccttctcgtaggcgtttgctgactggaaaaccggaagtgaaatcgtggcagccgcctcggccgccgcaatgcaggtgagagttgcgttgggcgtactagcggctggcaagcttcgggtacagggaccgagagtgggctggctaaggagaatgaagagttgggactgagaagagagggcagaacccacggctgataagggaatgtgggctggggggcgaggctaattggagcgggagcggcggcgattagaggtgggggtggagcttgcctgacaggagacagtcgggctaaatccggagggaggaggcagcacctgtttgcttggcgtgggaaaggattaggttgtaatacggggaggctgagatgcagtccaaggaagacggctcaagaaggtggtgggttggctcaggccctgtcctaagctgctggatggaggctgttggttgccgatatagcaggggatctaattggaaagaagcccaagcagtgagggaattgtgggccgcgatggctgaaagctaagcagcttataatcagaggccatggtggaacccgggatcaagtttctgtcaggcaggtttgcaagacagttttgcatccctcttcccagcctgtgccctatagttgttaagggtgaagaaatggagtaaaacaggagaccaccgatgggaaggaaatgctttgcagacccccagcattttaatttgtttgtccagtgcttagaagcatgtgtggtttttgtttttcatttgtcacttagtttcttgcagctggtagtctcaataaatgttaatgggttgactgagcttgtgaaagaggcacgggaatattgacacagagatagatgattgcatattaattcagcaaggagaaggttgaaacaaaatgatgagagcagatggaaagctggagtcgttggttgggggagggaaaggggagagcaggactggtgttcagagaagtcttcatgagtaggcagatttcccagagactgacaagacagccaggctcacagatgctaggatggaggaagctggagtgcatgtgctacagaggtgcacatgagagaatgatctcctggcattaggtctgtcgaaaatgtctcagtgagggagtgtagggtgtacctaacacagagaaaaaccaggcatagattaggaggtgatggggaaaaggaatcagttggtggaaggacttggggtcaggcaaacaggttggaaggtctcagggttgatgctgtctataacccaaataccaaagatagaaaacaacctggctatcctatgccaatgagatcctgtgttacctgactggtgttgcacaccatctccttggctttccagccctcctttctatgtgtcatactcgtttatctgggtgaccaacctgttcctattggtgcagagagaggagaagcagcttgaggcatcattagatgcactgctgagtcaagtggctgatctgaagaactctctggggagtttcatttgcaagttggagaacgagtatggccggctgacctggtaagagttaccagggcaagctaggaagggcttatgggtgggggggcctagcctcctgatgaataggacatttctaatgatgtaaccatttatcagtttgcaaacatcttttgatttggaaagagctgggtttcctaacatttagcaagtggattccatggcaaggaagtagagaaatgctcagtttcctaacccaagttctttctagctttcaattcttaccctttgacttctctggtgaggaggtcctcccactacagctctattcgtgctggatctcttgccacagatgtggctgagtcttttagagccaacctactctgaagtgtggatcttatttccaggctggaaaggaggcttttacccggtttctgaagttttagttataacagtgtagccctggttcctattttgccactgttcct

SEQ ID NO: 2157 - DNA, 4001 bp, Homo sapiens
agacaacatatgtacaaacattttacaaaaaagaacattaccaatatcagtggcagtaagggcaagctgaagaataaatagactgagtttccgggcaatgtctgtcctcaaagacatccaaactgcgttcaggcagctgaaacaggcttctttcccagtgacaagcatatgtggtcagtaatacaaacgatggtaaatgaggctactacataggcccagttaacaaactcctcttctcctcgggtaggccatgatacaagtggaactcatcaaataatttaaacccaaggcgataacaacgctatttcccatctaaactcatttaagccttcacaatgtcgcaatggattcagttacttgcaaacgatcccgggttgtcatacagatacttgttttttacacataacgctatgccatcccttccttcactgccccagtcaggtttcctgttgttggaccgaaaggggatacattttagaaatgcttccttcaagacagaagtgagaaagaaaggagaccctgaggccaggatctattaaacctggtgtgtgcgcaaaagggagggggaaggcaggaatttgaaaggataaacgtctcctttgcgccgaggaatcaggaagcgtgactcacttgggtctgggacgataccgaaatccggtaccccaccccatcccctgccccgccgggtacctacaagctcggttcctttctcaactcccccagttccttgatctccaccttcttgtacttccccgactttctccggttggtgatcaccaggacggccatgccggcgacgagggccaccacgaccaccacgatgacggcgatgaggccggcggtgaggcgcttcatggagaacttcgggggaatctcgtccaggtaatagatgagcgtgcgctccacctgcaggggttctccgcgcacgcgcaagtccaggccgccgcggccctggaatagagactcgcccttgatgtccctctcgaagtagtaggcggcatcgccgatatccacgtcaccggcggccttctgagacgtgttctgccgcagctcgatctggatggtgggctgctcgtagtgcacggccgccacgaacttggggtgcagccgatagcgctcgcggaagagccgcctcagctcggcgtccaggtctgagtggttgaaggcgccggcggtggggcggtggcgcaggtcaatgaggatgtggtgggtgcgcaccagctcatcgcagcgtaggctcaggtcgcccttgtccgtgcggcgcacgcccaccgagttcacgcaccagcacaccgacgtctggttgcactggcgcgccttgaagcggccctcggggtcgcagtcggggtcgtagaggccatcgttgtccacgagcgcgtgctcactcggccgcaccagcgtgcgggcgttcttgggggcgctcatgcgcgccttgagcagcagacacttggaggtcagcgtggagcagtcgaccgccatgcccgagcccagcgcgcggcactggcagcggccgccggggccgtcggggctgcacacggtcatcttgttggtgggacacgtgcagttgtcctgcgcggccgtgtggccggtcaccgccgccagcaccagcagcagcagcggcagccgcagcggtggcggcgcgaggccggggccccgagccatggtggggcggaggaacgcggaccggacgcgggcggatgaggcgcggggactcgtcggggctcgggctccggcgtctgggatggtctgcaggcgtctgccgcccggccgctccctccggctcttatactctacccgacctgcccggctggttccaccaccgaccgtccccactggtatttgggtgacacatcccgcccccctccccgtcccacggaaggccaagccggccctgcgccgcccgcgataggatcagaacagggaagctgctcccgcctcctccggaccgaaagccgggaaggggagaaccgatactcacctgtaggcttctggggacccgccctcggcgcggcctcctgctacagacctggcgcgtctgggccgctctcccggcagaaagtctaaagagtttcattgcaaagtgtggctcgcgactgtcgcgctctcctctatacgcgactcccttttcgttctttcccagccccagccctcccttaatttctctcactccctctcttctttgtccagttctcacagtagcacacgtttatatagtttacagttcacaaacattatctcatcctaacaccagtcctgacaggtagggactatcagacccgttttataggtggtactgatgaggcttaaagacctgaagtcacactgctatcaacttcctcatatttctgagaggggtctttggcaccctgcctaggagtgatgagaccttaaataaagtgtttgtggacacgaagtgacacagaatctgaagggaagttagggaagcagttctgttactcaccatatcaagggtaaaacacaggtatcctggtgtccagagggttaaaagttctgttaaacactaattttctgtacctcacacaagcgcacacacacaggcacacacgcacataatatttatttgtgcactggctataaagagacaaacaggaacaaattcttaaagagccagcaagactgtaaagagttttttgtacaatttgattctaacacagcaaatcgttgcttttcttttcctgtatcccacgtaagtagctgaaccatgtaaataatgaaagaatggagcctgtgagaaattgcttgtctgccactgtgtggctagtttcatggcatacaggggttgcaatctctttttgagtcattgagaaagtctagagtttcaaagctgtggtaaaattaacaataattagcaagctataattattcccaggtcctccatcaaagcacattttatatgttcagcatttaatgtgcaccaccagtcgtgcaagggtgttgtttagcagatgaaagccagctgggcctctgtcccattaattttcacgcaattcctgaggcaggaagattgaaatatattctgccttgacagacagaggaagcagagacatgtgagggacaatttcttttttcttttttttttttgagacggagttttgcccttgttgcccaggctggagtgcaatggcgtgatctcggctcaccacaacctccgccgcccaggttcaagcaagtctcccgcgtcagcctcccgagtagctgggattacaggcatgagccatcaagcctggctaatttttttttgtatttttagtagagacagggtttctccatgttggtcaggctggtctcaaactcctgacctcaggtgatccgcccacctcagcctcccaaagtgctgggattacaggcatgagccaccacgcccggcgaatttttttttttttttttttttttttttttttttttgagacggagtctcgctctgtcacccaggctggagtgcagtggcatgatctcaactcactgcaagctccacctcctgggttcatgccattctcctgcttcagcctcctgagtagctgggactacaagcgcctgccaccacgcccggctaatttttttggtatttttagtagagacggggtttcaccgtgttagccagggtggtctcgatctcctgacctcgtgatccgcgtgagggacaatttcttatccacaaacatgaggaattgtgggatagtcctctgctgtctatccccactgtctctgttcaggtcttccttggacagatatctgagtcaggttctagtttcttttcccctctccgacctcggtccaccctgcatccaagaagactttctaaatcagaagtctgtgcccacctcctctctgttaagtagagtgaggggggtgctctcggctctccagataaaattcatgcttcttatattagcccttaagatcattcctatatgatgttataggcaagctacgtctctgtgccttagttttgtcatctgtaaaatggggataataaaagt

SEQ ID NO: 2158 - DNA, 4001 bp, Homo sapiens
tttacctattaaaataagtaagaatatttaattcaataagcacagtgaacatcaatatcgaaagacaattttcggtggtacactatagtcgggtgtggtggctcatgcctgtaatcccagaactttgggaggccaatgcgggaggactgcttgaggccaggatttgagatcagcctgggcaacacagcaagactttgtctctgaaaaaaaaaactttagccaggattagcggggcgtgcctacagtcccagttataggctcacagcaggggaggatctcttgagctcaggagatcaaggttgctgtgaactgtgtgatcaggccactgtacttcggcctctgccacagagcaagaccccaacccccaaacacaaagtgaaacatatctctgggcgtaaataaatgttcaccaaaaattaaataattatgctaaaataacagtttagattttaattttaatctttttatagtttccattattatcttgttaggatgaaaagtagactgtcaactctgccaccccaaaatttcacatgaaggaaaaactccaaaattcatgtatgacatccaacctaagtaatttcaatccagtaataataaagaacagagaaggatgaaaagaaagtattggagaaaaattaagtattcccaaattgctcctccaccaacatcatttaaaagtatgcatccactgagtaatgcaaatgtgtagaataccagagaagccatctagcagcaacaacacaggcactgtaattttaaacgtttatatttgcttcctatatttttgaaaaataaagttgtaataacaacgttttgaaaatttccaaactcttccttgtatcccagaggttccttttttgctctttggctttggctttgactggatactgattttacccttggccattctgcacctaacctgactgtgcactaggtcccctgccataacctggatgaaggtctggctgagcgtctctgggatcctttacagcccctctaatgcatcagtcgggaatcaaaagcgtgggtcccaactctgacagtgacttttgaagagttacttgtccgcactaggtctcagtcttctcatctgtcaaatgggaataacaactgtacctatctcacatctgttgtaaggattagataatatatttagagagcttaaaatgtttaaaatgtccgctactgctatcatcactataattgtagtgttcaatgactgtgatttcaccagagggtccgtctgccttacgaaattgctgtcaaaagagcttaccaataatccgtagcagatcacaccagctcaacaggcctccacctccaggaagccctccaggggcgggccgccctgcgctatgccctctggctggacgcgtagggctccggctcactccgcccaagtcagcctcccgcatcccgcacgcccgcgctggggcccgcacctgctcagcaggcccttgggtgcgaagtgcgcttctcccgccccacccagggcagacagtcccgagcaacggcgcccgccgatgtctcccgggcgcccaggaggcccggtctctccagggcggtgagttcaggtggcccgccccgccccggccggagaaaccccgaagccccgccgccgcggactccaggctgcacaggcccccgggcgacgcgggcgtctccggggcgggctggcagcccgaggccaggagagcacccgcgtgttggcctggacgctgtgctagggcagctcttactgtttcacgttgtcccccagggcctcgcttaagttcttcttggccgcctccagctcgctcacaaaggtcgccattgctccgcgtgtctcagcccgaccgcagaccgcccggccaccgcgatcaacaacccaaaaaccaactcggcggaaggccttggctctggaagctaagccggccgccgtcagtcccgcccccaatctctcagaagtcgtttgtttggttttcggctccgcccgccttttcgcagggaaggtgcccggccaaactctgctctcttcctcccgcccctcgagtcacgtgatccgcttcaccttgtcgcgcgcccatcctaaacccgcgcgccccgcctcggctgcaacgttgctgacaggctggcgtgtcccaagctctttcattctgttaccgctggggcaattccgaattcagcctgctgttcttctgcctggaggagtaccttacccctccatttaaaaaagtaaatgcagtatcagttttactctttccttgccttatttttccccgagcactaaccgtctcatatgacatttagttgatttatcttgtaaatgttatggctcgaggacaggagttgtgttttattcactgttacccgcaattctctagagcagcgcctggcacatagtggatgcttaataagtatttgagtaaatgaggtaactatgtaaaatttggaaaatacacagaaagataaagataaaaagaaggaaaaagtgttttaccactcccggacaaacacttaactgagagagatttctccttcacttcgcacactcccatgacttaaaatattctatgttcaattttgcacgtttttaaacttaaggatttatctgtagtattacattgtctttagaataattttaatgacaacatattaaatacccccacagatagaaggtacacaacttgtttcccaattgttagactgtgtccatttcttctctattaaaaagcaatactgtaatattgcttttgaagcatatagcataatgaagcaaaacttctttatgcataaaacttttcctcctttaggattattactttagcatagagtcccacacatagaattactggatcaaatgatgggaatatttataaatgccttggtgtatattgtcaaattgcctcccaaagttttttaaataatcctagatagcttttagatcttgtgtaatttctccaaagatgtccccttaagttcattcattcaacttcctcactgcccaacctaaacccacaagccctgtcctggctgcaatgccagccgggcaccttctcttcacttgaattcatacagtgagctcctattatgtgtctggaactctttgagtactggagatacacaggtgaaaggagatacaaaggtcaggcaaagtcttcctctctgtgtcaaaactctgggtaagttttgacacatttaaaaaatatccacttaagttttccatggctccccacgctctgctgaacaaattccagactccagcattcaaatgttctcatgatctgaactcaccctacctgtgtacctcacacaccactggccttcccacataaccccacacttggactcagcattctagttaacttgactttaacaaatcacatggctcttcccctttacgcatatctcctctctgctggttttgagacttatggttggctacctccattttttttgaatcaggttcaaacatatatatgaatctattcaaggatcaagtcaacaggactaggaaaggctacagatagttgggtacatcttccaggaagaatccctgtttctcatttgtctctagccacgaagaaagataggcctcaaagattttctttttgaacccatgcttgacaatactcatacgtctagctcaattaaatatccctttctctctcagcacttatacacctattaacactaattttactacagtttttcagttaaatgtccatttaaactgtaatgttagacaatataatatacataaatggacatctgaccaaacaatttaatattgagaggtgaagccgcctgggcttctgggctgggtggggacttggagaacttttctgactaaaggattgtaaacgcaccaatcagcgctctgtgtctagctaaaggtttgtaaacgcaccaatcagcactctgtaaaaacacaccaatcagcgttctgtgtctagctaaaggtttgtaaacgcaccagtcagcactctgtaaaaacacaccaatcagcattctgtgtc

SEQ ID NO: 2159 - DNA, 4001 bp, Homo sapiens
tttccttactattaagtgacatttactgtattaatgtcaatacagtaacaacactcaaattatcagaaactgtaaaaatttccagtttttactggaaataaaaactgggccgggcgcagtggctcatttctataatcccagcacttcgggaggctgaggcgggcggatcacttgagatcaggagttcgaaacacagcctggccaacatggcaaaaacctgtctctactaaaaatacaaaaagtagccgggcattgtggcacacacctgtaattccagctacttgagaggctgaggcaggagaatcgtttgaactggggaagcagagattgcagtgagccgagatcgtgccactgcactccagcctgggtgactctgtctcaaaaaaacaaaacaaaacaaaacaaaaacaaaaactgcaaggggggtgaggtgactcatgcctgtaatcccagcactttgggaggccaaggtgggaggatcacttgagcttaggagtttgagaccagcctgggcaatatagtgagaccctgtttctacaaaaaatttaaaaattagcagggcgtggtggcacacgcccgtagttccagctactcaggaggtataggtgggaagactgcttgagcctaggaggttggaggtgcacggggccaagactgagccgctgcacttcagactgggcgacagagagagaacctgtctcaaaaaaaaaaaaaaaaaaaaaattccctcctgagtttgaagataaagcaaagattctagaagcatttaaggaacattaaccaagcatctcatttgctacgcacagaagggtactgtattaaaattatgatctaactaaccattgcctcactgtaatcctaagcctctttgaaccttagccttcttaaatgtaaaataggagtttttaaaagatgatcttttgggactcttccatcactgacattcttttatttgagatgcagagatctgtgctcattcagggttgagtggaatgggatttaaagcacttatcaagtacataactgagttccaactgttttcaacttcacatctgattcccaagaatgaagcagaaaatgaagatgtttgcatatgggcttcctagattgagtatctgacacaagaaaagcttgccaagagccaagtaggcagtgcgaaggagaagttgtcttcccctgaatacgtcctttatctctctgggttcagggaatactgtgaaaaaatggatcactaaatcttttccaaaccctttccctttactttgtaggctgatctcatatccatggtcccttagatccaaggcttttaggagcttgggtactcacagccctgttccgagactcaggaactcggagtctcaaagcccggatcccgtccccaaagaagccccagtcttcactgcccgcttctgttcccttccaaactcaagttttctctgtctgcttctgcccctcaggaacctaagtcttcgctgccccgtttctgaatccttaggagcccgggtcttcactgtcccgcttctgcctcttaggagcccaagtcctcaccgctccacttttacctctccggagcctgtgtcttcacgccccgttcctttctgaccctttcctcgtaggagtgcgggtcctcataatcctgctcctctcagaccactttccctcagatgccggagaactcgcatccgtccccgttccctaagtcccgtcttagagcccgggtccccacagccgcgtcttctccgagcctgatcctctcagtcagtcccttcccaagagcctgaatcctcacagccccgtctcgtccacaacctggtccttcgaacactgacccactgtaggtctgggtcctgactccctcctcccgctcttgttcctcaactgccagggcccaagactcacaggcagcagcgtctatctccccatgatatgcagagactgccccagtgaagcgttcgtctcagcagccggtccgactgcgcggccctccccgactacttccggcaccgctccccgcctccaacccggaaacgcgcggctcttccggccggcgggcgcgcgcctcgcttgcgcaggcgcagactgccctccgacacgtggtggcgatattgagctgtgtgtaggtacaccctgcagcttgcgcttttaactgcttgtggttgagtggcagcatgagcgagctctgcgtattccaacccggcgttaagaatccttcactagcttttcttcccgacgctgcttatttatctatcggtagcatgacgggtaattgacgccctcggatggctttgaggtcgccatttttggttggtgcctttgtcttggtgtcaggactgggatatcatctgggacacattaccccacaggtatcctgttggacctcaacgaggaagttggcaacagaggaaccaggagatgagagagatcggttggttgtgcctgtgaactggcaattcagtagtaacaattgagtgcttactgtttgccgggaattgtgctaatccgcttacctccgttacgccatttaatcatttagaggagacctgtgagagattaagcaaagttctagctaataagtgcagagcctcagcttgaactcagaactcactactaagccaaagcctgtcctgtagcattctctaatgctttcagtttttcggctgtcagatgcttggtgagaactgctgttatgtggctcacgcctgtaatcccagcactttgggaggccgaggagggtggatcacgaggtcaagagttcaagaccagtctggccaagatggtgaaaccccgtctctactaaaaatacaaaaaattagccgggcgtggtggcatgcgcctgtaatcgcagctactccggaggctgacgcagagaactgcttaaacctggaggggcggaggttgcagtgagccgagatcgcgccactgcactccagcctgggcgacagagcgagactctgtctcaaaaaaaaaaaaaagagaacagctgttattttttactgtatgctggaatgttaggcatgcaagtaagacccaattccagcatctgtaaggttcacagtaagatggagaagaacccacaaacacaccaaaaattgtataaagagctgtgacaggccagagtgagccacatagaaattaggaagaggtgcccagattggtgcggcatcctgccctgtctttatatcttcctaatcctcatcctaccacgttcccagtccaccctctacactgccacccaatccaaattctcagattcaagtcctcatgaacattgggctctaagctgtattcctagccttatttccttgccactgctctccattctttttagggtccggcataccactttttgttgttgaatgcctatacatcttttttaagacccaggttgaatgtatatacgttcatttgacaagtgtttgagtctcattgtgtgacaagccttttgctatgtgctgagtacataactggtggctaagacggatgatctctgtccttagaaagtttgcaacctagagtgggaaacagaccattagcaactgcacaaaagggtgatagaagagaatactggaataagccagacttatctagctggctgatggcctgagccatggtcttcagtaaggaaaacacttactcaaggaccaagatggccaaggtggctggagctttggtaaccgggaaagacaatgagtttggagaggtaggcaggggtttgttatagtctggaccttttagcctagactatgatggggacttgagattatattcagtatgcaatgggaaggtgttggaagaacggtgaaattatggcgattgttaaatgatacagggtctcactctgtcaccagggctagagtgcagtggcacaatcatagttcactacagcctcaaactcctgtgttcaagcgatcctcctccacctcagcttcccaagtagatgaattttcttttttttttttttgagacggagtctcgctgtttcacccaggccggactgcagt

SEQ ID NO: 2160 - DNA, 4001 bp, Homo sapiens
gcgcctccgccaggccgcccgcatctgggaagtaaggagcccctctgccctgccgccaccctgtctgggaggtgtacccaacagttcattgagaacgggccatgatgacgatggcggttttgtcgaatagaaaacggggaaatgtggggaaaagaaagagagatcagattgttactgtgtctgtgtagaaagaagtagacataggagactccattttgttctgtactaagaaaaattcttctgccttgggatgctattaatctataaccttacccccaaccccgtgctctctgaaacatgtgctgtgtcccctcagggttaaatggattaagggcggtgcaagatgtgctttgttaaacagatgcttgaaggcagcatgctcgttaagagtcatcaccactccctaatctcaagtacccagggacacaaaacactgaggaaggccgcagggtcctctgcctaggaaaaccagagacccttgttcacatgtttatctgctgaccttctctccactattgtcctatgaccccgccaaatacccctctctgagaaacacccaagaatgatcaataaatactaaaaaaattaaaaaaataaaataaagcaaaataaaaacacacaaaaaaaattaggtgggcgtggtggccggcgccagtagtcccagctactcaggaggctgaggcaggagaatggcatgaacccgggaggcggagcttgcagtgagcagagattgcgccactgcactccagcctgggcgacagagcgagactccgtctcaaaaaaaaaaaaaaagcaatttatacacacacacacaattggggttaggattggtactatctgattcaaaagttaaacagaatttgataggctagtctgagaatattatccctacagggaaacattcaaagcaataaagctactttgaaaggacatgtccaaaagttttcatcatctataacaaaatcattgtcaaatactacttacattctttagaaaaaagtctctttcttttaccctgtccaccttctgcacctcctccaatttcttcattttcttcctcaaactagaagttaaaatgtatatatagaaatgtcaaataattgccttgcatttgatattttaataatgacatttttttttccttttcaacagataggccagaaagccaaaggaagcagcaaaaaaaaaaaccacgaaaccttagcattgaaggagcctatgtatctagtccaacttccaactcatgcaaaaatggcttctacaatgttcctaactaataatcctactgcttctacttgtaagagttccaatgaccataagttttatttttaaacaactaaggtggcctattactactgttactgttaaacagttgatactgaatcaaagtctacctttgtagactttgtagtaagcaaaactaatatttcctatgcatttgcttatacagtgctaaaaacgttccttaagtaagcccgtaaccctattttataaaaagaaaactgatgttcaaagttaaataacttgctcagagagaatggaaattttgaaatccaggctgtctgactttcaatgcattcttttcccattacttcacagtaagtacagttttgttaacaattgaactgttggctcatagtgcgcgctaatagatgttagttttgatctctgatgattctgtacgtgtttcagtgtctggcaaatacagaccaaaatcaaggggaaaggggtcacaaaacctactcttccttcatgtccttccccactttctaaaatgatcaatccttagggcgtgaagtccccgaactctgtccgctgaattcactaaggcaagcagacccgatcctgaactctgcctccgctactgagcccgaaggagtgaagaaaagacaggttttggacagagacggtcactcaccgtggggtcttcttcctcatctgccatcccactagcacgccaactcacagcgtcctgccggctggctcccagctggttacactacttccgccgcctcacttccggtgacgcgcggggccgtagctgggcctagccctctgcggcctgcgggaggacggtggtgctttccggcctagcggcggaaatgcgacagtctctaagggaggaggccggagcgcctccctgtaatcccgaaggaattgaaaactaacaaagaaaaggaaatcacgggctaggtcgcgagtatctcgttgtcaccctgaatttgctactgcgtattgaatcacagcttcttgtttggggactgcgaagctatggatcataggagggcaagccagcagtcctttatcagacaaatatgcttttaaatcattttaaagatttgtagttccactgtttctaagcactgtgttaattattggggatactgtgcttcatcacaaatttccaagagatggtgtcccgagactaagcatttaaaattttgtgaaggttttttgattttttttttttttttttttgagacgaagtctcactctgtcgcccaggctgaagtgtgcagtggcgcgatcccggcccactgcaacctctgcctcccgggctcaagtgattctccttcctcagcctcccgagtagctgggattacaggcgtgcgccaccatgcccggccttatttttgtttttttgagacacaacctcactgtcccccgggatggagtgaagtggcgcaatcagggttcactgcagcctagacctgctgggctcaagccatcctcccacctcagcctccaagtagctgggattacaggcgcacaccaccaatgcccagctaatttttgtatttttagtagagatggggtttccccacattgcccaggctggtctggaactcatggcctcaagcgatctgccccgctctgcctcccaaagtgctgggattacaagtgtgagccaccgtgtccaccggggaaggcttttggtcagaacaatggctggcaaaaccacaggcatcggaaggccagagctagggatataatataaatgtccctacagtgtaacagatgatgctacataaagaaaatcccgtaatacacacgatttctgaatgtcctgctgaacattcggtgagtgaaaactaattatctgagagttgaacctatctttgttaataaacacaaagcggccgggcgcagtggctcacgcctgtaatcccagcactttgggaggccgaggtgggcggatcacaaagtcaggagatcaagaccatcctggccaacatgatgaaaccccgtctctattaaaagtacaaaaattagctgggcgtagtggcgcacgcctgtaatcccagctactcgggaggctgaggcaggagaatcgcttgaacccgggaggcagaggttgcagtgagccgggattgtgccactgcactccagcctggtgacagagcgggactccacctcaaaaaataaaaattaaaaaaataaacacaaagcattttcccacacttttaatgtacgttgaagtttctaggaatgttattaccccaaaattgaatagtaattgtattttgtttggtctggaattcattaagagctgtgtaccatttcaagaaataacgtcaccaaaagcaacatcacttgtaataatttgaatagtgaataatgaaaaaataactttgatttgaggaatgtgagttaaattattaggcccaaagaggcattaaaatgagaggcaatcacatcctgcttgcccccttttgagctatgtatttatgtcttaaaaccgcttgctattgccacaagtattagttataaattagcctaattatgccccatcagacaccatatcgcacaccctatagcttgataatgtttagccaattactaatcaatgttatttttgtgaaccaatgagaactccttaaagacaactttgtatcagcccactccctgtcctcattcttttcctttaaaaatccacttgtacctgctgctaatcttagagtgtatattctaggcaactttatgctgctgagttgtaatcc

SEQ ID NO: 2161 - DNA, 4001 bp, Homo sapiens
ctcagttactcgggaggctgagtagaatcacttgaacctgggagacagaggttgcagtgagccaagatctagccactgcactccagcgtgggcaacagagcaagactctgtctcaaaaaaaaaaaaaatctattacacgatcaattctattcgaaataatttcaatgcaattcaacagcaacttcttgaacacttcctaggcatgttttcctcaatggcagagaccatatcttcacctatgactccccaatatttaatcaatgccagagataaaagtgctcagtaagtattactggaaaaaatgtgtatctagcataatacagactatctattattaatccaagggcaaagaattctaaaagaaaaaagatttcttttggcttttagccaaaaaaccctccacatattcctcttgaaaattaaaccagtctggttattcattttgtatccctattgaatcttaccacctccttaaagttaaaatggctcaatgttattattttacttacccacagtttctacgtatgtttgaagccaaggaaaatgcattcctgcaccactgagcacagatgtttccacttcttcatcatctgtcacaggcccttttaattcttcactgaaatcactcatacctattacaagatgagatatcagttactttctgtacatcttaatccacagtcttctgagttgtacagaaaaacggctatctttttatctaataaatataatttgattagcaaaatgcattatacctgtcagctcttttaaagtaaaaaatgaatttaactatgtcagcaacagccaaaatgaatgatccattaaagaccgaaccactaatgtttcaagtccatgtaaagataaataagatactgcccctctaatttaaaaaatctcaagtctagacgaagaaacagcaaaacgtataataacaaaacaatatgaaaagtacagtaagaatagaagtagcagctaatatttattaggcccttactatgcactagaagtataaattatctaatttaatccccacagcaatcctgaggtgggtactattactttcttccatgtgaaggttgaaaaaactgaggggcttagtgaaatgatggaacctgcctaacatcacaaaaaatggtgaggacgatagtctaggaaatagaacaccaaactacttggcatgactagaattcgaggtgcgtgtggaggaggggtgcggaaggtgagaaacgaacctagaaaaatcatcataagccaaggtgagtttagacttactcctaaagatgctcagggccccttcctcattacccatatgaaatcgagtattagtgcccctgatactacctccaaatttcccctatttcccctcttcaatcctacagcactactctagttcaagaccccttcaaacagtgcctagattaccgcatcagctttctaaacaattaccctggctcagattttgcatctctgcattatacccagagtaaaccttctaaattcaaagcatgtggctaggagtatgaattataagtaacaactgaatttgaatccgacccatcacgtgttttcaggagtagttacacaaatcctccctttccaaatcctcaaaaacccaaattggtgacccgcagttgccacggcaaccaaagcttctctatccccttctttcgttttcagaccccaagggtttcaggtattaggaggaaatatcaggagaacatggatgaatcctgacacaccccttcccgttccatttaaacgcaggaaccacgggcgatatctgcggcacttacccgcctaaatttagagctcctcagtaaagctaaactcagtctccgactccggcccacgtgaagaaattcccaccggaagacgagttaggagagctttatatgagcaggcgctaaacctggtttaggtatttaggcagcgcgcggcccggctcgtaactcctcctgctgcagcaggcgtatcgttggcctcgcctcgaccccggaagtgacttctggaagtgacccaggaagtgacagtgagctgcctctctgcgattggttttgcccgagttttatttttgtctgtctcagctagaaagtgggagactttcatttaaaatggaaattggggcgaggggttggcggctgggcgaagggagcattcaaaagcggagaatgtcactttacccgagaaattcactacgatgggccattggtttctgctcggctcgcaggcgcactgcacgagtggaggtgtggctagtggctgtgatgagataaatccatgcatagccttttcattgcgagcttgaaagttcttttctattacagttttagctttaggtttaattggttcgactgccttctccacaatttgggcgagaatttcctttgccttctcagcaaaagttgttctgcggacccgtctgggtcaactttcatgagggacattgagacaaacaaatgaaatatgggttaaaggtaagatggttaaaccgtgtgaaatgagagacagttgaggggttctagggaagatgatcccggaaaaggactgcaggcccatggaaacgcagtgtgcttctccaatatttggagggctgatcagtgaaagaaggatcagaccctttttcttagcagcagagaacagaactaggactaataagtgaaaggtaaagggaggctgctttcaagtcacagcaagaaagaattttgtccacaaatgaggatgcacaaatatagcataggctcccccaggaatcactgagtttcctctgtgtaggtgaacagtttgagtagaatcggagtatcggagaggaaattaaagggtctggtaagagtttgaggccgggcgcggtggctcatgcctgtaatcccagccctttgggaggccgaggcaggcggaaagtttgagctcaggagttcgaaaccagcctagtcaacatgatgaaaccccgtccctacaaaataaaaataaaaaaaaataagctggggtgatgatgcatgcctctagtcccagctactcgggaggatgaggtgggaggatcacctgagcccagggaggtcgaggctgcagtgagctgtgatcaccctactgcactccagcctgggcgacagaatgagaccctgtcaaaaaaaattttgtacatggattccttaaaatgctacaaatagttgattctatgttgtcttctgcataaaacaatatgcagtagttaaggacttgcaagaaaagttccttctgctgctctctctgtcattagttcttgagtcctcactcaagcttgtgctctaactctacaggcagggctaacataaattatgcgtagtccaggagaccacacacaaaataacatacataatcattactttcttgtctagaggcttagtctggctacttttctcccattggcttgaggtgtaaattcaccaaaaccagcccagaaatgattttacatggaaaaaagtttatgttctcccgaaaatgaggaagagctttcagattttcctcgaagttctcaaacagctctaaggagcagtaggaaacgtgccctacctatgctttttctttcccatgctgcaattctgacagaaaatgtgttggagagaagagataaaaaaaatcaactagatcacatccaatagcataaacaagaaggaaggagggaaggttgccgtggcaggcatctgtagtcccagctactccagaggctgaggcaggaagatcgctgagctcaaaagttcaattccatcctgggcaacatagcaagaccatgtctcaaaaaaaaaaaaaaaaaaggcatgacaaatatgaaaacataaagcatgcaaagacttttctagatttcaatctataagaaaacatgtcctaagaaaaacatgttcttacaattactttgtgctacagagcaacttaatatggtgatgaattatgttgtttttaaagttgcaaactgtcatttaaggaatattatttccatgaacgcttcctgtgcaatctattaaagaaca

SEQ ID NO: 2162 - DNA, 4001 bp, Homo sapiens
gtttaacagatgacccctagagctcccttccagcaaaacaaattagcagaaacaaaaccccctttctttccccagagatgtccttcacaggtgctaatatattgcttgcaaaaccaaaaaccagttactgagtagttaagtgaggcctttacctagtttcacagtgacagaagctcacataagcctcacatttacaggcaggagcaacaaaactattccaagatacactaatttaatttgttgttgatgacaaagaaaaatactcaaaacaagcccaccttttaattttctagcttagcgctgatttttaaggcaggaagaatttacgattcattaaaaaattagcatatattccatttaacgcaaaaacttaggactacagggaacctagaaggtattttgccaaaaaggaaacgataatagctaacatttagctattttcatacacatcattctttttctgggtacctttaaaaaggtcgttttttgggaggctgaggcgggaggactgcttgagcccaggcctgggcaacatagaggcaccctgtctcttaaagataaaaaaaaatccacgtttaagttattccttatcatcgcattttatagatgaggaaactacagttcagagaggttatgcagatggctacatggtttccatcctaggtctactgtcaccaagctctatccactacattatgctgttccaaagtttaaagatgtggccagatgcatttaacctattaagcacaaaactccctttcctactcccccttccaagtagagctgtgaccaggaactggggcacagcctccgtgtcctcccctacatccccaactcaggtgttggcacacttgaatcgcctgatataagacacgctccgcacttaatgttcctctcagcacagctcccaactgcttgttagcaggagtcaccattccgagattccaatctgcaaggtcagtttaggtacagtaatttaagacagacactgcatgggactggcacttaccttctgatcccagaaccacaaagactgcgagatccgcattacaacgactttcacaactgatgggagaactgcatgtagcgttcctgcactccacttccgctaagtctaaaatgacaccactgtttctaaccatccactcacttcggaccaacgccttatcgaatacattttcaaaagcctggcagcttcgcgagctggaggtggtgaacccgtcccacaccatgggcgcaccaaccttaccttgctgtcatgaggcaacgagccccgagagacacccttgcaggtaagcactctcctgcagcagctagtctaactctggctcccccgtgtcacacgcggagatcgactccacacccacccacgcacgatcaccatgtgcaaagttgaatcccgacttcgccgcaaagacatttccttttcccctacatgcaaaggagctgtggagccgtgctccctgcttggctgtcgggcactgggataccttccccgcgggcgcccgccacctcctccccgagcccggcatccaacccgcaggacccacccctgcgcaggaacgcgacgccagtccaggtgtagccgccgactgcaggccacgccgccggccgcagcccgggactcgggaggccgagggcggaggcgcggccgtcgcgcccgcgcagagccgcccgccgccccccagccccgcctcccgcgccccacccccaccgcccgccggcgggagccaaggcgcgccccgccgaggccccaccgccccggcccccgcccgcccgcgcgcgcgcgcgcctcgcgaccctcccggccctccccgcccgtgctcccggcactcactgaacatcccaggcggctccggctccccccgccgccgccgcctccgggatcgggttgcttccgcctccgtcgtctctgccgcagggtctcactccgacggccggctcagctgggcccccgcgccccgcgccccgccgcccccgccgccgctctgggcggccgctccatgactgactgacacggagcgggccgcgggctgggccgctcgggcctccaacgcgcaaccgtctccgccaatgggcgaggcgcctcggcgctcggctggcgacgcctggcgtgcgtgcagcccctccccgctgcgccgccggcgtccggcggaaggagcgcgggtaccggtcccacgtggtggggacgcgggacccgtacagcggcctccgccgcaccgggacagcagccgccgccgctgccgccgtcctcccctgtctacccggagctgtctcgagctgagccccctaccgggccggatcccgaggtgagtcccccacctgcggtcagcccctgcgggcagccaggtcccgaggtgagtccccccacccggggctggtccagaggagatccccctacctaaggccgggcccagatggggggccccccaaccctgcccagttccggtgccgccagcagactctgggctggagcggcttcggcacgctccattcgcgaaggcgaactccctcctggctcctagctgctctcccctggttcttgttgcttggtctctttctgctgggcagggagtgctggcagggctgtgctgtccgccctggacttcgcattgcccggtaagggcggttggaggcccggagagccgaactctggcggagccggggagagcatctcggttgtctttgtagccagttcagcaaacacctgttatgcactttgtagctgtcgcgatggcggttctatggtattgaacttagaaagtcaggcatcgttgaattcgttttggacattttgacaaaataggaaaactgacagcacttgacgttcttgttctctgcagtagagtgaaggataacttaatttctaaaatgaaaacgtcttaacgttcctttttactataacttttaggaaactcaaagccaagtttacccagtttaatagtaactgtaggtgtttggtatgtttgctacccccgagatttcatggttttttgttttctatttttagtcttttccttgtgcaagtatctcttgtagagtcttttttgaagtgtatgtgcgttgtaaatttatacacgactgaataaaagtgttagtggaaggttactgttgcagctgaaataactgtattcctttggggttttctttttcacttggagacatattactttctccggatattgcttatgtatcttttcctctttcaatttgaaaccatgtatgaatgactctttccacaagtaatgtaatcactgattttggccttgttgaattcctgaacactcacctttgtggaagtgatgtttgatcatagctggaatacatatagtccatcttctgtgtgtgcagtccatcttttgcttgcttttgtctgaatttcccccagaaaattctggagtcaagcatcttgtatgtagatttaccccgacaaatctgttgattcattaaaaacttttaaaagaatacatattaggtaaacaagatacagtactgcaatactgttggttttctggtgcctgctcagtctgacattgttatagtattttttttcccattgtttttaaattttagataaagcctagccatggctgctgtttattctggcatttcccttaagcttaaaagcaagacaacttcctgggaagataaactaaaactagctcactttgcttggatttctcaccagtgctttcttccaaataaagaacaagtaagtttaatgtgaaactcatatttttacagtctgtcaagataattatcacttttataatttggatattgacaattggttaaaataaaaaaatagagaaaaagttggggagggaactttgttggaagttaaatgtaatgtcaatgaaaaaagtaatgagtcaggtacttcattaatacattttttttttctgttaaaaaacctcatttaggtcggggacagtggctcatgcctgtcatctctattttgggaggccaaagcgggggatcgcttgaggccaggagttcta

SEQ ID NO: 2163 - DNA, 4001 bp, Homo sapiens
caccgtgcagatggaacacaggagaacttcccaactcagatttgggacagggagtgttctcaaagagcagcacagtgagggcaccagcccacagagcgaggtgccacagccagcagcaaggatggggggcggcccacaattaagggaaccaccgtagggcagcccctcaccaccgagagtcaggagcagaagagaaagctgaggctacacaaacaggaagctccaaagcttgcgtgggaggaggggatgaggtgggggccgttgccatggcttctgtgtaccaaacagtgttggaggctgggtgggggctccgggcagaaacaccctgtcaacacagacgttgtggtgagcaggctgtgagcacgggagcagaagtgggatcgtctcagcagtgctcgggtgtagccaggtgcaagagattattccaggagacagctatagtggggatggacagcgtgtgggggaagataggaaatgacccgtgttggggtgaagaagaggactcaggaagtagttgttcaggagaagaaatcccctgggaagggaaagtgttctgagctagagaacccacagctgaaaattctggagggagaagggatggaatgaagaaaggattaggggccaatcccggggtgggggacaggggcagaggccttggggtgagggagggagttgcggttggacaaaacctatttgttggttctggaatggtagggccctactgggcccgccctgccttggcctcctctgcagttgtaggtctgccccttgtagtggggaggagaaactgggagggggctagagatagagagccattgctgtctggtgctttgaagtcaatgagaacactgggggagccccgtcccagccgcaggtcttctacatcgaatcccacactccatccccactctcaccccgtttctctctgccccacagataccaactgctcacagatctcccaggacaccggcttcaggtagccccaggaggcacagggcgcggggggaggcggcagtccacctccggtcctgcaggtccggcctcccagccgccgccccccacccccacgaccacaccctgggccgttacaacagatgagtcacccaccgccctcccgccgctggggtgacgcagtggtctgggcagcccgcccgtccgcccgcggccaccaccggctttcccagcagcagggggcacccggtgggggcagcggcgctcgggcagggtaaaagcagccaccaccacccccacaacctcacacagggcaccccggggcgcagtcagggctgcagcacccagacccccgaggtcaggggaccgtcatagagatgactggagcttcacagaaggtcaccgtgcgacccatgcagagccccctagccccagcccgtgacctcaagtccccagaatagcaagctagcaggaacaggaatgaaaagggcggcctcggggactcagagggcacgcagtgctcacacgtgctcctggaaccaggaagtgaagggtcgcgcgggaaagcccaggagcacgagctggcccagggccggcgccacgacccggggtcactcggggccagccagctaaagtccgacgcccttttttcccctcgccccagtgaggactcagcgatggagcccgcgggtggggctcagtccctgagtccctgctccagacggacgccctgtctatgcatgggctaacctcgcctgacctcatcgtccaacaatgtcgggtcagggcttggggacaggacctgacagcacggggcggggtaaagtagtcaccggacccttgcctggtaccagcccttgatccccgagctcgctggagcaagttcaaagcgctggcttcttgctttctacacagcacgcacatgtccccgacccccgtacccccgacctgctcaccgttcaagcgggctggagagcggcgcactgactcaaggcaagggctgcagctgcaagtggtgcgccctgcccagccggggattttcaggagggtcccgcctcagacggggcggacccggggcggggcaagggccaagaaggtttaaaggcgccgcagcgcagaaggagggaggactgcttgagacagagggacagtagaccagagcaagggttaaaggttcggggagtctgaatctacaaaggcggctgcagtggtctccacccgtgagtacctcagcctccaccgagagcccgtagacttgtgccccagtaggaaactttctgcctagaaagttagctaaacactgtgggcgtgtttatgtaggaagaagcctcctagtttagaggctggcaaggtaaaaggaggcacaggaaggccttcccccgaccccaactgactagtgtgtgacaggactgggacttgcaggccgggacagcacccccacgtgatcttgctcacctcttacttcaagcctgggcagggactaacagtgaggtcactctgcccagggccctaggggtgttttcggtgttgggacccagggctcagacctgtcttctccctgcctttcatctccttttctatgacctggtatctcttcctaaatcctggagggatcagagggggagacctcagcgcgaggaggctggctggggttcttttgtctctgagggtggaggacagcacagttcaggggtggagaaagagccccccatcctttcaggcttcagttgaatagagtcccccggggtggagttctgcacacatgatagagtcctcccttgaacctgagattccaggatgtcaatatccagtcctgtccaacctttctattattctctgttccctccccgagtcctacacagccctatattccagtcccactgattgtcaagcattctcactcttctgtgcctttacaaaggctattcctctgcctaggacagtttcccttccttgactggctccccacctgctctaccctttacctgctgtgtgactgttgtgcattctatgcttgagttccctggtctatagaacagagctaatagtactacctaattcatagaattgtagagaactaaacagtccacctatagggcttagagcagtgcctggcacatagtgaatactattattaccaccatctatctgtgagggtcctgaggactcccccccaatatgtggcatttgtcccagcacacgatattagcgttcactaaaggtggccttgaatgcaacatcttcctttgtgctacaataaccaacacatagctttatcacggaacttatcatacggtaactatttctttgtccgcctcactgactagaaagaactcctcaagggcaaaggcgtgcttccagagctttgtattttctcagtatctacttcagtggctggcctttagtagctggcctccgtaagcactcaataaatgttcttgaatgaatgctgaatgcacctccatttattcaagaagattctcctcttctttaagggtccagggattttcctggcactctctcaaagacagataacacacagaaacatctttcaaactttgtttattcacctgtaaaaaacttcacacacacacacacacacacagagagagagagagagagagagagagagagagaggcagacctaagatccctgttccaatccccagactcacctagggggtcagcacatacattccataccaaggtgacccaaacccactatcagggtctgtgcctgggcaccaaaggggcaggcaggggcagtgccctcgtttgaaactaggtctgtctggttgggggcctcctttgcaggtccatatgccttttcacagcctcacatcagggatgttcacagcagagtggcctgttcggggtgggggactggctgtcgataggctggtagccgagccctagtagcatctcggcggcggcggaaggccaggaattcctcccgaagggcagcacagcgggcctcagggccagtaacatgggcagtgttcaggaggcagccctcctctggagtcttcacacctgcaagaggcgggcag

SEQ ID NO: 2164 - DNA, 4001 bp, Homo sapiens
ggggaatggctggaagacaggtaggaagaggaaggggctaagagctactaccaccagtaagccccctttccgcagcccagttccagacctctctcctgggagtggctgtgctcagggctgtttccagggaccaagtggcctgaggctcggggatcaccatggcacaggtaaagaaagggcaggagaatgattaacctagacactggggttaagagcagagagaaaggcctgaagccagacacttccagtgccccccaaccccccaaggcaggacaaacttggcctcccagacccaccactgggtggaaagtggatgctgaggaaccccctccaccgcccaacgctggggcctggacacagctggcagggtcacggcctccagctgcagtgtatctgctccactctggggccattgccctcaagctctgaggtgccagagccatagggcggggtcctgagaaggggcagttccaaccaggccaggcctggtcagcagctgtttctcttccccacccccacgggcaggcagaagctgatgggctgcggctgctggagctgggaaggcccaccctagggacacccaggggacctgcccctgccttccctcaaacataaagaaaacagtaagcaagttgcctaccagggtgagaagagatatgcccagctggaagacaggtgtgggggacccccagagctggggaccccaaaggaaggtgacagctgaacaacctgggggatggactggcagggagcaacctaaaccctagcgctactgcagctgtgagaacaaccctcaccctcaccctggagttacaataggcgggaaacggggaggggccacgcaaggcactcggccccacccagaccctgggctggaagcttacctcaccaaagccaaagccaaagaaaaggcggacatgggtgggggcagggaggacttcagggttcttggctagggtgtttaattgggaagacaaagggactctccatccaccgtgcagatggaacacaggagaacttcccaactcagatttgggacagggagtgttctcaaagagcagcacagtgagggcaccagcccacagagcgaggtgccacagccagcagcaaggatggggggcggcccacaattaagggaaccaccgtagggcagcccctcaccaccgagagtcaggagcagaagagaaagctgaggctacacaaacaggaagctccaaagcttgcgtgggaggaggggatgaggtgggggccgttgccatggcttctgtgtaccaaacagtgttggaggctgggtgggggctccgggcagaaacaccctgtcaacacagacgttgtggtgagcaggctgtgagcacgggagcagaagtgggatcgtctcagcagtgctcgggtgtagccaggtgcaagagattattccaggagacagctatagtggggatggacagcgtgtgggggaagataggaaatgacccgtgttggggtgaagaagaggactcaggaagtagttgttcaggagaagaaatcccctgggaagggaaagtgttctgagctagagaacccacagctgaaaattctggagggagaagggatggaatgaagaaaggattaggggccaatcccggggtgggggacaggggcagaggccttggggtgagggagggagttgcggttggacaaaacctatttgttggttctggaatggtagggccctactgggcccgccctgccttggcctcctctgcagttgtaggtctgccccttgtagtggggaggagaaactgggagggggctagagatagagagccattgctgtctggtgctttgaagtcaatgagaacactgggggagccccgtcccagccgcaggtcttctacatcgaatcccacactccatccccactctcaccccgtttctctctgccccacagataccaactgctcacagatctcccaggacaccggcttcaggtagccccaggaggcacagggcgcggggggaggcggcagtccacctccggtcctgcaggtccggcctcccagccgccgccccccacccccacgaccacaccctgggccgttacaacagatgagtcacccaccgccctcccgccgctggggtgacgcagtggtctgggcagcccgcccgtccgcccgcggccaccaccggctttcccagcagcagggggcacccggtgggggcagcggcgctcgggcagggtaaaagcagccaccaccacccccacaacctcacacagggcaccccggggcgcagtcagggctgcagcacccagacccccgaggtcaggggaccgtcatagagatgactggagcttcacagaaggtcaccgtgcgacccatgcagagccccctagccccagcccgtgacctcaagtccccagaatagcaagctagcaggaacaggaatgaaaagggcggcctcggggactcagagggcacgcagtgctcacacgtgctcctggaaccaggaagtgaagggtcgcgcgggaaagcccaggagcacgagctggcccagggccggcgccacgacccggggtcactcggggccagccagctaaagtccgacgcccttttttcccctcgccccagtgaggactcagcgatggagcccgcgggtggggctcagtccctgagtccctgctccagacggacgccctgtctatgcatgggctaacctcgcctgacctcatcgtccaacaatgtcgggtcagggcttggggacaggacctgacagcacggggcggggtaaagtagtcaccggacccttgcctggtaccagcccttgatccccgagctcgctggagcaagttcaaagcgctggcttcttgctttctacacagcacgcacatgtccccgacccccgtacccccgacctgctcaccgttcaagcgggctggagagcggcgcactgactcaaggcaagggctgcagctgcaagtggtgcgccctgcccagccggggattttcaggagggtcccgcctcagacggggcggacccggggcggggcaagggccaagaaggtttaaaggcgccgcagcgcagaaggagggaggactgcttgagacagagggacagtagaccagagcaagggttaaaggttcggggagtctgaatctacaaaggcggctgcagtggtctccacccgtgagtacctcagcctccaccgagagcccgtagacttgtgccccagtaggaaactttctgcctagaaagttagctaaacactgtgggcgtgtttatgtaggaagaagcctcctagtttagaggctggcaaggtaaaaggaggcacaggaaggccttcccccgaccccaactgactagtgtgtgacaggactgggacttgcaggccgggacagcacccccacgtgatcttgctcacctcttacttcaagcctgggcagggactaacagtgaggtcactctgcccagggccctaggggtgttttcggtgttgggacccagggctcagacctgtcttctccctgcctttcatctccttttctatgacctggtatctcttcctaaatcctggagggatcagagggggagacctcagcgcgaggaggctggctggggttcttttgtctctgagggtggaggacagcacagttcaggggtggagaaagagccccccatcctttcaggcttcagttgaatagagtcccccggggtggagttctgcacacatgatagagtcctcccttgaacctgagattccaggatgtcaatatccagtcctgtccaacctttctattattctctgttccctccccgagtcctacacagccctatattccagtcccactgattgtcaagcattctcactcttctgtgcctttacaaaggctattcctctgcctaggacagtttcccttccttgactggctccccacctgctctaccctttacctgctgtgtgactgttgtgcattctatgcttgagttccctggtctatagaacagagctaatagtactacctaat

SEQ ID NO: 2165 - DNA, 4001 bp, Homo sapiens
ttggaggagcttgattagcaagaactgggtggtttcccgaccaatggcctgagttggcggacctcactgtggcagtgtgttcccaccacactcaccacctgggtctgacactcaggggctgagcaagacccgggcatggtatggatgccaaggggagccaagaaccaagaatgggccacagtccccattttctgtcccatccccaccctggtttggcttttctctcttctccaaaacagagctagctgtcaggctgctcacgaaaggggacccccaggacaggcatctgcgttcaaggggaagaaagagagccaccccttctaaccacatctggctccaggccaggttggccttcagggatgaagtcactccagctccccctctcccacacacccaggttaaacaatcccgtcaccccctctcaatggaccttggggctctgcgaaatacaaggggaccagcctgcctcaaaccctcaacacctctcggccgcagaggctgtgtcttgggccagtccctcccgtcccgactccaacatggctgctcctttttaccccagcttatcaagctgcacatttccggcagatcctcccctaaatcagttatttttaaacctcattaagagcaacccgccccctccacttcccccagcccgaaagctgggccagataaatgtcagtctgggccccgacccacagcgccaggcacacacaccatcagcttggggaaggcaggcggggtggggtggctgagttctgaggagaaaccaagagaagcatccctgcccttcccagaggccactccaccatagaaacctctaacctctgatgcacaggggaatggctggaagacaggtaggaagaggaaggggctaagagctactaccaccagtaagccccctttccgcagcccagttccagacctctctcctgggagtggctgtgctcagggctgtttccagggaccaagtggcctgaggctcggggatcaccatggcacaggtaaagaaagggcaggagaatgattaacctagacactggggttaagagcagagagaaaggcctgaagccagacacttccagtgccccccaaccccccaaggcaggacaaacttggcctcccagacccaccactgggtggaaagtggatgctgaggaaccccctccaccgcccaacgctggggcctggacacagctggcagggtcacggcctccagctgcagtgtatctgctccactctggggccattgccctcaagctctgaggtgccagagccatagggcggggtcctgagaaggggcagttccaaccaggccaggcctggtcagcagctgtttctcttccccacccccacgggcaggcagaagctgatgggctgcggctgctggagctgggaaggcccaccctagggacacccaggggacctgcccctgccttccctcaaacataaagaaaacagtaagcaagttgcctaccagggtgagaagagatatgcccagctggaagacaggtgtgggggacccccagagctggggaccccaaaggaaggtgacagctgaacaacctgggggatggactggcagggagcaacctaaaccctagcgctactgcagctgtgagaacaaccctcaccctcaccctggagttacaataggcgggaaacggggaggggccacgcaaggcactcggccccacccagaccctgggctggaagcttacctcaccaaagccaaagccaaagaaaaggcggacatgggtgggggcagggaggacttcagggttcttggctagggtgtttaattgggaagacaaagggactctccatccaccgtgcagatggaacacaggagaacttcccaactcagatttgggacagggagtgttctcaaagagcagcacagtgagggcaccagcccacagagcgaggtgccacagccagcagcaaggatggggggcggcccacaattaagggaaccaccgtagggcagcccctcaccaccgagagtcaggagcagaagagaaagctgaggctacacaaacaggaagctccaaagcttgcgtgggaggaggggatgaggtgggggccgttgccatggcttctgtgtaccaaacagtgttggaggctgggtgggggctccgggcagaaacaccctgtcaacacagacgttgtggtgagcaggctgtgagcacgggagcagaagtgggatcgtctcagcagtgctcgggtgtagccaggtgcaagagattattccaggagacagctatagtggggatggacagcgtgtgggggaagataggaaatgacccgtgttggggtgaagaagaggactcaggaagtagttgttcaggagaagaaatcccctgggaagggaaagtgttctgagctagagaacccacagctgaaaattctggagggagaagggatggaatgaagaaaggattaggggccaatcccggggtgggggacaggggcagaggccttggggtgagggagggagttgcggttggacaaaacctatttgttggttctggaatggtagggccctactgggcccgccctgccttggcctcctctgcagttgtaggtctgccccttgtagtggggaggagaaactgggagggggctagagatagagagccattgctgtctggtgctttgaagtcaatgagaacactgggggagccccgtcccagccgcaggtcttctacatcgaatcccacactccatccccactctcaccccgtttctctctgccccacagataccaactgctcacagatctcccaggacaccggcttcaggtagccccaggaggcacagggcgcggggggaggcggcagtccacctccggtcctgcaggtccggcctcccagccgccgccccccacccccacgaccacaccctgggccgttacaacagatgagtcacccaccgccctcccgccgctggggtgacgcagtggtctgggcagcccgcccgtccgcccgcggccaccaccggctttcccagcagcagggggcacccggtgggggcagcggcgctcgggcagggtaaaagcagccaccaccacccccacaacctcacacagggcaccccggggcgcagtcagggctgcagcacccagacccccgaggtcaggggaccgtcatagagatgactggagcttcacagaaggtcaccgtgcgacccatgcagagccccctagccccagcccgtgacctcaagtccccagaatagcaagctagcaggaacaggaatgaaaagggcggcctcggggactcagagggcacgcagtgctcacacgtgctcctggaaccaggaagtgaagggtcgcgcgggaaagcccaggagcacgagctggcccagggccggcgccacgacccggggtcactcggggccagccagctaaagtccgacgcccttttttcccctcgccccagtgaggactcagcgatggagcccgcgggtggggctcagtccctgagtccctgctccagacggacgccctgtctatgcatgggctaacctcgcctgacctcatcgtccaacaatgtcgggtcagggcttggggacaggacctgacagcacggggcggggtaaagtagtcaccggacccttgcctggtaccagcccttgatccccgagctcgctggagcaagttcaaagcgctggcttcttgctttctacacagcacgcacatgtccccgacccccgtacccccgacctgctcaccgttcaagcgggctggagagcggcgcactgactcaaggcaagggctgcagctgcaagtggtgcgccctgcccagccggggattttcaggagggtcccgcctcagacggggcggacccggggcggggcaagggccaagaaggtttaaaggcgccgcagcgcagaaggagggaggactgcttgagacagagggacagtagaccagagcaagggttaaaggttcggggagtctgaatctacaaaggcggctgcagtggtctccacccgtgag

SEQ ID NO: 2166 - DNA, 4001 bp, Homo sapiens
cagcccaaagcgaaaccagaacccaattccaggggctgtactttcctacagaaatggagttgggaagggggcttggagagagatatctgatctgttcaggtcctttctcgtctccctactgattaagagaaagaagaaagagagaggaagagagagacagaaaaagaaaaggaaataaagaccaacaaagggggaaagaaagaaacaaaggggaaaagtcccccaccttcccctccaccacccctacgaaatgattttcgatttttcggggtttagacagagtaagggagaattctaatgatttgttacagcaataaacaaggtaaaaggaaaggaggtaaaaacaaacccgacactactttcaaggatgtagcaggattgagcttgcttttattttttcctagtggattttgtttaatttgttttgcctaaatcgtcaggcttatgatcacacatcgaagtcttggattaactgcgaaggcctccttctatttgccgcggctttggtggacatataggaataattcttccctggattgcaatacaatgcggaagattttctttctcctcttctaatccaaaagaggggaggggaggaaagaagaggggaatccatccattcccggcgtgttcgcggggggttaatgttgcgtgttcgctgggggttaatgtttgccttatgaccaagtctctgtgtccgtgcctctctccattttctcttcctacctcaaacccagcaacttagaaaacggctgtagcggaaaaaaacccgctgctttgttctcccgccaaaggagccaaaagggacaaactgctgcgctctgggatgattattttaattaaaatagatgttaatgatgacgattgtgatggtgatggcattagcaattacaataattgacaaaacaaaattctttcaacccgagctagggccccactaacccggtccctcccagagcccggattcggcctcggtctcggatgcgacgggtatcagacccaagcggcaacgtcgctcacccgaagagggggcgggaaaatcttcccaggaggtgatcccgaatgtccccacccgaggctcgaggcctggtgaatgtgcccattgtcctttcggggcctctcccttggagcccggcggccgcacccacgaaactgaccagaaatggatgaagccggagtgcagcgggaaccgaagcccgcagctaccggctcgaaggcgccggcctcggcgagcgctgctcagcttcaagcctggaggagcctcccactcaccaacgaacccctcaaacacctaggcacaggcgggcctccgggcagagcagccgccgaccgggcgctgtccgcccacccaagccaacaactggctcccgaatacatcataatttggaataaaatgtgaaatcccgctccccgcccccatgccgccgcccccaccagcgcctcgatctctcgctcgccctccccccactcccgcccccagcgatttgcaaacgcacctctaaaggacacaggcacacaggcatacaactcagtgcggacaggaccacacagggtccagccccacagaagggcagcaaacaaacaccacctagcactgccccagaagccgacttggtcagccccgcacactgcccaacaggacacaacgaaatcagtcaaacgcagcggctcacggacacacaatccagcacagtcgggatcacacacgcccgacataacgacgacaccacccaaacacagtcgcaggggccacacacccccacacacagaatcagatccctgctgagaacaccaacggagcacaatcgtacgcaacgaagaaaacgcagaagggcctcgaagggtccacatctacacaccccaaccgcgcaggcacaccacactcggacacagagcctgtcgccaagaagaccacacttagaagcagccaacgccgcccacagttctcatgaacgcactctcacaatcccaccgcatgcacacaaccacgaagaagaaatgaaaaccaaccacagcctcgcgcatttctgtatattgcgtaaggaaaagggggaaggaaggaagagagtctccgaggcgggaggggcggcggcagccggggcgggggcgtccgtggaaaatgcccccccaccgccccccccggccatcgaaaggaaccgagggaaagggagcgaagacctcttttgcggacgtggggaaaaagaggaggaaattgatgaagaattcggtgggaggccgcgggttgcttttcccctagaaaaaggccagaatgctcacgtttttccgctacgggggtacgcgtgtggccattttgaggcccggtcctgagcggcggcggcccggcccctcccgcggcccccgctcccccgcccgccccgcgcccgcccggcccctccaccgacgcgctgtaatcccactcacgttccaggcctcgttagcatgggccgaggcgcgccggggccgtgtgcgccgcagagataaggcactgccgcgggtccgcccgcccccgataagcgcctcggccattatgggccaaatgattcattttaatttggcaatttcaccggagggagtggggactggttgagcggcgctaggaccggctccggaacgcgctgcggggagcgttggacgcgctgtctaggacccagcagatccagcccccatctctaatcccaaggcctctcaggaaccccagcttcccacaacctcagtcccttaacctttcagacacctttcttcagcgactctcaccccagcactctgtccctacctctgaagaccaccatgataccaaaatcgtcacctcccagggcttctttcttattcttcctccagtgtcccagacacccagatttcaatgggcagtctccctatcccagaaagctccccagcccttccctacctcttcacccccttctaaaatagagccggtaactcaaatccatgggctctacggcggcctggcagaacccctgtcaatagggacataaaatgcctattctgctaggtttcaggctgagcccagagcccaggaacactgctccccacatggtatttaaaaaaaaaaaaaaagtttaatctagcgactgtaacactattctaggcattctgcaaatactaatctactcttcacaaacagtcctgagaagctggatccttaatttacagaagagaaaactgaggcacagaaagtcaaagtaacttttcgaatgatacatagctagtgcttggtggagtctgccttggaaggaaatttgacacggagtcttctctgcggctcagctgatgaagaggggcagccaaaacctagccagggaaagggacctgggctcaactcattgcagagaccagggtctttactgtggggtagaaatctgagttcagtgccagctggatgatgcgctcagcccacggagggtctctgggttcattctttcatggtggagtggaaagaacacatgttcgaattttagtcactgatctctgaacctcagttttctcatttgtaaaatggggagataatgtcgacgtcacaaagttatgagaactaacttatatgacctttaaaaggtggtggtgaggataataatgtatggaacgtcactcagtccacagcccaggaaaacatcatatgcacttgcatgggagttctggttatcatcatagagaaagaaattaagacacagagagatgtgacttagccaaaacttacagtaacccaaaggaaaagccaggacccaaactttggtgtccaattcccagtccacaactctactttccatgccaggctgatttgtccttctagtgtctctgcttttgagctttttttggagcctgagaactgggggaaaacccctactctggtaacaaactgagtcccagtcaaagactgagcagagagcatggccccagtctgggatctggcttctccttggtcatcaggttgaccctctgagaagatacagttaattcagtgccgcctgtcccctctgttcctc

SEQ ID NO: 2167 - DNA, 4001 bp, Homo sapiens
gatcacacatcgaagtcttggattaactgcgaaggcctccttctatttgccgcggctttggtggacatataggaataattcttccctggattgcaatacaatgcggaagattttctttctcctcttctaatccaaaagaggggaggggaggaaagaagaggggaatccatccattcccggcgtgttcgcggggggttaatgttgcgtgttcgctgggggttaatgtttgccttatgaccaagtctctgtgtccgtgcctctctccattttctcttcctacctcaaacccagcaacttagaaaacggctgtagcggaaaaaaacccgctgctttgttctcccgccaaaggagccaaaagggacaaactgctgcgctctgggatgattattttaattaaaatagatgttaatgatgacgattgtgatggtgatggcattagcaattacaataattgacaaaacaaaattctttcaacccgagctagggccccactaacccggtccctcccagagcccggattcggcctcggtctcggatgcgacgggtatcagacccaagcggcaacgtcgctcacccgaagagggggcgggaaaatcttcccaggaggtgatcccgaatgtccccacccgaggctcgaggcctggtgaatgtgcccattgtcctttcggggcctctcccttggagcccggcggccgcacccacgaaactgaccagaaatggatgaagccggagtgcagcgggaaccgaagcccgcagctaccggctcgaaggcgccggcctcggcgagcgctgctcagcttcaagcctggaggagcctcccactcaccaacgaacccctcaaacacctaggcacaggcgggcctccgggcagagcagccgccgaccgggcgctgtccgcccacccaagccaacaactggctcccgaatacatcataatttggaataaaatgtgaaatcccgctccccgcccccatgccgccgcccccaccagcgcctcgatctctcgctcgccctccccccactcccgcccccagcgatttgcaaacgcacctctaaaggacacaggcacacaggcatacaactcagtgcggacaggaccacacagggtccagccccacagaagggcagcaaacaaacaccacctagcactgccccagaagccgacttggtcagccccgcacactgcccaacaggacacaacgaaatcagtcaaacgcagcggctcacggacacacaatccagcacagtcgggatcacacacgcccgacataacgacgacaccacccaaacacagtcgcaggggccacacacccccacacacagaatcagatccctgctgagaacaccaacggagcacaatcgtacgcaacgaagaaaacgcagaagggcctcgaagggtccacatctacacaccccaaccgcgcaggcacaccacactcggacacagagcctgtcgccaagaagaccacacttagaagcagccaacgccgcccacagttctcatgaacgcactctcacaatcccaccgcatgcacacaaccacgaagaagaaatgaaaaccaaccacagcctcgcgcatttctgtatattgcgtaaggaaaagggggaaggaaggaagagagtctccgaggcgggaggggcggcggcagccggggcgggggcgtccgtggaaaatgcccccccaccgccccccccggccatcgaaaggaaccgagggaaagggagcgaagacctcttttgcggacgtggggaaaaagaggaggaaattgatgaagaattcggtgggaggccgcgggttgcttttcccctagaaaaaggccagaatgctcacgtttttccgctacgggggtacgcgtgtggccattttgaggcccggtcctgagcggcggcggcccggcccctcccgcggcccccgctcccccgcccgccccgcgcccgcccggcccctccaccgacgcgctgtaatcccactcacgttccaggcctcgttagcatgggccgaggcgcgccggggccgtgtgcgccgcagagataaggcactgccgcgggtccgcccgcccccgataagcgcctcggccattatgggccaaatgattcattttaatttggcaatttcaccggagggagtggggactggttgagcggcgctaggaccggctccggaacgcgctgcggggagcgttggacgcgctgtctaggacccagcagatccagcccccatctctaatcccaaggcctctcaggaaccccagcttcccacaacctcagtcccttaacctttcagacacctttcttcagcgactctcaccccagcactctgtccctacctctgaagaccaccatgataccaaaatcgtcacctcccagggcttctttcttattcttcctccagtgtcccagacacccagatttcaatgggcagtctccctatcccagaaagctccccagcccttccctacctcttcacccccttctaaaatagagccggtaactcaaatccatgggctctacggcggcctggcagaacccctgtcaatagggacataaaatgcctattctgctaggtttcaggctgagcccagagcccaggaacactgctccccacatggtatttaaaaaaaaaaaaaaagtttaatctagcgactgtaacactattctaggcattctgcaaatactaatctactcttcacaaacagtcctgagaagctggatccttaatttacagaagagaaaactgaggcacagaaagtcaaagtaacttttcgaatgatacatagctagtgcttggtggagtctgccttggaaggaaatttgacacggagtcttctctgcggctcagctgatgaagaggggcagccaaaacctagccagggaaagggacctgggctcaactcattgcagagaccagggtctttactgtggggtagaaatctgagttcagtgccagctggatgatgcgctcagcccacggagggtctctgggttcattctttcatggtggagtggaaagaacacatgttcgaattttagtcactgatctctgaacctcagttttctcatttgtaaaatggggagataatgtcgacgtcacaaagttatgagaactaacttatatgacctttaaaaggtggtggtgaggataataatgtatggaacgtcactcagtccacagcccaggaaaacatcatatgcacttgcatgggagttctggttatcatcatagagaaagaaattaagacacagagagatgtgacttagccaaaacttacagtaacccaaaggaaaagccaggacccaaactttggtgtccaattcccagtccacaactctactttccatgccaggctgatttgtccttctagtgtctctgcttttgagctttttttggagcctgagaactgggggaaaacccctactctggtaacaaactgagtcccagtcaaagactgagcagagagcatggccccagtctgggatctggcttctccttggtcatcaggttgaccctctgagaagatacagttaattcagtgccgcctgtcccctctgttcctcctgtgctctctgaaggaagtcaggctgtcatggggatacagataactctcacagaatcccacatcctaagaaaaagtctagttcccccctaccataaggcctttgcttggctccatcacttattagaaaatgagagtcatataattctgagtctgaaacacaactctgccattcctgggctgtgggacccttagagaagtgatttcatgtctctgagccactgtaaaaacaggctagccattcccatatgggagagcccaggtggggactgcttctctgagaaaatgaggcctggactgagatctaagagtgaaatttgggggtgcgaagaaggggggtggggagaagcatcagtatccagaaccttccaggtgggctgaggaaacagctggaccaagggctagaacagaagggtggtaggttcgtgaaaagaatagaaaagtgtc

SEQ ID NO: 2168 - DNA, 4001 bp, Homo sapiens
tgcctcctcagccaggtctccggctgccgctacaccgcgaagggatagtcccgggcctggatgggcggaggtccgtgttgggaaaggcgaatagtcttcagactctggtcggtgggacagaaccttgaagtcccccccacctcattctctctctgacccccatccacccacctccagcccaaagcgaaaccagaacccaattccaggggctgtactttcctacagaaatggagttgggaagggggcttggagagagatatctgatctgttcaggtcctttctcgtctccctactgattaagagaaagaagaaagagagaggaagagagagacagaaaaagaaaaggaaataaagaccaacaaagggggaaagaaagaaacaaaggggaaaagtcccccaccttcccctccaccacccctacgaaatgattttcgatttttcggggtttagacagagtaagggagaattctaatgatttgttacagcaataaacaaggtaaaaggaaaggaggtaaaaacaaacccgacactactttcaaggatgtagcaggattgagcttgcttttattttttcctagtggattttgtttaatttgttttgcctaaatcgtcaggcttatgatcacacatcgaagtcttggattaactgcgaaggcctccttctatttgccgcggctttggtggacatataggaataattcttccctggattgcaatacaatgcggaagattttctttctcctcttctaatccaaaagaggggaggggaggaaagaagaggggaatccatccattcccggcgtgttcgcggggggttaatgttgcgtgttcgctgggggttaatgtttgccttatgaccaagtctctgtgtccgtgcctctctccattttctcttcctacctcaaacccagcaacttagaaaacggctgtagcggaaaaaaacccgctgctttgttctcccgccaaaggagccaaaagggacaaactgctgcgctctgggatgattattttaattaaaatagatgttaatgatgacgattgtgatggtgatggcattagcaattacaataattgacaaaacaaaattctttcaacccgagctagggccccactaacccggtccctcccagagcccggattcggcctcggtctcggatgcgacgggtatcagacccaagcggcaacgtcgctcacccgaagagggggcgggaaaatcttcccaggaggtgatcccgaatgtccccacccgaggctcgaggcctggtgaatgtgcccattgtcctttcggggcctctcccttggagcccggcggccgcacccacgaaactgaccagaaatggatgaagccggagtgcagcgggaaccgaagcccgcagctaccggctcgaaggcgccggcctcggcgagcgctgctcagcttcaagcctggaggagcctcccactcaccaacgaacccctcaaacacctaggcacaggcgggcctccgggcagagcagccgccgaccgggcgctgtccgcccacccaagccaacaactggctcccgaatacatcataatttggaataaaatgtgaaatcccgctccccgcccccatgccgccgcccccaccagcgcctcgatctctcgctcgccctccccccactcccgcccccagcgatttgcaaacgcacctctaaaggacacaggcacacaggcatacaactcagtgcggacaggaccacacagggtccagccccacagaagggcagcaaacaaacaccacctagcactgccccagaagccgacttggtcagccccgcacactgcccaacaggacacaacgaaatcagtcaaacgcagcggctcacggacacacaatccagcacagtcgggatcacacacgcccgacataacgacgacaccacccaaacacagtcgcaggggccacacacccccacacacagaatcagatccctgctgagaacaccaacggagcacaatcgtacgcaacgaagaaaacgcagaagggcctcgaagggtccacatctacacaccccaaccgcgcaggcacaccacactcggacacagagcctgtcgccaagaagaccacacttagaagcagccaacgccgcccacagttctcatgaacgcactctcacaatcccaccgcatgcacacaaccacgaagaagaaatgaaaaccaaccacagcctcgcgcatttctgtatattgcgtaaggaaaagggggaaggaaggaagagagtctccgaggcgggaggggcggcggcagccggggcgggggcgtccgtggaaaatgcccccccaccgccccccccggccatcgaaaggaaccgagggaaagggagcgaagacctcttttgcggacgtggggaaaaagaggaggaaattgatgaagaattcggtgggaggccgcgggttgcttttcccctagaaaaaggccagaatgctcacgtttttccgctacgggggtacgcgtgtggccattttgaggcccggtcctgagcggcggcggcccggcccctcccgcggcccccgctcccccgcccgccccgcgcccgcccggcccctccaccgacgcgctgtaatcccactcacgttccaggcctcgttagcatgggccgaggcgcgccggggccgtgtgcgccgcagagataaggcactgccgcgggtccgcccgcccccgataagcgcctcggccattatgggccaaatgattcattttaatttggcaatttcaccggagggagtggggactggttgagcggcgctaggaccggctccggaacgcgctgcggggagcgttggacgcgctgtctaggacccagcagatccagcccccatctctaatcccaaggcctctcaggaaccccagcttcccacaacctcagtcccttaacctttcagacacctttcttcagcgactctcaccccagcactctgtccctacctctgaagaccaccatgataccaaaatcgtcacctcccagggcttctttcttattcttcctccagtgtcccagacacccagatttcaatgggcagtctccctatcccagaaagctccccagcccttccctacctcttcacccccttctaaaatagagccggtaactcaaatccatgggctctacggcggcctggcagaacccctgtcaatagggacataaaatgcctattctgctaggtttcaggctgagcccagagcccaggaacactgctccccacatggtatttaaaaaaaaaaaaaaagtttaatctagcgactgtaacactattctaggcattctgcaaatactaatctactcttcacaaacagtcctgagaagctggatccttaatttacagaagagaaaactgaggcacagaaagtcaaagtaacttttcgaatgatacatagctagtgcttggtggagtctgccttggaaggaaatttgacacggagtcttctctgcggctcagctgatgaagaggggcagccaaaacctagccagggaaagggacctgggctcaactcattgcagagaccagggtctttactgtggggtagaaatctgagttcagtgccagctggatgatgcgctcagcccacggagggtctctgggttcattctttcatggtggagtggaaagaacacatgttcgaattttagtcactgatctctgaacctcagttttctcatttgtaaaatggggagataatgtcgacgtcacaaagttatgagaactaacttatatgacctttaaaaggtggtggtgaggataataatgtatggaacgtcactcagtccacagcccaggaaaacatcatatgcacttgcatgggagttctggttatcatcatagagaaagaaattaagacacagagagatgtgacttagccaaaacttacagtaacccaaaggaaaagccaggacccaaactttggtgtccaattcccagtccacaactctactttccatgccaggctgatttgtccttctagtgtctctgcttttgagctt

SEQ ID NO: 2169 - DNA, 4001 bp, Homo sapiens
gaacccgggaagtgcaggttgcggtgagcggagattgtgccattgcattccagcctgggcaacaagaccgaaactccataaaacaaacaaacaaacaaacaaaactgcaaaataacagactcatgtaaataaatgaatgttttaatttttgatgatttaaaaaatgttttccagtgaaaactctcagggatgatcacacctatctgtggactgttcaaatatttactctctaatgttttaaaattacttgaaaatataacctcataacttcagccaaacaaaaatcctttacctgtaataaatggtcagctaccgttgaaaaagtagaaatattctattgagacaattttgagtcaatctactttgtacttgacagtttaaacccaaatttaacatgagtgaagtcaaaccaatcaacagtaacgtaacaacttgaagggaggccttgctgtttcattactcttgcacatagtagggagcaaagctcaaacagttaaaaaataaaatctgattcattctattaaatcaatggcaaaaatacactcaaaaggtcgacttaagaaacatgtttaacaaatattagtaaatcctgttcctaattaccaggggaaatttcagaagagtgtgatggcctctatgacgcttaattctaacactcaacactcaattcactaattcactggtcagtacagataaataacaaataatttttctttcaacttgatagatatcaaccgtttctattgggttgaatctaccatgatatagtgcagatttgggtctgtaaaatcttgcacgggctccattatcttcctaaactattccaggggtgctgtattccaccggctctgggttagaacgttcccaaccgcagtgatttgtgacttcaaagaacaccctcgagaaggggttccaaaggttttcaggctttaggggagcaacgcggaataaccaaattctgcatggatcggagtgacgaccccgataagctagtttttagaagcaggaagactcccctctggggcagccaagtaggtagcactaggctggggggcaaagaggcaggtaccgtttccttcctggggcccgcaggtgcagtcggcccccagctccgccgacacctccaccgccctctgcagcaggtagcgcgctcgcttgcgcgtcagggcgtccgcctggcccagccccgcctgcaccgtcctccagaagcgccagcagcgccgggcgtccgggcccgcctcgcgcgcgccgcgggcgcggtcgccgccgggctcgggcaacagcttctcggccagggcgctcaggaccagcagcttctcctctacgcggccggaccccagggacgccccaggcgcggccagcccgccccacacggcccgcagcgccgccccgccacattggaccagcactggcagcagtcgcccggccaccagcgccgccgcgtcctcggcaggcccggcctcatccccgtccccgcccccgcccagcgccagggcgacggcggtccccgccacgcgctccagtagcggcccgtcctcgcggggccgcaaacatggcccgacggctgctagcacttccacggcagcctcggcgccaggcgcgcgccacccggcgagcagatcgcgcagcgcctcctcagccagcgcggccgccagctgcggacgcccggccaggcggacgcacgagcgcagggccgcgcccgccgccctcagcacgcgccggcggtggcgaggctgcagactggggtccgggccgcccgcggggcgtccgcgcaggctccgcagcagtggcacgaggtaccctgcagccacctcgcgcgccgcctccgggagcgcgcctgcgcccccgctgccgcgcgcctcctcgtcctcgagccgctgcagaaggaagcgcagcgtctccacgcgctccgcggatgcctccccttggcacagcgccccaagcagggcccgggggtcccggctctgcgagagcagcgcttccgcgagcacccactccatttgccgagcgcccgcgccaccggcccgggctcccaaaggaaggcgccggcgtgtgcgatgcgtgcgcacaggaccggccggcccctacgtgcgcgtgcgccgacggagccgggcgcgcggccgcagagagggggatcccagcccggcttggtgcagctcagcttcccttgggttcctgccaccaaccctgcctagatagaacccacctggtctcttatttttaggagaaacgaggccttcgttaaaagttaatgtagtatctacaccagcttcatcgattcctgattggaggttggtctgcccaggaccctaaatcaggcgtgcctgtgagcataaaccagttcacagaaggtgcacagcagaatcactttagattattttccaaacgttgcatgatgggcaccatccacaaagagactgacacagtaggtctgaaattggttctggacatctgcattaaaaataagtcatgaaaacacaagaatgatttagacgtaaggccaggagtgagaagtgttaccggtggagggtgtccaggtccaagaattggacaaagcgcacaaacaaagcaaagacagaatgaagccacaaaagcagagatttattgcaaaagtacactccacagggtgggggcagacccaagcaagccgctcaaggggggctggttacagaattttctggggtttaaatacctatagaggtttcaattggttacttggtgtacacactatgtaactgaagaggataaaatgaagttacaaagttatttacttggtgtactccctatgtaaatgaagaggatatttcctgtcatagctgaagtgtttctatctgatttggttctagggagtttttggattccctgcctccaggccctattctcctgccttagaggtacctatagcaatgtgctaggattcagctaaaaccaagatgcccacgccagccctcacagccaagtgcccaagatgactccaggatgcagagcctcctgcacaatgcatgtgctcccatgtgcaaactcaaaaatagtccctgtgtctgtcttttctgtatttctgacagcatccattgctaaatagagaaacagaaaacctcacctcggcatgcatggtgtggatttggttcctggctcaatttgagacaaactagatcagtgacatagggttttcttcgctactaaacacaaagatctgcctcttagtcaatagagaaaacagggtcccaacttcaaagagcttgacatataataacataatggataagacaaaaattagttatttaaatttacagttatttttatataaagttatctgactttaaggttatctgacattacacaggcaagacttttttcatatttcagtcattccgtttttcattgacaaaatgcataaatgtttctattttaagcccttttaacatgtcagtaaatatcaattaccttcaacataaaatgtgcagaaaactattgtttctgtcaacatatatctaacaaatataaatgggtaaatgtcttgagcacttaacaaacgaagatacacaaatgataagcacttggaaaagtgttcaacatcattagtcatcagagaaatgcaaattaaacccacaatgaggtaccacttcatactgatgagaatggctaacatgtaaaagctcgaaaacactaaacggcaaagaccaagggtgtggagcaactggaattctcatacattactggtgggcatgaaaacggtacagtcactttagaaactgtttctcgtaaagttataatatagctgctttatgattcagcgatttcacccccaggtaattacctaaaataaatgaaaacatgtttcaaaaaaaaaagcttgcagaagaatgtttttgacaacattattcgttatagccaaaagcttataacaacctagtaggtgttaggtaacaacctacatgtgcatcaaattgaagaatgaataaaaaattgtgatctatctatataataatgctcccagcaat

SEQ ID NO: 2170 - DNA, 4001 bp, Homo sapiens
gcatactgaccaaatttgatggactttgttgcaataccaagttataataaaaggaacacacagacagatcgactactaacagcacactacttcaaaatgctgaaattaggtatttccttggcacacttcttaaacttcatgcttccttttcttagatttagaacatcattgataagaggcagagagaaggataagaccagaacctcgaaattgtaattggaactgcactaattcaagatttggctactccaactgtttgctcatttaagggaaaaaatgaactcagatttgctgaatgaatgatgtaacaccaaaaggacaatgatcaaatccaaacactgaagcacttcagaagaatctatttacaacaatgatttatgtacaaaacattcttagtgattcctgaaatttatcatcaacttggcaaagtttattcagatattttttaaatacattgttttctcttttaaaatgatctacaatccccagtttccataaatttagactcgtggtcttccaaacttgtctaacactgaagttcaaggaaatacttaagtttcaggagacattctgccaccaaaagaggctaagatccatggatgagacacacacctgaacacacttcagcatgattacaaaaaccaaatggtaacaaaccttttggatagttgacaacatacaccagatttccccagccagcatctggggcatgcagaattccttctaccagccggacacctctcatacactgagacactggattcctgtagcgaagcccacacgcccctggaaactgggctgtaaccgtggagagcagcaccgtcccatcgtcttccgatggtatttcaatgggctcatcgttctcatcttcggttacccgaatatattcagacatcttttacttttcctaaagagaaaagagatatgaatgaacaacattcatgtcagaataactgtttccttataatgataatacccaaaccatgtcagagttctgacttccagaaaaatgcttgtctggattcgtatatgcattggttatccctgaaaaatgacgaggtgaaggtaagggtagtgatttcctatcaaaatgtgatgcctcgccagttcattcattcaaaaaactttccctgaaggcttatgatgcgtcaggtactgaaactgtaactgtgagtccaacgtggcttgctggttacaagctagggtatgcaagggaacaataaacagtagctattttatgacaatcgggttagtcgttaagtaatcctgaaggcagaggaggagcctaactggctgaggcatgggcgtgataggtcccagtcgattttcctaagcaagcgatccatcagctgaacctgaagactgaatatgggcagtgaaccaggtgtaaagaacaggagaaaagtttccctctgttcctcattttggggcttccgggggctctgcgagcccgagccccaaggcccgcggcgacaggtcctggcggtgccggccgtcgcctcccagaagcccgcgcgtgccagccgagggaggagtttctcggcgcggcccggggtggggcgcaggagcaccaggcccaagctggcagcgtccctcgaagtacaaagtaccgaaggctccggcactgtccgggtccggggccaacctccgcctcaggctacgcggcaccgcgggcccggccccccgtttcggcgccaccggcctccccgtgccaggacctaacgacgctcccgcgcgagcccgctcgggcaggactaggcccggtctcacggctgacttcccggggcagggtccgaagccgctgcgtctgcctcgggccgccccaatgcagaagccgaggcacctacggcgtcctcagtgagaaggctccgcgactcacccgctaggccgctgctgggaagcccgacagggacaccgaagcagcgacggacccaagcgcagcccagccaccgcttcgctcccacaaaatggcgctagggccgcctcctccccccgcccaccggcgtcctctcccaccggttgcctgtccagaggtggaaggcaccgacgagagccacgatgaccctctccccagggactcgggctgcctcctggaaattcaagcctacagagaagctctgaaagctaaaataaaaccaggacctaggcctgaaaagctgaagattgaaaaaagtgtggctgtataggagctgacctccccccacgtaacgtagcagatggtttcggccgaccaaccgccggcccaggtctcggtcggagctcgcgcactttcaaagcgcgcgagagtagcacagagtctcggccagcgagggcggggcggggcggggcctggagggggcggggctcgggatcccgggccgagtccacctgggaggcaggataaggcctggaccccttttctgaaaggcaacctagtgcgtcttctcctccctccgccagcccacctccaaacctggaaacaataactttgttctaaataatagcaatgataaggctactttgtgccaggtactttctgagtattcacatatttaatagcccaaacagttttgtgtagcaggagctattgatattcattctgcgggtgaggaaactgaggcacagagagatcaagtgtcttgcttaaagtgacgcaaggattagccgggcggtagtggcgcgcgcctgtagtcccatctactcgggagcctgaagcaggagaattgcttgaacgcggtaggcggaggttgcggtgagccgagatcgcgccacttcactccagtctaggcgacagagtgagaccctgtcctccagcccctccccccaaaaaaatgtcacccaaggaataaatggtagacctgggatttgaatctcgaggcacaaaatgctaacttgttctggctccagccctttaataataataataatacagtacttcatctattttaaggcacactttttgtttcactttttttttttttttttttgagacggagtctcgctcttgtcccccaggctggagtgcagtggcgcaatctgcagctcactgccacttccaactcctaggttcaagggatagctgggattataggcgtgcaaagacaccatgcccggctaatttttgtatttttagtagagacagggtttggccatgttggccaggctgatctcgaactcatggcctcaagtgatccgcctgcctcagctccccaaagtgctgggattacaggcacgagccacctttcttttctatcttttctttcctttctttcctttccttcccttcctttcctcccttccctccctttcccccccttccctcccttcccaccttccttcctccctacctctctctctttctctctctctctctttcttttctcttcctttttttcagactccctctgttgcctaaggtggagtgcagtggcacaatctcagctcactgcaacctccgcctccccggttcaagcaattctcctgcctcagcctcctgagtagttgggtctacaggcatgcaccaccatgcccggctaatttttgtatttttaacccctgttggccaggctggtctcaaactcctgacctcaggtgatccgcccacctcggcctcccaaagtgccaccacgcccggcctttgtttcacatttcttttttttttcttttttcttttttttgagatggagtctcgctcttttgcccaggctggactgcagtggcgctatctcggctcactgcacgctccgcctcccgggttcactctattctcctgcctcagcctactgagtagctgggaccacaggcgcccgccaccacgcccggctaatttttttgtgtttttaatagagacggggtttcaccgtgttagccaggatggtctcaatctcctgacctcgtgatccgcccgcctcggcctcccaaagtgctgggattacaggcgtgagccaccgcgaccggccaatgtttcacattgctgaagtcagtatgtgatttcagttccagttccagttgatgatgatgtg

SEQ ID NO: 2171 - DNA, 4001 bp, Homo sapiens
agttgagggggctgaatttacatatttatcctttcgttttttcaacatatcatctctctccctctcactagcacaaatgtttgcttaatagatcgaagctaagttaaaaactttcaccataagtttcctaaccagaaatagtcaagacagtctgtggtaggtctccctcccaactgcaaatggagaaactgcggcaaaagaataaaatgttagaatttcctgcttcaatatctcttggtttagtagtcactgtattcctgataagaaagaaacttactgctttcccctctggggaatcgaatgtcagaaatctgaggtcagaatctgtctccaagggccgctccagatcataaggttctccattcacttgagcagccactgcagtatctgccagtgttgaacttcagcagtggaaggtggggatgaagaaaaagacagggttacaaggcacaaaaaggaaaatatcacatgttctgattcctatatgagagtttaaaaagttgatctcacagtggtagagaatagagtgatagttaccagaggctggaaaggatgggggaggggagatgaagaggttggctaatgggtacaaaaatagagttagacagaaggaatatgctctaatgttccatagcagagttgggtgaatacagttaataataatttattgtatatttcaaaatagctagaagatttgaaatagtcccaacacaaagaaatgataaatgtttggggtaacagatatcctgaacaccctgatttgatcattacatattgtatgcatatatcaaaatatcacatatacccattcatatgttcaattattatgtatcaattattaaaaagtaaattaatgatttaaaacagacagggttacaatccacagtggggagaaagttgctcatctctcagcaactgtaaacttgcaaaggtgaaatgagttaccagagcaacagaagctttcatttctttccccaatgaaaggacagagactctgatgcagaaactaatacagataaaacaaatctcaggccgggtttggtggctcatgcctgtaatcccagcacttcgggaggctgagatggaaggatcgcttgagcccaggagttcaagactagcctgggcaacatggagagaccccgtctgtataaaagaacaacaacaaaaaacaaaaacaaaatcttcaggaaaggctatcttaatggggacggaacagaaacaagcagaccaagttttcttcccctgctcaagtgaagagaaagtaaaggggcagaaggataatcctggtagttacaggatgggcctgttacctgatctgccgggctagttggtagggggttgtgttccatgccacagcatcaattttctggcctccaggaagtgatatcttaatagtccggggttccttctgtgccatgcttgctaatctctttacctgagcagcccacagctcctcaaaaaggccaagccgctctgccaaccagcgtggaggggtcgacacaactgcctggagggaaagatatattagcaggtaacacacgtcccatcattctttcttagaattgcagatgatggcactttgggatggttaagtggacttcgtccgaattcctactttttaaggggattgggtgatacaagaccctaggctgggggtccttcgagctcagagtcccccagaccgctaactcgagaattagataacgagtttagatacgagtccttttctggggactcggaggaccagggagaggaggagtggcgtgaggctgggttaacataaaaatttgggggcttcggctgggctaagtctgatgcggatcggagctttgggggtgcctcacgcaccgtgtgtagcctgcaagcctgtaaaccttggagccggagacaccgccacctctgatacagggccatgttccttcacaccagtgcctacatcctcaaacagattatcgccgcttctcctccacgtaattcttcattggcttctggtccaacaaagtccgtgtctattggttactacagctgccactctagtctggcaccacctccaggaactccgaagaggtacaccctacacagcaccagcagcggtgtgagtggttccggctgaccggaagaccgaaaatgtaacacaccctcgctattcccccagacccgtggcgtttcagctgaaacccaaaaatagcaattaggcgtcctgtggctttgaggacaagggcaggtgaacttttgagggcgagagtgggagaaaaccagacaggaaatggtagtaatttccctttaactatacattttattttacgtggtccttacagcaagtagcaaaacttaagagcatagactggggaaccagacagacctagtgtaaattctggatctgccattaactatgtaattttgggaaaattattaaacttctcatatttatttaatagagaccggggggggcgggaggggggggcgggtctcactatgttggccagggtagtctcgaactcctggcctcaagcaatccctcccctcccccccaccaaaccgccaccgcgctccggcctcccagagttctggaattacaggcatgagccgccttgcctgacctatttaatttctctaagcctcaattttctcaactataaaatgagaatagtgttgctcccaattgttgagttaaattttatgtaaatcgtctagtgtggcccatggttttttggtaatgggcaaaagcaacaagaagctattatgataaatgactgtaacagttttattttttaattttgagacaaggtctcaccgttgcccaggctggagtgcaggggtacaatcatggctcactgcagtctcgacctcctgggctcaactgaccacctcagcctctggagtaaccactttaaagctggagcaaagatggccgcgcgcagtggctcacgctgtaatcccagcactttgggaggccgaggcaggtggatcacctgaggtcaggagttctagaccagcctggccaacatggtgaaaccccgtctctactaaaaatacaaaaattagctgggcgtggtggtgggcgcctgtaatcccagctacttgggaggccgaggcgggtggatcacctgaggtcaggagttctagaccagcctggccaacatggtgaaaccccgtctctactaaaaatacaaaaattagctgggcatggtggtgggcgcctgtaatcccagctacttgggaggctgagacaggagaatcgcttgaacccgggaggtggaggttgcagtgagccgagatcacgccatgcactccagcctgggggacaagagcgagacttcatctcaaaacaaaacaaaaacaaaaaagctggaatcaagaatctgcagaggtcagtttgagtccctttatactcatggtgcttaatagggactttatagaccttttaatcttttttttttttttttgagatggagtttcactcttgttgcccaggctggagtgcagtggcgtgatctcggcttaccgcaacctccgcctccccaggttcaagcgcttctcctgcctcagcctcccgagtagctgggattacaggcatgtgccaccccaggcccagctaattttgtatttttagtagagacagggtttctccatgttggtcaggctggtcccgaactcccagcatcaggtgatccgcctgcctcagcctcccaaagtgctgggattacaggcgtgagccaccatgcccggccgagaccttttaatctgacagatgaggaatttaaggtcaaacagcaagtgctgatggtgatttctgaatccaagcttggttttcttttaccacaccatgctttctctagaagagtttgctcccagtatactcccccatcacctcagaaagaggtgcctgactagaattttagctctctgctccctacataagccctttgcctctaattcctatcccagctctcaacttcctttatcctttctcttccctctccctgatacatctaggacac

SEQ ID NO: 2172 - DNA, 4001 bp, Homo sapiens
cggttttcatgtcttccctcctcctgctctacccaatctctcttcccagcccattctctttatctctttatccaggtttctagctgtagcccttcgagtaggtcgtcatacactagatttccagaaacttcttcctgagccaaccatctcgtgtgcttcatgggtaggacatcctgcagccaagcctcggcagcattcttgggcctctgggtctgtgacttccacagtctgcaagcaactgtcttcgtctttttttttttttttttttttgagatggagcctcgctctgtcgcccgggttggaatgcaatggtgtgatcttggctcactgcaacctccacctccgggttcatgcgattctcctgcctcaggctcctgagtagctgggattacaggtgcacaccaccacacccggctaatgtgttgtattttatgtagagacagggtttcactatgttggccagactgatcttgaactcctgacctcgtgatccgcctgtctcagcctcccaaagtgctgggattacaggcgtgagccactgtgctcggctgcaactgtcttctttaaaagaaaagcaggccgggcgcggtggctcaagcctataatcctagcactttgggaggccgaggtgggcggatcacctgaggtcgggagttcgagaccagcctgaccaacatggtgaaacccctgtctctacgaaaaatacaaaaattagctgggtatggtgacacatgcctataattccagctactcccgaggctaaggcatgagaatcacttgagcccaggaggaggaggttgcagtgagtcaagattatgccactgcactccagcctggatgacagactgagtctccatctcaaaaaaatatagatagatagatagatagatagaaataaaagaaaagcagtagtttccctctacctagattgttgacttcatgatggcaccaacctaatttatatttgtcaagctcctaaagcatctaatgggatgtgtcttcccttcccaccccatgaagaaccatggagaatcctacttgtcatctgggactctagggaactttgaacatgggtaggagtggagagaagatagaagagggaaaaagcggctgggcgcggtggctcacgcctgtaatcccagcactttgggaggccgaggtgggcagatcacgaggtcaggagatcgagaccattctggctaacacggtgaaaccccgtctctactaaaaatacaaaacattagctgggcgcagtggcgggtgcctgtagtcccagctactcgggaggctgaggcaggagaatggcgtgaacccggaaggcggagcttgcagtgagctgagatcgcgccactgcagtcccacctgggtgaaagagcgagactccgtctcaaaaaaaaaaaaaaaaaaaaaaagaagagggaaaaagctgcccttgcttaggcctggccacctaggtatggtacaaagccaagaaccaatttcaatgaagttacaatacaacacattctaacagcaagggtgaaataattggaaactggccgaagtgtctaggaaggtctagccagcacttaggtggcaagtggattgatgaacaaggcctggggacagttcaaggggcaaaggcagaggcaaggtcctgtttggaggatggcagccagaggggccctatagccaggggtcccactaagtgtggctctgctggcccctcactcacctgtcacacagggtcacctcgggtctgtgcctcacctgcagacagccagaatggagagggaacaggcctgccaggaggtaatctccggggagggtgaagtcaggagaagactccgtgctatggcaggcaaaggcccagcagcaggaaatgagaagctgcaggccgaccaggcgagccgtgcagagcagcatgctggccagatgcccgcgcctggcatggccaaggagtggcctctaaggaggccagttgcttaaatagaaggcagctgccggatgcttcctaacttcaggcccccaaaaggggtgggactggagcccagtggctgaagcaggactgtttgccttgacattccgggcctgcggtcccactcaggaactgggcaggacgaaggcacagatgcaaaccaggtggcacccagtgacccttcctctggacggttgtgggttctgtccacgctctgtgacttcacctggcttagaaaaggagctctggcattttggggcgaggtgggaggctggaacacaatttctccgggtgttgcgaggtttcagaactttttacctgggcctcagtttactaaatgagacacagctttgagtcgacacccccctgccccagtctccagttttctgacattaagattctgagcaaattgtcatatactttcgccttgttacccagggttgctcacttcgaaacaaatgcatgcaaaccgaaggtatgcaaatagacatgttttgtttaaactgccaatcctaaagctttttctgcaggagaaaaaaaatatcccggtgtttttccggagaggtggcccatggctggtcgcgaggtttctggctttctctctccggccggctggggtagggaatttgcgtaacgtaaatggagtcctccgtggagcccctcgaccagatcggctggaacctcctagtgtgcttccggaggttgccggcagagggcgccggcggctcggaggcccctcttttcggcagctgggagggcagcggggcggaccgacgggatctcgcgagattctcgcgcggtaggccctgaggacccagcatggcggactcgggactgctgctaaagcggggttcctgccgttccacttggctgcgggtccgcaaggcccggccccagctcatcctcagccgccggccccgccgccggctcgggagcctgcgctggtgcggtcggcggcgcctacggtggcggttactgcaagcccaggcgtccggcgtggactggagggagggagcccgccaggtgtcgcgcgcggcggcggcccggagacccaacaccgcgacccccagcccgatccctagcccgaccccggcctccgaacccgagtccgaacccgaactcgaatccgcctcgagttgccaccggcctctcctcatcccaccggtgcggcccgtgggccccggccgcgcgttgctgctgctgccggtcgagcaggtaggtggggggcgccggtagtagtccccgagggcagggagggctggagaggcagccccgggagagctgcagggtaggagaggaccgtggtcccccgggcctgttctctggctgccagtcggattcaagtccatcctcttgatggttggtggcaactaggctcccctgagcagcagggtaacaggtaccctgctaaggggtccctaggccttacgagctaaagggactttattttgttttgttttctttctttctttttctttttgagacagagtctcactctgtcccccaggctggagtgcagtggcacaatctcggctcactgcaacctccgcatcccgggttgaagcgattcccctgcctcagcctccggagtagttgggactacaggcgcgtgccacctcgcccggctatattttttgtatttttagtagaaacggggtttcgccatgttagccaggatagtctcgatctcctgaccttgtgatccacccgcctcggcctctcaaagtgctgggattacaggtgtgaaccaccgcacctggaactctgaaagggattttaatagttaaaaaaaaaaaaggttgcaattactgagagctcagaaattccaggatttaagggttccaaaagtgttttaggctttgaacccatttaaacatccagctctcttacggagtagttgtccctctctctaagtgtttacagacgaggagactgaggttgggtaacttacacagtagagggagagctaggagtcgaactcaggcagcctgattcttaacgtggatgccattcctggagattccctgtctaatgcaggagggaa

SEQ ID NO: 2173 - DNA, 4001 bp, Homo sapiens
gcagatccagaatgaggaaggaagagataagagaaccagcccactcctccttcctgccacaggaaagccaaggcattgactgagaagagccactccagaagactcgggcattttcaccatgtcattgtcaccataccacatctctagggtcaccattgcccatatggccaccactgatactgttatccatgtggccatcatcactactatccctataacctccatcaccactctaccaatgtccaccaatgtgaccatcattatccactaagacttccatcaccaccatcaccactatcaccatcatcacccactacccatattaccaatatcaccaccagggccatcactgtcaccacaaccttgtgaccatcatcaccaccatcatcaccgtcaccaccatcactatcagcacgaccattatcacagccatcatcaccaccatcaccaccaccatttccaccatcaccaccaccaacatcatcatcactaccatcaccaacgccatcagtaacaccctcaccaccatcaccatcatcagcaccatcattatcagcatcaccatcatcaccacccccatcaccatcatcactaccatcaccaacgtcatcactaacaccatcagcaccatcatcagcatcactacgatcaccaccatcaccaacaccatcactaacaccatcaccagcatcactaccatcgccatcatcaccaacaccatcaccaccatcagcaccatcttcagcatcactatcatcaccaccaacaccatcatcactaccatcaccatcatcaccaacactatcgttaaaaccatcaccatcatcaacgcaaccatcaccattatcactaccagcaccatcactgccaacactattaccaccactgccatcatcatcactaccatcaccatcatcaccaccattaccactatcatcatcatcatcaccatcatactttttatcattgtcatcatcaccagtattactgttatcaacattatcagcatcaccaccattactttcatcacaactatcaccatcattatacaccccaccatgatcacaagcattagaaaacccagcatcatgcctggtgccatcaccttcaccattctcaagccagcatataatcttccccagtgtcataaatgatgcatttctcatactcaacccttaatcatcttttgcactgttcttcctttctccttgtctcccgcaataccttcaccctctctgcaagaggtcactcttttttagtcccaggctggctccatgtccttcgtgcttgcatgcagatgcacacagcccccacaatctccaagtgatgctgccaccccaaggggctcagggaggaggtgggggaagaggaacttccctctcggcccaaaagcacccctacccaccacagaacctgctacagaaaaatcacattctgcctcccaaaggttttcagaatgggctttgacatggacccattgggagtcccccagttgccaaagtgggtgggagcagtcttgatggcctctaagagccctctaggctcaaacattctgtaactctatttaaaaaaaatggcactgagatgaccccagtctcagtgtttcagagcacagtcgccaaagattttggtaacccatattatacggggcctccctgaggactaggggcatggatccagaataagggggttggcaatgaatggggaggagtgctttaagcccttggtcctggtctggctcccaaggacccacaggaccaggcctggcctcccaccccatccccactgccacttccagccccacactggagactcactccttgcacatgggcacctgcaggaagttaaggtgaacaatgcccttcatgttggcatggagggagaagaggccacccaggaggtaatccccaggcaggtagaagtccgagttctcagccggctcagccaggacccataggaggaagaacagggaggagatggtctttgccctgggccccatggctgggaagtgatggtctcaggaggtagtcctgcctcactggagaattggcagcttgacaccagggtatttgcacagacatttacatagcgatggtcctgccaccgactgtggggcacctggagcaggtggagaggtttgggggcccagagggaggaaaggagggtggaattatgatgattctttcttagagcatagaggggctaggtggtctaggggaaccctatttggaaagagagagcatcctgataacttggccatgccctggccttctgccacttgtccaaggacaagtctcatcttcctgacatttcaaatatttcaggagtaaaggacataagtgctgtcaggaaacagagtactgtggccaaaagagcccaagctctggagtccagccaagttaggccaggcatgtagtgatgtataggtgtggagaaagtggtagccattgtcaataagaaccaggcatcatgctggtgtcgcggttcatcatctcatataatggttgcagtaaccgggactattactaaccccatttcaaagatgaagaaatggaggcactgagaaattaagaaatccagcccaggcttcctgactagcagagctgagattcaaaccacatggtctgactccggggctgggtccttcatcgctacatcacattacatcacaaaattagtgcttttgataaaaaaaaaaaaaaaaaaaaaacccagcggtgtcaaagagggtgggggaaggagggaagggaggggtggtctcactccctctgaaggctgccatcagtcagcctagcaacacccactctgggtccccgaccccttggaccccacaccaaagggcagggttgttggcaaaacagaaagttgaaaattcctaaattcaaaggtgaatacgcccaaggagtcagaagcggggaggtggctccagtgaattagggacccatttgaatcagagacccctgtccatttagtgctgttttgctcctttccaggcctaccaacatgtggccgagccctagggaacctgccacacaccacatggctggaatgggtctgtcacaggcacatacccggctgctgcgctccatggttctgatgggcagaggcttcaaggtagaaaaaggtgatcaaaaaccccatgatcggctgggcacggtggcttacgcctgtaatcccagcactttgggaggccgagacaggaagatcatctgagctcaagagtttgagaccaccttgggcaacgtggtgaaacccggtctctactaaaaatacaaaaaattagctgggtatggtggcacacactgtaatcccagctactcgagaggctgaggcacaagaatcgagaatcgcttgagcctaggaggcagaggttgcagtgagctgaggtcatgccactgcactccagcttgggctacagagtgagactccatctcaaaaaataaaaaataaaaacaaataaaaacatgctctctcctgccccaccccagccaagccctgctcctccttcagggcccagtctgagcttctcctcctcctaggaaccactcctgcccccagttcaagggaacctccccggctctgagcagcaacaagcctcctgtctgcgtcatcgctgggcactggctaccagccttacaccgttaaccggatcctgctgcgtgtgtccactctacttgaggacccttgaaaccacgtgacgtggacccacctggatttgacatcagctgtttgctggatgagcatgggcaggttccttaatctctctgaggctctgtttcttccccgttgaaacaaggataacaatttcagcctcatggacttggtgtgggaattaagttaaataaaactggggggtgtggagcaggcttggagaaaggtgagtttgccaaagtgcgaggttgtttctttttacaacgaaatcaactgccgcagggggcaccgtgggctccatgaccagctgaaattgcccctttgtgtcccaaagcctctcgaagttaccc

SEQ ID NO: 2174 - DNA, 4001 bp, Homo sapiens
ccacacagtcgtagcagcaggagtggaaccccttgacccggcgcacctggccctcctggcactgccgcgagcaccgggacacgggcttctgcgcacaggcctggggtctggctctgctcggctgggcatgcccacgggagactggaacggcccccacccccaggctgcgccctgccgcgggggctaccacgggcacgcctggcacacccaccctcacctcacctggttgtcagacgtgtgccagcggatcttcaggcgctctgtcctgaggctgccgttgaacctgcccacgtcgtggagcctgggcactgagccctgccacacccacagcttcaggtcgtactccatgtccacgtttccgctgctgtcgaaccgcagcggcagcccgcccacgtggaaggtcaggttgtacatgttctccaggagctgcgggcgggggacggggctgagccgccagccacctccagctcaggcgtggtggccgtgcctggtggcctgggcacatgcagaggacagcacacccccatctcccgggctcacctgccagggcttcacggggtcctgcgcggggcagcctgaggcgttgcactgaagagtgttgtgcagggcctgggccacgctatacacagctgcgtagacagagaacgtctggtggtgatttagccctgcgctcacgttctgcagcgtgatgcagtcacactgcgggcagcgctggcccaccacgtcctcctccagaccctgctccctctcgcccagggcagagcagaaggccgggtcggtggccagggccaggtgcgtcttcacgtactgggggaactcgtgcagctgggcacccctctggaggaagccaagcaccgtgcccatctgggccatgccgggcagccccatgaccaggtcagaggtcagccaggcctcgctggccacccacaccttgggcgagagcctgctgctgatgctgtagttgaagagggcgtgggcggcgtgcacggaggcgaacagcagcaccacctgcacgctgctctggttcacctggtgcaggacgtcctgcaccttccccagccgcgagtcatcggcacggggcagcggcaccaggccctcgtgcgcgatgcagatgccgcgtgccgcggccagggccgagaagatgctcaggccctgccggccgtactcgtcgtcgctgcccagggcggccacccagttccagccgaactcctgcagcagctccgcggcggccgtcagctgcacacggtcgctgggcacggtgcggaagaaggaggggaaggtctcccgggcgctcagcagctccatgctagcaccgtagctgacctgcaagggccaagaggcatctcctgacacaggggctcccacgggcagggctgggtgggggtgggtgatggtggggggcgcccacctggggcatgaggaagaagctgaagaacttgccggtgaccatggcgagctctgacgagtggggcccgatgacagccagcacacggggctggtactgcgtgtagttgcagtaggcggcgatgtcgcggctgcctgccttggccaggaacatgaggctgggcttcatggccaccacaggctccgagcacgtatcaaagaggtcgtagcccaggcgcagcccgggcagcagatccgacttgttgttgatctcctccacggccattttcatggccagtgcccagagcaggccgtttgaggagaacctggggccacacagaaccgcagatggccacctcggccccagctcaggagcaccccagacctggtcaccctgaccccgacccaggccgtcccacctctgtacctggtgcacacagggctgctgggccgtgtccggctgcggaggccagcctcctcggcctcgcccagggggaacagcccccccagcacgtagtcccccttcatcctaagttgctgtgacaggcacaatggggcccccgtcccagggtgcaggagagcccagaggctgaggcccaggacagcagggcccagcatggcagaggcaacttccaacaggcacggcaggtggctgccccgactggggcctcacatggagtgagcccggggcggggagcgggcagaggatttgtttagcaaaacccttgccatcctcacttgccacaccctggggccccagtggtgtcctcgcttcctgggcctgaaagtttgtgcgcgtcagactctgcctgaggccactgccaggctctatggccagcgttgaccggcaggcaggctctgctcagttgctggccgtggccttgttccctgcctgtggctgagccccttgccaccccccgattcctggagttgcccagcaggctgtggagaggagagggggcaaaggggcctccagggctctgaggtctcagctgcgtgggagggatgcagagacacccagccctggggcttttcataagcacagaaatgcctcctacccagccccgggagcttctggctcccactcaaggctgtgctggccggagccgggggcagcagggatgggccccctaggcctgcagaccagtcaggccagtgggcagccggccagccaggcctccaccctgcagctggggagggccctggggtggtggtgctgccctcccagtctgcttgggagcagagttccttgagggtctcagcccttctgccagagtctgacgcctggaagctgtaggaaccgcatggccagctgtactcacactgctgacccccgtctgggccactcctgcgtggcaggcacacaggtggctcctgctgggggtagagtttgtttgccaggggggcacgcaaacaagggaggaagggccacaggcaaatgagcggcagctggagcagcaccaggtgtgcagggccgggactcctctgcctctgtgttgctttgggggtgccctcggggacacagcagactccaggcgcaggccctcccaggggaactggggggcactcagcttcagctagggcctggcagacctagcagataccaggaggtgtgccctggctggtgcttcttccccatggtgttgtgaggaggacctgtgagggacacacactaccaccgcacatgcatatggcacatgctgagcacacgtgaatatggcgcacatgcgaacctggcacacgagcacaggaatgcggcacacacacaaacggcacatgcgcatggtacacgcgaatggcacatgcacggcacacgtgcatgggacacgcacggcacacgcaaggaacacatgcatggcatgcaaacggcacacatgcatgccacacgtgcacagcatacatgcaaatggcacacgtgtacggtgcacacgaatggcacatgcgcatggtacacacaaatggcacacgcacggcaagtgcatggcacacgcgcatggcacacacaaaacggcacatgcaaatggcacacacacggcacacacaatacacacggaaacggcacatacacaaatgccacacatgcatggcacgcaagcaaacgacgtgtggcacacgcgcatcgcacgcaaatggcacgtgcatgacacaaatggcacatgcaaacagcacacacatggtacacgcaaagcacatggcacgcacatgcgcacagcatacgctcacagcacacacggcatacacaaatggcacacatgcacgtggcacacgtgcacggccaacacgcagcacatacgtgcatggcacatacacgaaaacagcacacgctcacggccaacacgcatggcacatgcaactggcacctgcacattgcacagatggcacacatgcacatggtacatgcaaacagcacatgcaaacggcacacgtgcggcacacgcaaatagcacactcgcacttgggacacgcaaacggcacaagcatggcacttgtacagaaggcaacacccggagggagccctgccctggggcccacgcagacccaggcagttctcccggcccatactgcagtcggcagcctttgccggcaccatatgcagctcccacagaccctgaggtggg

SEQ ID NO: 2175 - DNA, 4001 bp, Homo sapiens
gaccttggtcttcccttatctcagtaaaccagcaccaccatcttccctatagcacaagctaataatctgagtcatccttgactcctccctttcccttgctatccacatccaattcttcagtacttactgtggattctctctctaaaatgtatcttgaatccatgtattcatctcaaactcacctgctatcatcatagtaccaacagccaacatctcttgcctatatactgcaaaagcctcctaactagtcttgtagcttccactcttctcctccacccatttgccatacagcagcaaaatggtgttaaaatggatagcatcatgcctatccatttttgtgtaatcccaggactttgggaggccaaggagggttgatcacttgaggccagaagttcaagaccagcctggacaacatggcaaaactctgtctctattaaaaatacaaaaaattagccaggcgtggtgggacacacctgtgatcccagctacttgggaggctgagacaggagaattttttgagcccaggaggtggaggttgcaatgacctgagatcatgctattgcatttcagcctgagggacacagccagactcaatctaaaaaaataaaaaaatgaaaataaattttaaaaaagccctttaatgaatctgcattgtgcttcaaatgcaatccaaattccttactgacccacctcatctatcccctgcaaacctccccagttttgtttcatgcctttctctttctagctcatcaggctccacttagctttttggcaactgaaatgtgccaaattctagcttgtctgggggcctgcaacctatctgtttccctaaccagcatacactcacccccttgcttgggtggctccttgtcttttcagccttaagtgtcagctcctgggaggatttccccctgaaataaaaccccccttaatcctctattattagtctctagtttcccacgtaatgggtaaaacagtttgtaactgattttacgtgtgtattattattttaattgagacggggtctcaccacattgcccaggctggtctcaaactcctgggctcaagcgatccacccacttcggcctctcatagtgctaggattacaagtgtgagcaaccacactcggccatgtatttttgtttgtttgtttgcctctctcccccatttgtgaatttttttttttttttttttttgagacagggtctcactgttacccaggctggagtgcagtggcttgatgtcagctcactgcaacctccacctcctgggctccagcgattctcccacctcagcctcccgagtagctgggaccacaggcaaacgccacaatcaccggctttttttttttttttgtagggacgaggtttcaccatgttgcccaggctggtcacgatctcctggacacaggagatgcgcagcgcccgcctcggcctcccaaagtgctgggattacgggcgtgagcccgcgcccgacctctccccgatttgaacgcgtttcgaggaccgcttcccacaaagagtggcatctcagccaggaggtgagagccccgaggggaaaaacaggccagccaaggggagtgagggaacgattccaggaactcagaagagcaaacaaaagccttgtggagatagcttaccgctactgaatcaggaaaaaaaaatcggtatgtctgaggttaaatagggaatagggaaatgaggggcaaggtcatatggccataaacaagggtctgggcgggggatatggggtttcgtcccaagggaggagagcaaagataacacgaggggaaaggacgggggcctccctgctccctctggtcccgtatcgccctcacatacgcggtcaaagtccggggcggagaggtggcagtgacagtccaccaagcctacgccagccgctcgcattgcgccccggcggctgccgctttagaccggccagcagagccggagccggaacgtttcagctgcagcgtcctgagtttccagccggatgcatgctggttacaccagtgtgaacccgcttttccgctcccagagtgccccgcccacagttccgacgaaaaatggcggggtctcctgagttggtggtccttgaccctccatgggacaaggagctcgcggctggcacagagagccaggccttggtctccgccactccccgagaagactttcgggtgcgctgcacctcgaagcgggctgtgaccgaaatgctacaactgtgcggccgcttcgtgcaaaagctcggggacgctctgccggaggagattcgggagcccgctctgcgagatgcgcagtgggtacgggaccagttagccagttctttactcatcatcctcttacccaacacccaggatcttaggattcagaaagatcccacgccaggccttggcagaattaacggtgccccaggctactgtagaaccagttcgagaaacgctagaggagaaagaaatagatgctaatgtcagctgggtcttattaattacttagaccagcgctgtccagtgaaaatacaaggcaagctaatctttatgtagttttaaactaaaagtaagaaataggtgaagttaatggaaataagacattttgtttaacccaataaatccaaggtattttaacatgtaataatatcaaatgaatgagatattttacattcttttgttcgtactaagcttttcaaatctggtgtgctgcatttacggcacatcttcgaactagttacatttaagcgctcagtaactacaaagtggctagtggctcacctgttggacaatgcagccgcagacaatgaggaattctcctggaaagggtaattctggaagtcagccattcacccaagcagcatttgatctttccttttgcatgttttatttatttatttattttattttattttttttttttgagacagagtctcgctctgtcgcccaggctggagtgcagtggcgcgatctcggctcactgcaagctccgcctcctgggttcacgccattctcctgcctcagcctcctgagtagctgggactccaggcgcctgccaccacgcccggctaatttttttgtgtttttagtagagacagggtttcaccgtgttagccagcatggtctcgatctcctgacctcgtgatccgcccgccttgggctcccaaagtgctggtattacaggcgtgagccacctcgcccggcctattaacctttatttttactgtttgcactgtggtcattcataactcacaaatgtgcggtattatgagcttttaaattttttccgctaatataagtagattggtgcctgttataaggaagcacacaatccctttatttcttgtgttcccaaaaaactaccaccttcagggctttgcaaaaatatttaagaaaggcttgggaaatgtggtatagaggcaaatgtatgatcttagtaaagttttcaaccaacacaattttttttaacctattttagtcttgtaaagaaaatgttttcactctaaaacaggcaaaaggggtcgggcgcggtggctcacgcctgtaatcccagcactttgggaggccgaggcgggcggatcacgaggtcaggagatcgagaccatcctggctaacatggtgaaaccccgtctctactaaaacaataataataataatacaaaaaattagccggccatggtggcaggcacctgtagtcccagctactcgggaggctgaggcaggagaatggcgtgaacccgggaggcggagcttgcagtgagcccagatctcgccactgcactccagcctgggtgacagagcgagactccatctcaaaaaaaaaaggttcagtggaagaatgaagaaacacttcctgggttgtgactctgtatgtagttttgtatatagtgactcttacgtcattccctccttgcaagcaaggcaagaatagggatatatctcaggacgtttttagtagttttttgggagaagacttttgttgtataatcttagaatttgtctgattctaggaaatgct

SEQ ID NO: 2176 - DNA, 4001 bp, Homo sapiens
taatttttgtatttttagtagagacggggtttcaccatgttggccaggatggtctcgacctcttgacctcgtgatccacccacctcggcctcccaaagtgctgggattacaggcatgagccaccacgcccggccgactttggctttcactccaggtgaaatgtgtagtccttggaggatttttgagaggaaagacataaatctgatttttttttaaaggatcaaccgagatactgtgatgcaaacagactaaaagaggaaagagcagaaactactgcagtaattcaagtacgagacaacgtaacttgaacaagtgaaggtgataacaagagcctgggagtgtggacagattttaaaggtggagagtccataggatttgctgatatatatggaagagattaatcagggatgataccaaagattttcatctagacaaatatttcagtagtgacaatgaatgtaaatccaataaacctgctagtcaaaaggcagactgggctgggcacggtggctcacacctgtagccccagcactttgggaggctgaagcaggtggatcacctgaagtcaggccttcaaaaccagtctggccaacatggcgaaaccccatctctactacaaatacaaaaaaaaaaaaattagctgggcatggtggcacacacctgtcatcccaactactcgggaggctgaggtgggagatatgcttgaacctgggaggcgtggttgcagtgagctgagattgggccactgcacaccagccttgggcgacagagcaagactccatatcaaaaaaaaaaaaaaaaaaaaaaagcaggctgtccacttagattaaaaaaaaaacccagagatatgctgtttacaacagtatataaaatatgagcatacagaaaagttaaaacttaagaatatgaaaaacgtttgaagcaagtatcaaaacacagcggccgtggctaaattaatgccagagaaaagaaaagtcttctctcttcatctctacctccactaactttctctaacagtttggcaatttgttaaccccgtcttcctgccaggactgcttctctgaggataaggctgtcacaccatcatttggatccacccacaacttagaacagtccccatttggtagtaaacaccaagtaaaaatagttactttaggccgggcgcggtggctcacgcctgtaatcccagcagtttgggaggccgaggcgggtggatcatctgagatcaggagttcgagagcagcctggccaacatggagaaaccctgtctctactaaaaatacaaaaattagccgagcgtggtggcacgcgcctgtaatcccagctactcgggaggctgaggcagcagaatcgcttgaacccaggaggcggaggttgcagtaagccgagatcagagatccgcgccactgcagtccagcctgggcgacagagcaagactgtctcaaaagaacaaacagttactttaagtgctctccacctatttaacgttatttctctgtcatcaccaatgttaactgattcggaaggacgaggctgttcctctaaggtgacaccttgtaaaagtcgttggtcgcctgtaccattttcacctcttccaaagtgacatgccaattctctgagagaagcttaaaatgctagagatcacgtgcggctactcctaaataaggccttccaggaggcgcagggtggccccaacccagccggctggaccgcctcccagcgcacggagcaggcaacgcccggctctggcaatctgggaagattccaggaaaggaagaaaaggccaagagcactgcagggtgacgcaccggccaggaatgctcgttccgaaagctccccgaacctctgaagctcacctgcccgcggagactccaggtgttcccagcagcagcccctccagccaactgcccagcagcgaagcttgaggctctggccggaagtgctgtaggaagtcccgcctccaccggagtgaggtacggctgctggagcatagacgagaatgtcagcgacagtattggaggccagaggagtggtcagcccacccaagccccgcctctgggcgggggcccaagcgatttccgagtgctgaaacctgggatgacagagcagcccagggaaagcgcgtgttccagtttactagataccacagaagtgagttacaaatcctgtaagaggttcagttccatgcgtattgagagtctaccacgtaggcagcatgcggtggtcaaagagaagaatatagtgttgataccgccaaaactaaaaaaaaaaaaaaaattacctagttaaagcataaggcagaatgaaagtaaatgcagtgatagaaaaaataatagaaaaagcaactatcctagacatgttaatttctgttgaaaccgcctttgcaaaattttgacagtaagagaaatctgacatggtttactcctatcttgattctagcctcacagactggctgtctttgctcattcctgggcacaggacaaactaactttgggagaaatttagtttatagtttaaatgataataacccttccccaaaactgcccttttaaaactaaatgaaaggccaccaagttaggagaatgagagggtcctgaattcttctaagttgtaattgtagttaaatgattaccacccattattccacaggtcacaaattcgcatcttccccaatcattcctgcagataacatcactgttgtagaacctaagattggccttttgagatgtcttttcaggtttttgcatttctgacaagtggatggccccaccctgactcatcaacctggggatccacgaaccaactcagtgcaagaggacagcttctacttcttatgatttcacctctgacccaaccagtcagcactccccattccctggccccgtacctgtcaaactatctgaaaaaccccctaacctctgagcctttggtgagatggatttgagtaacaactctgtctcccacgtggcatggccagcctcgcgtcaattaaactttctttactgcaatgccatggtttctgtcaattaattttgtttgtgcagcaggcagaaagaacccattggtggataccacagactccacaacaagagcagtttgggtagagtgagtgttagcattccaaaaccagactgaagtgaggtgaagtggaaaggaaattgagggagcaaagccaaatgactcttccaagaagtgaccttctaattgtcatattaaatggacacaaacagtcagtatcctgctggatgtctctactgttttatactttgatagttcactccttgaaactagaaactagatattacagtgattgttttttctttggaagaggggattaaaaaccacattggaaatctgataaaagctatctacctacacacaaattttgcgtatgatttcaaggactgattaatcctttgaagcccatgaataggcctcaaaggaatccatggatcccaaactaagactctcctcagcagggcacggtggctcacacctataatcccagcattttgggaggccgaggcaagcagatcacttgagctcaagagttcaaaactagcctgggcaatgtggcgaaaccctgtctctaaaaaaacacaaaaattagccaggcgtggtggtaggtgcctgtagtcccagctactcaggacgttgagttgggagaatctcttgagcaggggagacagaggttgcagtgagctgagatctcaacactgcactccaacctgggcaatagagtgagaccctgtttcaaaaaagaaaaaaaggccaggcgtggtggctcatgcctgtaatccgagtactttgggaagctgaggcgggtggatcacaaggtcaagaaattgagaccatcctggccaacagggtgaagccctgtctctactaaaaatacaaaaattagctgggcatggtgctgtgtgcctgtaatcacagctacttgggaggctaaggcaggagaatcatttgaacctgggaggcggaggttgcagtgagccgag

SEQ ID NO: 2177 - DNA, 4001 bp, Homo sapiens
gcccgcctcccgcggtcggctgcgacgcactcacccgggtgaggctccaggccgtgtgccgccgcgtcctccgtgtctccgagtgggcccgcggggctcagcgcctccatagacaggtccagccccttctcctcccagtctcgcagtttccgttttttatttgagccgatcaaggcttcaacggagaaggcatgtgctcgcgagctcagggcgactgcagatcttctcctttcactcattttagccgcccacacccctgcctccgcttgcccccgctaccgagggagcagccggcgccctcaagctctgagcgcccaccgggcccggcccgggagaggcggaggcgcgtcggacgaggctgagactgcggctcgcgggtctctccaccctccccctgcgtcctcctccgccctcctctgccggatccgacctgcgcccctacgctggcccagctgctaggaactagcgccccgagcgccgcccgctcgctgcatgagcgcccgagtcctgcttcccacccaccggggcaggcgctcacagactgtgtccactgaacttcatcttgtttttgttattattattattctctctcctctctctctctctctctctctcccctccctctctttttctctcctccccctctctctctcttcctctctgccttcccgtcctccctgtgatccaaacttctgggaaacttttttttccgctaaattcctcccttcccgaggaacagggggcaggcggtgcgctcctgtccgaggggtgagggagagggagggggaggaagaaaaagactgagggggaaaaaagccagcccccaaccaatagcgaggagggaacaagagaaactccgagagcgcgaaccaatgagaggaagggagagactgaggcccgggccaaagcgcagcgccagtcgtcccctggatgctcctgggccgactttaacccctggcttcccggtttccccatgggttactccaagagggaggtaggacagttgaaagttgaggtctgatctgcgcctttacaaactcctgcaaatcccaaatccatacgtttttcttccagatctgctggtctcatagacgctgcaagtccagagtcactttagttgcagatctggaattttggggctctgacaaaatgttaacctgtccaaaatgccagaaaacgattctgataatttcgcgtcagcccctaggtgctttagaatattctggttcctcctggatttcgccacacaggttttaatgttcctactgaacgttttctaagcaaatctgggtaaggcaaaaggaaacaaacaaacaagcaaacagaaagccctgttactaaccagggtcttgtaactgaaaattcaaagaccgcttcctccttccagctctacctggtggagaaggagacacaggcgccttgagagcaaggggcgggcggcggagcgcggggtttagggcgagctcctcaggcgtattccagctgggccccctcacgccgcaaatactctctttccctacggcccgaacgctgggctgcgcttcgcctgttccgggctcttgttgcagagaacctatggagaggtgacaggcaagaacagctaggaactttaacagaagagaaggagctttttcaaaattccctgcaaatcccgttacctcaagaccatggctttcccggccagctgatctcccccctggccgccccctgccttttgcgatctctaaggactgcattcaacatggatttctaaggaattaaaaaatccaacgctcctggccattcttaattcccacacctcttcccaagttacgccaccggtcgaggacggcaggagacccccgagtgcagagaaagctcaaaccggcagcgaagtcggtcctagccaagctgaaaaaacgtctcggatttcgcggacagcggcctagacacagcccgatcttccagtcctagtgccctggtcgagacggttctatccttttgcaaagaagccggaaagagctgggtcccgggggcgggggacagactgagaggccaagcaggccagtcgtgacgacagccaggcccttagaagtctccaaacctgaaagtttaggttagggggcccacagcctgttaagatttcttgttgttgttttcgcgaggcccgggagaatcagctctcccaccttgcggcaagaaaagatgacttgtcaggcctctgaaacgccgaattctctgccggactgcggaggggcccagggaaatctagtctttattattacagttggaagtgttctggtgctgaaggcaaccacagtgttgtgaattcaccttgggcctctttggacaagaggctacttttgcccccttccttcacccccgccccaaattaggatccaaccaggatgtcaggaagctagcatcccaggcgaatgcaaaaagaacaatggaaaagccaccggatgagtgtgattcagccaagcctgacctccccggagcctgtgtctcaggcttggaggtccccagggagcacgaacatgaactctggggagctggaagcagggtactggtccccgcctcctgcagctctgcccagaggacttggggagcccggatggagaggcgcaggatctcccacttcagtcagcatttggcgttgcttccaggagtcgtcgctgaaagtcagcgcgcattcactgctaccgggcttcagcagagaagctggagacaaggcagacgggaacccgcaatttccttccccagcggctggggcctctctctcacctcccaactctggtgtcgcccggcgttttccgcctgcggctggagcctgcccctaccaagcttggtggggtagcaatggggccggcctctagactttcccagctcttttctcatccccatagccggtatctcccatctctctctggcagccttttgcctttcacagtttctcacaggcctggtttggactgagaagcgggtacaccatatgcctcaccctctctgagaccatggaattttctcaaaaaggaggacttagcctgggcaacatggagaaaccccatttctacaaaaaatacaaaaattagccaggtgtggtggtgtgggcctgtagtcccagctactcaggaggctgacaggggaggatcacctgagcccaggaggtccaggctgaagtgagccgagattgcaccactacactccagactcggtgacagagtgagaacctgtcttctcaaaaatagaaaaaaaggaaaaaaaaaaaaaaaaggaggactttttggttatctaggaacataattgcaagtccagaggcccgattgttcctgtgtgtccaaagacgcagcatctgagaggcatacatagaggaatgagcaatggtttcaacagcatgcatctgcatcctctccgaagcttgcactccgcagagtcaggagtcagccagaagagtttccacacccctccttcagattgcacataggctgctcccacccccattccacagacacacatatcctggaattgtaggttaggccactaaaaccaaccgaacccaaatgaaagcaggatggtttttaacagtcttgaaaataaggggtttcctctaagtaaatgggaggagcagtgaaaactcccgtgactctataggagttaatgtaaggtttttcccagaagcatgcactccttggtgggtgactgctgatgggaaggaaaatctggagaaagagtaagcaggatggcttaatatgtgtgcttaggtgtacactcgtgtgcagttgagggaggctttgggagattacatgtaagaatctgcaagtgtgatacaaattttccttctactgattacatcaacgggctttaaaagtctctcctcattaccccagcttatctctcttttaacctttatgggtaagggtggggtccgcagtttatgaggctaattccctaggcactacctaggtttccctgctacaggcttcaacttttcgccctgagtgcatcctacaggcgatcca

SEQ ID NO: 2178 - DNA, 4001 bp, Homo sapiens
aaatataggggaaaattacataggcaataaaaaggcaagataaaacttttcttaaatggtaaaagtacattccaatgtaacatattattaaattggaatttatcatggtttcagaaacttttattatttattccttattgaaatagatgaaccatatattgacttggtaattgtacttatttttactttaataaatggccaatttgacagcccaatcaatagcataaggctaggtattactgtaattagtatccaataatacaaagaaaaataagcagaatgttctacctataatcagatataataaaatttttacagttgcatctttgcccatttttaaagggtcagagactaaatccaattaagaatttggtgtaattctgtgaaattaaaactatgttttatgttttcttctatgaaagaagctaaaaataatgtgtaaatacaggtcaagagaaggaactataattacagtaacaatattaaaagcaataaatctatatgaaataagtgtggaacccattttgagaaagaaaatataaaaatcaagcaaggttgatattcctgctactggtataatcgcaatttcttgaaatgccctaattcaggtatggctttcattttagaaagcattttaatgccatgtaacagctctcgagttcataactcttcaagattgacaagaaatagttcattttctatactgtgctttattaaaatatagaaaaccgagacatcaggaacggaagcactttgcacaaggacaaaagcctgacagaaagaagttcagatggcctcggctcttctcttttatcagaattctctcgagggtgtcataattagagttcagccaaaactaagcctactgaaaatgcctttcagcattttgtacttttgtgaccatgtgtatgaaaagctatgtgaacaccagctgaatgttggagccagtttggccaagctgcgagcggtgagattttgtttcaaaatatttgcgtctcctctacgaagtgaaatcttctaatattacctggacagccccttagcagactaggtttaatagaatctgagaaatgccaccagagatcagtttcagttaatccctaaatttgttgcactgataagaaagaaggcatcttcttttctctaaagcagaataatatgttttcatccactattactgcaacagctttcatatcatcacaaacacacacaatctcaaatgaacactcaccacaaacacacacggggaagcagatgaagtgataggcaatgagtttacatttgcccttttgcttccaatcttcaactagccaaacatttctggcaagtttgctatacttaggaggagatcatccagcttccaaataaagttgtctttcaccttatctggacggagttggggctcaggtctgcgatagggtatgcagctagtcacaaattaatattattttctgacatttaagtccattttcccatcccaatggggcatgccccccactttatggtaatttccccagaatttctccatttaaaatgcacataagacaggtggcttcatcctctgatgatctcagataaattaattaagttggctggaggaaagccattggagacagtcgttcctgtaagcatgtttaatcagatcccgccgcctctgagtgaagagcggcagcctcttcaatattcaaggggtctcatctctcctgccaagccctgccagcccacgcggggcggcagataaactcacctgccattcttggtcacaatcatctcattagtgacttccttgaatctctgccagagaggtgcatcctccaggatgatctgaagttgcttctccgtagggtcgcctttttccctccctgcctgaagctcactctccaccacattgagcagatgagaaacagtgccatcgctgggcttccgagtgcccagctcactcatggccataggcacttctcgaactttgccgagagccgttacccaacttgcctgcttctagcttcttccttccctcacttgcctgcttttcaaacccacttgaacagtgcttggggagcggagagaagataccctggctcttgcctaagctcctaggatgacaccccttaaaagtctccacattatgccaccaacctgttaagctttagttggggagcggggtggaggcaggggagaggtagggaagaaaaagccctctcttaattactcattggatcaggtgggagagagcctggctttcccattggctgccgtgcacagagtagatatttaagaagagtactccatccaaattatcaggcttttatcttgttgtacctgaagaggtctaatcggtgtattgaggaccattttcccattaattaaaattattccaggcccagactgcactgtcaggcaaatcatgtttgtgcataaatcatgacatgtggcacctataaagaaaagggtcctggggagaatcgacaaacttgatgcccaggctataagctactctccagcatcttagacgaaggctctggagggaagaaagcatgtatggaaggtccaaggcactgtgccaagaaacatgactactgtaccagagaataaaggaagacactctgtgtgccactgctcaagggtcagggctccggagaaaagaaaagagctcagaatctctttctcccagggtgtcccctactgatcatctctctcctgaatgtcctatactcgctcacaccccacttttctcaagggccctcctcacctcctacaaatggagctgtgaatgttgtccttcctccctagagtctagaaccccaatttttgttatctctagcctttgccagaggaagacaaaaaagcagctagtatcatattaatctcgctaaggaacactctgcccccagtcagtgaaaataaactgtttacattattaggcagagcaatttcaatctttggtccagaaaggcattctggttttctctttagacaattcatccttattttggcattccaggatgaatcccacattccctgggaagaaacactagtagaaagcttttcttttgcccacaacacacagtactaatggcgagtgagtggatggcgggtggaagagacaggagcagaggaagctctacctcctctggcccccaaccttgagtagagcctgggggttgtgagtttttctctcatttcaatacaaagtaagaaaacaagaacataaggaaaacaaacccaaaaaggtaagataaagtcagggtaaggatgacagaaaatgtattcaggatctcctatgctacatacctatgaagcatcacatacagcaaggaacaaacagaaatggcctgcgcctttacagaattaacaatatgatggagaaaataaatgatataaagtaaacaacaactaagtaattatcaatagtgataagtctatgaaggctacttaaaagggtgaagtgatcaagaaaaatttgtgcacagcagggtagggaactccagttagatggagttgtatagaacagcttctttgaggaggagacatttcagatgagaccaaaagctcagcaaagatgtagtcggggaagagttggcagagtgccaagcagaagaattacatgtgagaagcatggcttgagccaggtagaaatctccagggaggccagtgtgaccagaatgtggtggtaaagagagcagaatgagatgttctttgagagagggccaggccagaccatgaggccttagaagtcatgatgaagaatttgaatgttcttcagcatgagataggaaacaattggagagtattaagtaggaaaacagcatgattggctttgtgtttgcaaaaaatctaatcgatttgtgaagaatagactaggaaagggcaagagctgaagtaaagaacaaattagaggctatgacagcaattcaggcaagagctggtgatggcttagcctagggtagtggcagtggccaaaaaatgaagtgtacaggttctagatacactttagaagtcta

SEQ ID NO: 2179 - DNA, 4001 bp, Homo sapiens
ttcctcttcccatttcacagaagaggaaactcgaggtccagaaagggaaggttgagtggcttttgcctagggccataaaaggagtgagggggaggccagggcaggtcccgtcctcttcagccagagctctatcccaagcagcctgcctctcctccggtctctaggcgtccccaccctacccctcttacccaggggcccagaatttctttcctggcccaagcttgggggtcagtaaggagctgggctgggataacccgtctatttgaactggaatttggctcagaatccctggctgcgctctgccaaccccagctgagaaaatgctcccccaagacttgtggctcagttgtactgaggattgtggaggagtctggaacggggagtgcatggaggttgggagtgtcaggtgagaagctcccagcactctgcaggtttgtgctgtatctttctgtgttggacctggctgcgtagaagcaggtcttgttcgccagttcttagcaagcacaggtctgagtcctactaagggctttacatctctgtctcatctctccaatcctcaccgctgccagcagagacaagaatccagtgacatcccttctccagaggcagataatctcatctctttcttacagatgaagaaactgaggctctggcctttatatggacaccaactcatgactgcccagtgtccactctagggctccctgccacttcatggttccagtgacccttccctgggccttggctactcttcctggctctaaaacttcccttagtgtctcttcctttcccaggctcctaagtgtcctggaaatgcaggtggctgcagcacatggctacggatggtgggaggaagaggaccctggaacaggaacgggaggtgggaagggcatgctcaccaggctccctttttttccctcccagggtgagcgcaggccctccaggacccaaggccaaatttgctctggccaggcgaccagtcggccgccagccccaggcaaagatcacggggaagatcaaacattaacttccagctgggtctgcgctctggccaggaccctccggtagggctgtcagccctgctcccaacctcccgccgagcccgctcctccctccgccctcgccctcgctgcacaggcctccagcccggcccccttcccccgccccgcgggcccccgcacctgttcggcccccgcccgtccgggccgcaccccaaggccaaggaaagggaaaattgccaaaagaaccgctcctgacgcaccaagcggtggggtcgcaggatccacggccttttacttctctcccgcagacccactccggggtgcagggatgcagctcagtacccccgtcagcccaagtttctctgccacttctcgggccacccggatttgccccccgccccgcccccgccatcgccgccgctccccgggctttgcacacgccaagccctgggactcccaaagtcctttcccacgtccagctctcttcgcccgctttcctgggccctgcactagctgcccagggtgaaccctacacgtccaaagggacgtgcacaagtcgcgcctccgggacccgcacgatccccctggcgtcctgggccacgcacacgcccacctcgaggtgctcagcaagggtccccaaggggccttgggccctgcaccagccgctcctccctcgggtccccgagtcccgtacgcgcccccatggcgccccgccagtacgtccccaccccggaatccggggcttgcccgcgcctcccgggggcgggggccgtggcccaaactctgcagcctcaccgtgttcttcctggccaccatcttctccagctttttggcgatcctcagcagctcctcttcctggcccatgttggcccgcgacgcccggcggggcgaggggcacaggggcagcagtagggcctcgggggcaggaggcgcgaaggcggagggcgcgcaacccgcgcgggccccaaacacacacgacacacacgcccggcgggggcggggctctccccacccccacccccccaccgcccgcctcccaactgtgcgggggaggggtggcgggcactaaatatagacttcaaggacttgcccgggcactgattgcccgcgccggccgatcgggcctcaggggagggacgaggctgagagaggggaccctccaactccggcccttccaggggcgccgggggaccgaagagagatttgggaaggagggctctctggcgagctgggaggctgtgacctggccacaggcggcggtcgcggcgcggagggcgcccgagggtgtcccaggggccctgggaagcgttctgggctcccgcgtctctgcaccgttgcatctcaaagcgggaggacacagttccgcgcctatgcccaagtggaggcaactcggtgcgctcgaatcccgtgtgtgtgtgtgtgtgtgtgtgtgtgtgtgtgtgtgtgtgtgtgtgtagatcactaaatccagctctgctttaacctgcactcactccatcgtgcacacggcctgtgcatgccacgtgtatccaggctcctgtttgcctctgtctacctaaaacttcctttgctggctgttttgttagtaaggctttgcatttttaacaagctcctatgtgctgggggtgctgctggtcccagaactacactctcgagtagtgagagcttatcggggagattctttttatttttttgagacagggtctccctctgtggctgaggccagagtggagtggagcaatcaggctcactgcctcgacttccccagctcaagtgatcctttctgcctcagcctcctgagtagctaggactacaggcgtgagccatccatcatgcccagctaattttttaattttttgtaaagactaggtcttactacgttgcccaggctggtctggaactcctggtctcaagcgatccgcctgccttggcctcccaaagtgctgtaattacagatgagattctttttttttttttttgagacgcagtctcgcactgtcgcccaggctggagtgcagtgccacgatctcggctcactgcaagctctgcctcccgggttcacaccattctcctgcctcagcctcctgagtagctgggactacaggcgcccgccaccacgcccggccaatttttttgtatttttagtagagatggggtttcaccatgttatccggaatagtctcgatctcctgaccccgtgatctgcctgcctcggcctcccaaagtgctgggattacaggcgtgagccaccgcaccccgccgagattcattcttaagtgcaccaaattttgagaaatattgatccaggtgcaaggctgccaggtcaggccagtatcccctcagtggggttgggtttggaagtcatcttagtggaggggtggaaacacaattgtgcctatcttccccagccatgcagggatctgccttcctgtggaatgatctccaatgatcttcaagtatctcctgcagacccagttctcttgctaaataagtgagtttaatggacagaaaatgatcttcctgtgatgggggtggggctcaggaacctggagggaaggcatgaaaagtggtccacagtgtgtgggagctggggttggggtgtcgagtgaaatctcctgattttcctgagagaaccgcatttcagcttgggtcgcagaggcagcttggtgtggacacctatcttctaattgctatgtgacggggatcaaggtaggacagagtgggtttttttcatccattcaacaaatacgtattgagtgtccaagcaatgaacaagacagacccagtcccagaaagcttgagactcagtctatgggcaagagaaaccttaaacaaaaacagacatagtcaattaatgcatttatcatagctggggtgaagggcaggaagcagtggaggatagcttaaggacacatttgaggggacctgcactatttagggtgtcaacttctctgaagaaacgaagtttaaactttgggctgaagtacacagtggccgttg

SEQ ID NO: 2180 - DNA, 4001 bp, Homo sapiens
ggcagttttagcacagaaagcctaaagaatggataatgtcatcctggccaaatacataaaatgtgacagaactctgaggagaacaaacattaggaacctagtggaggaagaagaattggtaaaagaaaatgaaaaagtcagaaatttaagaggcaaggttcaggatgacaaaggggactaagtacaagttgttttgttttgttttagtaaaataattactttagcatttattgggtaactatgttgattgatacattgtatctactctttgcatcttgcttgcagacatcagactgacttcaatgtagcaagagctcattaaaacagcctctttccagctgggcacagtggctcatgcctgtaatctcagcactttgggagacaagaggcgggtggatcattttgaggtcaggagttcaagaccagcctggccaacatggtgaaaccccatctctactaaaaacaaaaaatagccaggcatctgtaatcccagctacttgggaggctgaggcaggaggatcatatgaagccgggaggtggaggttgcagtgagtcaagatcgtgccactgtactgcagtctgggtgacagagtgagaccctgtctgaaaaacaaaaacaacaacaacgacaacaaaaaaacagcctctttcccagtctcagctgaagctgtaaagctgtttgatacagttctgggcagtgtgacagatgtgagagaacagcatcaaagcccaccccttaataagtttgtacagggtaggtatatagaatcatatttggtactttaacattcctaacagactacattttgcaaaagaataacaacgaaggggacttgtcctacgagctagcacacatggtgtaaaccggagtaattacaagggtgtagcaggggtgtgcagaaatttataaatgtaagtctgtacagctatgggcgaaacaaaggaggagtggtcaggtacactttgaggaggaggcataacaagaaataattcataggtctttccacaacagaacctctagcaccaccttgctatcagtcctttgcacatttcctctagccccagatcccctctcaccttcagagattcaatcgtggcctgcttgtaaacctttcctccagaatctttcttctgagggctattctggattctaggcgttcgaatgacgaatttatccattgttaggggactccgactaccttgacgtgcttgcagcgtgttctggtcaagaaagagggcagattctaaaaccccactaaagactgccatgatattttttccccaaagtaacacaattgagttctctggaagaattcatgaattatggggcctcgagtggaattgacaggaagtaagattttctctttaaaagaaagatcttccgaagaattgaaactgtaatcaatcatcagtctacgtcctgagttaggaggttcctagcttccagaagtgcacgctctagcgaggattccaacattgggggaattggcccaatattggaatccccgctagagcgtgcacctaagccctcttccaaataagattgggctgtgaaagggttaggattacattaggctcagtgacgccctcttaacaaccacctcaccacagccataatcccaagggttgccctggtaatcagcaaccgacaaccacctccagaactcagcagagggtctcacaatacgcagcatcccctagaacaaactgctcggtggtcagaggaccctacccacggctgtaatctctggatccccgaacaaggagaaaccccatcctcctcgttcccagcactcaggagcccgggtaggggcacccaacaacggtctgacgtgagacccaccaggaaaagcagccctggtagctgctgttggcgccctccagactgcaacctcgtaggctcccaagcccagtcgtctgtgttgaaactaaacagacgcttcctcccagggcggtagttcctctgaagaaactccgccggccctcgcgcctctgggccacagcgaaccacattccccagaatgcactgcgaagaaatgcgggcggaaggcgcgctgagggcggctgtagttttccgagaccaactttcccgacagcaccgtgcgcctcccgcctacggagaactacatgccccagcctgccccgcgaagggaagaagtcaggaggccccgcttcgcgctaacgcttgcgatggttgaattcccctcctcacgccagcctaggagaagaagttcgtagtcccagaggtgaggcaggaggcggcagtttctggcgggtgagggcggagctgaagtgacagcggaggcggaagcaacggtcggtggggcggagaagggggctggccccaggaggaggaggaaacccttccgagaaaacagcaacaagctgagctgctgtgacagaggggaacaagatggcggcgccgaaggggagcctctgggtgaggacccaactggggctcccgccgctgctgctgctgaccatggccttggccggaggttcggggaccgcttcggctgaagcatttgactcggtcttgggtgatacggcgtcttgccaccgggcctgtcagttgacctaccccttgcacacctaccctaaggtagggcccgtccggagcgggctgcgacccttcccttgcagcccatttctcggctccccacacgtatgtcggctctggcaacctggctgttaaatcggcccttcaatcgctgtctcccatctgtgtagctcctgttttcctccctaatcctgcctgcaccccatttctgctgtcattaccggaagtttgtcctgcactaccctgtgataggctgggggacacaaagatgagaaagacgcgatccctttcctctgggagcttgccgggctgcaggggagtcgagcactcggaggaggataggggaggatatggatgattaatgcggggtcctcacctaagggagcgtaaggggggattgtagaaagggaggcgcagatacgcgagtccacaaatgattgattgataacccttgtttactaagcgcctctcggggccaggagcgcagtcttcggggagtcagacaagtagacgattccactgtggtataaaaagcgtcacgaaggcagctcagggagtagcgagacgctcaggaatgctgtctgcctatgttgagttactgtgtccaagacgctgccaagagggactgggttagagaagaggcaattaggtgtctgcctaccagaaactgaccactcagtgcagaaaacggggaattcgtggagtgggtgaagaaatgagactgtggacaggagggggttcgcagcttacagagaggaatggccctcctctctatgcttcccccctttcttttaattacatacctaaccctcttcacgttggtttttcagcctaagaactctgtttactcaacattctaaattgcttgatgattcccaccacacctttcccatgtatgatttgagtatatgccctcccccacgttgttttatgagagcttttgttgatgttgctggtggtttcctcttcgtttttccttcatctcctctatgctatttgcttaaccattgtggctggacctccttgctctctaaaactggagtggctacggagacagttccagtgaagcttaggatgttccatattggcgagtattttcaggtctttgaaatgaaaagttctaagtgccggcacttctcagattttgttacggctggattttaaactgcatggagattatcaattttcaaaaaaaagtgtgggagaagggactgtactaaatttttccagagatttatgtaacaatcgagaaagaagtgagaagttttaacttcagacttaaatcaatgaatactgcttctaaccacgttatttttctccacctcttgtaaacttctcatcattaagaggattgtatgaagaagctcattaatattgatttggcctggaattgggttgagacttactttctattgttctagggtttgtttccttttttggg

SEQ ID NO: 2181 - DNA, 4001 bp, Homo sapiens
ctgacagaaataaagaacaaatagtgggtagttattatatggcactgctttaaggtatcaaacgtcagtcacagatcttacagtgttcaggaaaacaaactagtactaaaaaataatgaccatttattagatgtccacaaggggttactgtaaaaagaaacttgtaagtatgcctgaccactaggtacggtactgaagctgcaacagaaaacatggcacaatgaaagcattttaagttttcccagatttgtaactaaaatggcttcctgaggaagtgaatcttcgagctaggtatgaacgaagagccttaaaaagtggtctgatggtgagaggctgtgtacggcctttggaattgcagaaaccctacctccaacaggctagaacaaggtaaagagaaagtggctcttcaagaaaaaaaaccccaaagaatgacgattggttttctgagcactgactttcagcctggtaccttagcctttcaggttagtcctaggaagcagcaggtgaggaagaggctcagcagagcagttcccccacggccctagccctccctccacgacttccttttccaccaggactgagttccaactcctagaactgcccgccccggccagaatgatgacggagaatgccaaacacataagtgctttttcatcgttgtacttccacttaaaaaatcctgacaactgagttcaagaccagcctggccaagatggtgaaaccctgtctctactaaaaatacaaaaattagccaggcgtggtggcgggcgcctacaataccagctactcgggaggctgaggcagacaattgcctgaacccgggagacggaggttgcagtgagccgagatcgcgccactgtactccagcctgggcgaccagagcaagactcgcctcaaaaaaaaaaaagaaaaaaaaaaatcctgacaaccaccagactgtctcctggagaccagagaagtgagtgacagaaagatgaaaaggtacaagaacgcgtttaacttaatattcagtttgtacaataaacaacaaaaactagttaactacaattaaaaatggttgtccatcactcgaacaacgagaaacggtagctcttaccttcctattaatggccaaaaggaaacctagctgcgacttccaaccccgggcccccgcctctttttcaattccaacctaagttttcaggagtatgcttaggtgacgcgaggctttattctgttttgaaagggattcactgagaaagcgaaaggtccacgctctgatatccagccggagagtagtaaccgcgtctccgagaggcgcggaccagaccgcgagtccaggctccgcagcgttcgggcgcccgtcttctcctcccagcgaacacgcacccgctggggagtccgcgccgctccgcggggagccgggcaccagcgcaggcaccgggaggccaacgaggcggcggccagcgccctcccgccccgggcacgctctcccgcaggaaacagctggctcgggacgccacggagcgcctctgggaggaagcgctaggcacgcggtgtccgcaccgggcgcgcccccatcccgggcccgtgagggagggggagcggccggggccccgcgtcccgacgcccgacgcacggggtcccaacgcgcgggcagcggtcaatggccgcgaacttcacgaccccagccccgcggggcctggctcagggtcccagcccccgaaccccgccacgctcgggccgcgaccgttacggggccctcaccgacccaacgcccatcccgctacgcgccgccccctcgcttaccttcttagggtccgggttcgcggccaggcgcgcctgcagcttctccacaacttggagcgccgactccgccgccatcgctgtcactggcgcggcctcctcgccggaactgggctcgcgtcgcgtcctcgggccgcagctccgccctccgtgcatccccggcggagacggaagcgcgcctggccccttccgggcctcggctggggtgtgtggggggcggtgggctgcaggctccgcccccagggcccgctccccagcgcccacccggcggccgcgcactcctcgcgcccctggcccaagtgtgcgcgctgggggctgggggctgctcgggccgtacgcgcctccgccgccggcacccccgctccctgtgctcgcgtgctgagcccaagcctggaagacctctccagggtctacttcaagacggaatgaggccaccgcgccagaccctggccttataaatgccaacgctttctcccgcctggggcttagccacaccctaatcaacaccttgtcaggggtcccgggctggtgcccgtcctaggagtccgcaggcacccgcggtagcagccaccctaggctgagcacacgatgcgtcagtagttagactatcttttccagcctcagtacaacctgatgaaacgagttgtatgatcttcattttacagatgaggaaactgaggttcagggagaccaaattaacttgcagatggccgcaggacaggaaagaactgaaaatggaacctgaatctaagatgtctaggaccattgtgagcgcacatttctgaacaggtcgaggaattgaggcccagagaaagggatttttcaaaatccaaacagcttagttccttccatgaggcaataatagcccatgtgtcttgttttccccacaaacagtgtctggcacataggcactaaataaatacttattgcatgaatgtatagatagatagatgtttcctctgatgacttgccaatgagccgtatggcttgattagaagagcccaagatattattcttcaggccgtctactctcatcctaaaagcactaagttttaccattactaatactactactaaaaagagcaactaaatagttgcaaactcacttaaagtaccagcactgattacatctcatttgatcacatcaaagcagaacctaatcagatcttcagcagcaaattggcaatgcacctagcctgatctctccctcaaagcaggaaagcccagagattcttccagattctagctctggaagaaagaaaaacatcttaaacacaagttgtttcttcaaatgagcattcattcactcactatgctgaaaagccctctctaccatgtccctactcctccatttggcgcccctcccccagttccctaagcaactgaccaccttttcagggtgtaaatggtcagtttatttatctgtcttgccactgggctgtttatttatcaagtacagtaaccgacctgtccaactttgaatctctgccacctagcatcatctagaccttataatcagcattggatataaagtccatacaagactaatgaccatccacttggtaccctaaggctcaactgagggatgttgtagaaaaggcattgaactgggtgtgagaaaacttcgattctagtcccagcagtagtgtctccctcctctgcgtagcaaatacttttacattttatattccttccattttgaaaatgtaccactggtgtaatggaatacagactgattcttgaagcagaattgctgagtaattggcctggcacatactcgggacacatgaaacattctgcagatgttatccagagagagctcaataaccaaaatgaaaagaaacaatgaggttgggcacagtggctcatgcctgtaatcccagcactttgggggtcaagacgggaggactgcttgagcccaggagtttgagaccagcctgggtaacgtagtaagacccagcctctacaaaaaatacaaaaattttaaaattagccaggcatggtggtgcgtgcctgtggtcccagctacttgggagactgagttaggagaaccatttgagcccaggagatcaagactgcagtgagccatgatcgcaccactgctccagcctgggcaacagaaaaaacaaaaccaaaaaaaaacagaaagaaacaacgaatgcttctgggggatcctggagtgggtgtgctgctcccagacagccacccctatgtca

SEQ ID NO: 2182 - DNA, 4001 bp, Homo sapiens
aagttcgctttaattgagaaagaatgaactcatccttgagagagatacaatagaaatttatgaggatttgcagtagccatttctgtctgaagcagccagtattcttgatttggtttctattccatattagaaaacagaacaaaacatttacgggtagcaccattttaatagagatcaggctgatctcagttttgaaatttggaaacaaatttaagttcctccaagtctagtgtgatttgacatcttttgtggtaatgtcccatgaagagctcattcacatggccatgccatcaagtacatgaaatactttattattcagactacaatgtcaagtaagtaccttttgactcagaaatgaatgggggatgtagtgtagacctgttgtggtgtaaaatgaatataaaaccaccattccttgctctggtctcctctgagaataaatctcatagcctcaagtcaatagatctcattttcttgttagttcttacccgaagcacagctccaaattccctttcaaggaggttcttcaggtctttcttagttaatgctgctccatcacaatcatgagagacatactgattgaaaatttcagtgatgtcacagatgcttctcagaagtggagacatttttttttctttccttcaagttcaagtaaacctagaacaataaaataagatccagaatcaaaatcccgtttctgcttttgggaaggcttcattcacactatttcaggcagatccctaaataatttgaatttatagcggtaatttcaacctggactttcagagcactttaatatttgaatattgtatcagaaagagaaagagcgatcctgagaaattccaagccagggaatcatcttcagactatcctgttgtcagcttttgattgtccacccaatgtggattatctatgcccttttcttctgtctttcttccagctctccaccgtatttcagagtagaaaattaagagaagagtgcagaaattaaaattttatatatgtctacacaccttcctttaaagttgagcgaagaggacaggtaaaagccaaaaggtgaaggaagacttgagagtatcttaaagtggatagaggccatgtcagcaaaacagttggtagaaaatagaacaatgaaaagggaatatgaatgattcctcaacattacagtccataaaggatttaggaactcttatagaatataatttgtaagtcagcaattctaagattaaatagtacttcttcctagtcaaaagatggcattgtaacattcagatacacaaatgcagaaaacagagactgtatattacctgcctcaactcagatatagtaagatattcggatattgaagtattgaaagcttctgagaggtcctttctaaaccaaacggaatccagaaaactgtgaatgatattggttttgttaaacccaaatgcatcattggaatcttggctttttataaaacattagccagcagtagatcaatgttataagaatacatggaatggctttgctggtgggataagtgtagtcgttcatctagctgacttctttatgtacttctcaactccagtaccttaaatgctgtgactgtatgaagatggcccatattaggtagaaccaatgtaaaagagaacagaaggctggcaaacttttgagatagcagtttttaggaagatgaaccctatcagagccacacatgatcatccttgatgtgcagaagtatagagttcagagcccaaggagaagggtcatgcttcagttcaagtgatggctccaaccataagaagatgggatagagttagtgatagtttatttatccctgcaaaatactgataccttctggcacatggaacctccccccatatcccaacatctgaaatagctataaaaatggagaatcataaagaagaccacgatcccacagaatgggacttacccacttcaccagaggaagaagtcgacagtgcttgctgacaccacaggcaagtgtactgggtaactgggagctgggccttttataggggttttaattgtgccctggaaagcaacttgggaaggagacacccactctgtgggatggcctgattcattcctaaccaagcccagctccacctctgtctccacaaatggcttgtttatctcactatttgctcacgtagctatttggcacgaggttcacagaccttgcctcctgacagtcagggtaccagccccacctaacatgggagggtagaatatttggcagaatctccaattttcttaaattgttaaaagtaaattaaataataaaacaaaggtattaaatgttcacaatcttaattgattattacttcattacaaaggagtaaactctaagccatttgctttataaaagatacaatctctagtttgggattaagcagaaactttgaaataaagtgatgaaaaccaattaatttctccatgggatgtgacagtccatggtgagctgctcataagccctgccagaagcagttgcttcaattctagggcaatgagagagctgtaaagaattggttagtttcttctctaaaaatgcaggtgggaaaaatttttacatttgtctcccgggtcttatgatggttttcctacagattggggactgcctcctcagtaaagtttggaagggtaccttggaaatatatttttattaaaccgttcataagaaaacttgaaatctgtgaaatttcattcttagagacattaaacctaaatgaagtttgttcattagttttctcattagcatattgatgcccctggggaaaaagagctggtgtaatgtattattgtagatataatcatcctgctcagcctaagttactaatgattatgacacctaaacacttgagtctgcttctcctggaagtacattgaggtaattggtcattctagcccattatatccatcagggctttctcaatctggttgatcatttgcaaatttcagtgctgttttattgtaaggaattggattttatccatggttgtcagtgacttccttccttacatttcagactatatgaaactttggttcataatttatgaagactattaaatgattcaatggcttctctgcacttttgtctcctcctttgtccaacagaggcaagtgttggttttctgaattttgaggcaactgaacgtccttcaatggcatgagtgaaaatttggaatctaaatcttgatggctatttctttatgtgcagattggtctaaatgataatggagttgaactctatttgccccctcacttgctgccatcctagatgtggggtacagaggaaggtagaagtgacagggaatgggaagacaattataagcaatgctaatttctgcctcttaaggacttcaacactgaagtctacaatttagtggttttcctaggactgtcagaactgtcactatttcttgggctcagttaacaaacttgatgtggcaattccttggtgaagggtgaagacttctcatttttccccttctttttagggttttatgcagctctcttactctttggattctgagataggaccatcataagcactgaccacactgcaatcatgtgatcatggaagctcactctctcacagagggcactagccttttgtatgagtgttcttcaaggaataacctgggcaaggactgccttatgtctgcttttgtttgtatcctcctgtgtgtgatctattgggaaacctcagttcaggtgatgggatgcatttacatgactccattactttcctatagtgaataaaccctaaagggaactggaaatttttaggttccatgaaaataaagggaaaagtagcattaaccattctaaaattatagttagaatggcaattccccccatcaccatgcttttgaacagccttgaaaaaataccccaaattgcatttattataacagaaaaaccctttctcctctctgaatgaagctagatcttaaattcagtgatggttctcctacccacttttatttaaagtc

SEQ ID NO: 2183 - DNA, 4001 bp, Homo sapiens
agttggccttcattgtcttctgttgtttgtatatcttgagccacttcctgactttgttcatctccttccaggtgtttgttcttaggatcattgtgttcagatgcttctcctggaaagttgtgagtcttggcttctctccatgggtccactctgttatttccaactgctccactttcttcagggatgagctgagatgatgatgccattcctgaaggaagcatcctcttttcttgagttggtgaagttcccactgtccactgaccatctccggtggttgcctgaacatccacatcatctagcttctccttctctggtttagtcacctgtcttagttcagaacttagtaatgattttatgtcaagataacagaggttcaacaagttgaagattgcaagaacaaattcatcaaaactgatgatgccattactgtcaatattcagaagatttgaatttttttccacagcatgaaggacacagggctgcatgaaaacacagtgagaaatcagcttatttatatgtggtccagtgtcctaagtgtctcccaagaatcctatttttctgacctcattcctcagtaactggttaactttcccagaacagcaagaacttattggttctgcaagccatttttcatcagagagctatgcctgagaaagagcatttacaacacttgtgagttgcattttgatgcataatggtttatgactcctttcagaagtcagctttgcagaagcaataatcccagtgacgaaaacctctttttctctaagtaattgcacagagtatggaactgagactgaaaatagttgttcaagagacagtgagtgctgagaactgttagctaggtgtaaaatggatggggatcacatatgctcatcttgcttggattataaagaaagggtgagttggaaagaatttacacagctctgtgagaagctcacctgaaaaaagtccccaaactcgccctggatgagttgtttcagctctctgccagtcagtgttgccccgttactgtcctcactggcatatttgtggaatgtctcaattacacagaggacatttctcaggagctgaggcatctttacaaactcaggagaggctgtgagaaagaataaacaaagctcattttccaggatgggtccttcagggaggagataccaagattatcctttttgttcctcccccatctccactgcaacccctgctctattctgtatcttaaaatattatatctgaactccaggggtgatttagtattgtaccagacattgtggtgaaatcagacccagcataggtaagtattagaagagacaattcaccccactcttcagtaaacagcaacattcatgtgctcagagaaagcttcattgcaaaaggaaggtgataagagaactcaagcataaggattgaaatgcataaatgaagccaatagagttggacccattcttccagcctcatccaagagtgtctatctgctctcctctccctttggctcagtctagcctcctgcggttaggagggtataacctttaaagttagcaaagcttctagtggaaagataagtcacaccaagaaaattaacccctatgtttgcaggtggtaacaacatgctttaaccaagaagacatgattccatgtcccgaccccttattcattcatttcccatcctttaaatgcttctacattttcattgcaatagagatctgatcctgtgccttgttgaataatattcatgcctatgacttctaaacaatttatgttttttttaaaaagaaaatgatcaaagaagttccataatcaaggaatgcatttgggtggttggcgctcccagtttattattattaataggggttgacatagacttaaagtgtgtttcctttgaaatcctcttgcaatctcacatataagcaaaacagcaactgaaatcccaagtatgctcaagcagatggacttacctagttcacaagcgagagcaggtagaacgtggggcagcgggctgtgagctgacagcaggagctggaaccttttattgaggtcctaattgcacagttaagaaggagacaccctctgggtctaatgacctgacatcaccaccaaatccagtctcccctgctctgttgtcagttgtcttaattttatttccttctttaggcagtttcaattaaatcttagcttcagatgcatcaaaagaaaggggagggggtttcttgattcatttactgacttttgcagattatagttttgaaggctcttcaaggtagtgttggcttccctcccccattttttaacctaaggacataattacatttctgtctgacaaatcatagtgctggcagggacctcataagtcatctgattcctctgtctgcccacaagatggcccgtatttgacccaaacctgagagatgggtgtcaatcatgtgtttaaaaataaaggcccccatttagccatgtgacaaaagtggagataccagttgattcagatgtttcaatgctttgctctccttgcccagaggcagagttagaaaaaaaaaaaaattcttgcttggtgtgcaaagccttgcttacctatgttgtgctattttaaaaacgtgattgatatttgctttctaaagacatttttactatacaaggagcttgaaaccaataatctatattactgtgttctccctgtaaaggggaaagggagatgttgaaatcatcaagctgagaacagaagtgagtctgagatgctgaactggcaaacattttaattgtctcctagatctgggtccttcttagtagagaatatttaataaaataagaattagattcaatggttttcttagatatttttaaaaaatagagtatgttttaaaacactccttgtcaaaggatggaagaaatagacagatcaatgcaaacaaatataaaagacacagaccaagttaaagatggggtgggaatgggggtaattatatgagaaagctgaagctaagggatgcattgctattgagcaaaaaccttattctgaatttcctgattatcgaggaacatacaagggaactaaattttggggaaaaacattcatactgatactttacacctacaaacaatttctcagcatcctcccaaagggagaagacttctgggaattggaattggcatgtgaaggtcatcttagttctgattagttaatatccccagagtaccagctatttctcaacactatgccaggaactggagtgtttagagttgagtaagttatatcttcctgctctggagctcatgggccagtctcatgaagaactgggtatattcaaggctggattggaaagaaacacttatgggagacataataactgtcttcaaatacttgaaggatttttatgggtgtggaagagaaaagaattaatgtttattgaaaacttatgacatgtcaggagctttacatgggctatcttaatcctcacagcccttttaggtagttattatcctcttttaacagataaggaagttaaggctgttaagcaatttgcctacagatatgtacctttactaggtaatggcagagtcaggattcagaaatgaaaggtttcaagaaagtatgtctctgggccaggcgtggtggctcacgcctgtaatcccagcactttgcgaggctgaggcgggtggatcaccttaggtcaggagttctagatcagcctggctaacacggtgaaaccccatctctactaaaaatacaaaaattagctgggcatggtgtcacatacctgtaatcccagctactcgggaggctgaggcaggagaattgcttgaacccgggaggcagaggttgcagtgagccgagatcatgccactgcactccagcctgggtgacagagcaagactctgtctcaaaaaaaaaaaaaaaaagaaagtatgtctctgaagtcatagtgttttcattaccttgagtttcttatttgtgtaatgcccggtaatacagctggaatcaatgcttaaaactttctaaaaagcag

SEQ ID NO: 2184 - DNA, 4001 bp, Homo sapiens
gcttatttatgcaatagtataattatttacataagcagatattaagctatagcaaaaatgcttagctgatgaagacggaggtcattgacaaaagatatgcatgtatagcagaaagatgctatcctacatcagaaaccaatatttgtattgccccccaaatgtaaccataatacaactttgctaattaatatttgctgtcactgttatattttatttttgagacagggtcttgttctgtcacccaggttggagtgcagtggcatgatcatggctcactactgccccaaacacctgggctcaagcgttcctcccaactcagccacctgagtagctgggactgcaggtgtatgccatcaagctgggctaatttttaattttttgtagagatagggtctatgttgcccaggctggtcttgaactcctgggatcaagcaatcctgcttcagcctcccaaagtgctgggattacaggcatgagccactctacctggcctattttattattttagagacaggatctagctcttgttacccaggctggagtgcagtggcatgatcatagctcaccgtaacttcaaactcctgggctcaagcggtccacccacctcagcctccctagtagctaggactacaggcctgcaccaccatgcctagctaatttttaaacatttttgtagagacaagatctttctgtgttgcccaggctggccttaatctcctggccttaagtgatcctcctgccttggcctcccaaagtgctggaattacaggcatcaaccactgtgcctgacccaccatgactttaaaaaataaaattaggggtagggagctagaaaataaataaataaataaaaattaaaattaaccttgctttcccaaagattttttgttgtttgttttgttttctcgagcaacatttacatagtttgtaaagagcaaataggacttaacttttaaataaataatttattggaaaactccctccttcctactaatacttgttaaaaagctggtagtagcaatggacttcccagaacttggactataactctaataatgccctcattgtctacctacaaatttaagtattcatttaaattatttcataatctataaatgtgagagccccgataaggaaatactgtgctagacaccaaagcataaaaatagaagagaatccatgccttcaaggagctggcagttgagtaggtagggcacacaagaacataccctaaaacccagtggcatcaatgtcagagcagaggtgctgtgtgtgggtgaggcaggcagcgtggtgtgtgtgtgcacgtgagtgtgagcgtccttgagtgtgtacctgtgagtgtgcatctctgtgtgtgcaggtgcctgtgtgtataagtgtgtctgtgttcgtgtgtacgaaggtgagtgtgtttatgagtgtggaaagacacacagcctgattaggtgggtcattcaggttttgctgcaaagccacatagacccatctcggcctcagctgtttccaaagctgccctgcaggccgccccctccccaagaaaggccagagttgggacctggaggtcctcatgggtgcggccagccacaggaagaccgccccgggtcaggggatgaccttgctggccggctctgcgttggccatcactcttgaagcccagcccccagccatgcaatggggcaggggacgaaccgttgggaccgactttcagttcccaaatttgggatcattttttcttatgtgttggggagaggaggaataaggtggcggagagatcggggccaagtagggccatttctcaacaaagggccgatcccttgccccctatccttcctttggggtccagacgcgctgcagagagaggcgaccctacctgcagcagggaggcttcgcccggagcctcccagacctccggcactgcagacactgcgcgcggcgcggctcccgcgtcccaggcttcattcagccggcggccgcccgcgcactctccctggactctgaggccggtctccagggtgacctcaaacagagccctcggccctccccggccggacttggccgctgagtggccctctgagctgccctaaggatgtagaggatctcatcttcactgcccactgggggtcactctgagccgggctgcgtcctgggttggcggcgagctggaggggaactggttcattgtgtagcgaggaagacatttgggactaaagacatttgcacccctagggcccctcatcaagttccttttcccgcagacatcaggggcaggagtgggaagtgctgcggtttcctagcacaggaaatccgaagcgcaaagacaaagtaaagtagccctgcccttttcccggctcctaacgctgcttcgcacgttccccctccaaggcacaggcggtggaatgtggaggtaaatgagcacttacattggccagataccccagataccgacaaacattgggatttagtcgtcccaataactctgtcaagaaaggaatgttttccctttaaaggatttggaaaattgagattctaaaatgttaaataatatgcccaaggcccctgaaactcatggtcttaactccaatgtgttacaaaccgggctgggttccttcgctttccttaacaagactcttctgagcctgttaatgtctaagaagctttgaaatgaggctgtttggggttgaggacctacctgctggtatgaatgggcttttcctcttcttcagcgactatccccagcctaagcctggtttgggcctccccaaaccaaaagcaaacaaaataaacactatagggaccctcctgtagtgggcaatcattggaagcagaaacaagatgcctccaagcatctagccaagggcatggctcttgatgagtgtcctgctggaattagcattagctgacagtaatacattgggattccggtggagcacagtgttaggatagtgttggaagaagagaaatagatatttttgcccatcccaatctctactcacagaaagataagaacaggaaaggattgttgattgaatatctactatggactagataggaactgctaggtgatgaataaacattatctcattgaatttgttcagtgactatgacataggggacattactctatttttttttaagataaggaaatgtagaatcgttgagtaacatgctcaagtcgatatttaaatcacagagctgaaatttgtctaactcttaacccttgacctttgacagacctttggcccaccatccctaccctaaacatggaatgaagttttccagaaatgcgggtaaaattttaagaggctgacagcaaaagatattcacaattcaatttattttcatatttttcatttattttccagaaaaagaaatcacatttcagtaacaacttacatatagaattaaactttgttctggaatgggagccctagttgcagtaacgtgtcataataaataattgcatattcaggattttgtgaaataggtgattgggaaaattatgaacaaaaaacatttacaaaaattattatttacaaagagtgatatccatactatttctaacttataaggcaagtaatgttaagatggtctcatgattatcttcaacaagtcaattacacactttcctgtcaccattgcccagcagagagctttgctgcaattctgtgaaggagcaagtaagtcttcgcttccgttgttggttttctcttgagcacagcatagaagcagtaaagctttcattacagactaagcagtaatggctgtcagaaaaaagtatactcttttgaaatagacgtgtaggaaaaaggctgggaatcaacattttgactaaattttgaaagtatcttgagtattttaattcacagttttgtaagtattttatgcccaaggtatttttgtgaaattatgtacttagtacaagattaaaaagaaatttagtgtatttttgctacatagatcaaagagagctctaaataaaggctaccaccaaatcaaat

SEQ ID NO: 2185 - DNA, 4001 bp, Homo sapiens
ggaagaggtagaggtacctgctccgcccttgctgctgcagtgggtcaagacggatcaggctctcctcatgctgtttagtgatggcactgtccaggtaagagcctatccaggagttgcgggaaggtctgggaggcccagggtgctggggaggaagctgggcccggagcctaggtcctgaccactgtcatgctctgtgtgcaggtgaacttctacggggaccacaccaagctgattctcagtggctgggagcccctccttgtgacttttgtggcccgaaatcgtagtgcttgtacttacctcgcttcccaccttcggcagctgggctgctctccagacctgcggcagcgactccgctatgctctgcgcctgctccgggaccgcagcccagcctaggacccaagccctgaggcctgaggcctgtgcctgtcaggctctggcccttgcctttgtggccttcccccttcctttggtgcctcactgggggctttgggccgaatcccccagggaatcagggaccagctttactggagttgggggcggcttgtcttcgctggctcctaccccatctccaagataagcctgagccttagctcccagctagggggcgttatttatggaccacttttatttattgtcagacacttatttattgggatgtgagccccaggggggcctcctcctaggataataaacaattttgcagaattggactccccctcactcgcagtagagcccgtggaccgtggccaccgcgaagagcgaggtgttggtgtaggagaccgaggccagcccatcgcgcgccacgtcccagagcgcacggctgaccacgtgaacgccctggcccgcgcgcggccccagcaccacactgcataccagcttgtagcgtggcgggctgagctcgcgcaggcgaacgtgcacctgctcgcagagctcccgcaccagccgcgcggcctcgtcgctggagtagcacgcgtcgtgcagccctgcggccagcgccgcctccagggcacgctgtgcacgcgcagcctcccagcgctccccgggcactggctccgtgcggtaggagggcgccacccaacgggcgggcgccaggggcaaccctgagaagctgacccttgagcccagagggggcaccgggcccagggatggccgctgacccccaggacccgcgcctggcccgaccagcgagttgcggcgggagaaggacgcggccaggcccagcatggagccccggcgcgaggccggggctggacctggacctgccggtcgggcctcatcaatgctgggcaggcagcctcggggccgcaccggtgagggtttccgcccggagtctttggcattctcctcctcctggcgtcccgggggcagaggcctgctggccatggacctgctggctggaggaaccacactcagggtggccttcaccaggcatctgtctacccaccccagcctcttgctcagtgatgtcaagggtttttaccttctacccccttcttacctgtgttttagaacaagtggatcagatagtcccaggctgcctgggttcctaggtgctgagaaggttaaaggctgttagacacatgagcaggggacaggaggctgctaggactgggatcctcggctagtccttgccgactgagctccttctctgggcactatggaagttagccaggtacgctcggagtcttagagactgccatttctcccttccacccgacttctctggaaggagaggcaggcctctgcctcagcctggactgtggaggcagagcctccaacccctaaccaggaaggactgacagactcagctccttcaaccccacagatccttccagccctgggggtgttgaatccagtcatcttccacccagatctactctagggtggctggcacaaagatctcccctacacctggcccaggctgagggcagatgactcatgaagcccccttccaccttctgcctttggcctctgatcccacttcctccagaatcagttctgagatggctgccctctgctcccgaaactccctcaggcacctgagtcacccgcaggctttggcttctgagttctgtcctggctgcacagccctggccccgctggcctgaagggcaagtgggaggggaaagacctgtgttgtggagttgccatgggttgctagagcaaacactcctccctcccaggatccctccctccagtctggctctggcttaacctgagagcattgttgctgtgagcatgtgctgagcatggggtgcccctgagtcatcagggagagcggccgacagggtcttgcagcttagaggcaaacttcctaagcgcaggcaacagaggggcagatgtagagcaaggctgtggtcagaaaggctttgtcctaccccaggactcttgagccagggcccattttctccccttgtggaatggccagatgactggccattcgtgaacaagtcacagaggcctaggttagggggagatcttgaggctgcgggggtggtggctcaggaatccagagtctgggcccacaggaaggaacacgtcatggctctgttgtctccccatcggcctcgacaaggacaaacatttccgctcccggcgcagagttagggtggggcttggatgacttcctcagttcagggctatgtgcgggggaggggaggcccactggctcagctggtaggcaccaggccttataaagtggcagtgactcggcagtgaaccccgagtccagcctcgtgacctttgctgacccaagtgtcctggggcttgtccctagctggctacacctctagtacctaggtttccccaaagttacatttcagagatggcagaggctgtgacacctctgccagggctgacaactcatgtgactcctcctctggcagggatgggactgtcccctcccaaacaagccaggtcggggccctgacccatctatgggggcgaggattttccctgttgagtgggggtttccccggcctggctaaccggatcctgaccctgtgtgcctgtggaggagggaagggttaggagggcaaggagtttgaactctgaacctagggcaggctcagcttcgggggctaagaccctcgtatggcgcttaatgcccctctaagggctgaagttttccctgggcctgcccgggagatgggtggagtctcttctcaggccagctccagtttccatggaaacccacaggcttcccaccccgtcggctgcctgggcagactcccagccagggcctctttcgccgccgccgccgccgccagccagccagcttcttcccaggaccataggccactccagcctcagcttctcctggccccctccctgtgtctgttcctgtccccgagcctctggcctctgatgccttcaggagcttgggcctctcctgctccactcctaaacttcagcttctcagcaaacaggcctcccaagtccctgcttctccctctcaggccttgctaacctcaccagctctagggcctggccaggcctcccaggctccctcctccaccccaaccccttctcactcatggagcccttgggactggtcgtgcatgggaaagctgaacctttttccgcagcactccgaagccttgtcaacaacccgcgatacaggtgaggggtgggccctgcctgcgggtttttcttagctggctctgtgggccccaggactctaaggaggccctggtgagaagaggctgggaattagaacttggccatcctccctggtgaacttaggctatggggaggtcaaatgtggaacatggctactggtcactcagtgtctgtgagaccctgagggccagaggcaaggctggcggggtggagctgctgtgtgagctcaggcaaagcccttccttctttggactttggcccctggcagaagaaaatgattctcagcccctgggatccttagagatggtgggtcatgattcccctcctccctccactcactcagcttggtattgaggcctcactgctagaagaagaggaac

SEQ ID NO: 2186 - DNA, 4001 bp, Homo sapiens
aatataaaacgaatgtagtagtaatacatgctatacgacctggatgaatctgaaaaatgatgctaagggaaagaaggccacatattgcatgattccacttctctgaaaagtcctgactagacaaatctatatagacagaaagtagattagtggctgtctaggactgggaaggcggagagggaaatgaggagtgactgctaattgacgggagatttcttttgggggtgatggagatgttctaaaattagattgttgcgatggttgtactgtaaacacaccaaatatactgaaaacacttgaggtgcacacttaaaacaggtgaattttatggtatgtgaattatatctcaataaagctttaaaaaaatgtcactacgcattttcaagaacgtcagtatgagcacgcatttcttcattttagctttcccacctcacaaaccaccacccacacaaatgaggccgtccacagtcgccatcattctgtttccattgtatatgaggactcagtgttggtcagccccttcagcacatttagtttgctaaaccaaaagatttccgttcagtaaactaagtttaaatttctttttttaaaccagaaaggtgtttttttgtttgtttgttttttgtctttttgagacggagtctcgctctgtcgcccaggctggagtgcagtgacttgatctcagctcactgcaacctgcgcctcccgggttcaagcgattctcctgcctcagcctcctgagtagctgcaaccataggcgcgcaccaccacgcccggctaatttttgtatttttagtagagaccaggtttcaccatgttggccaggctggtctcgaactcttgatctcaggtgatctgcccgcctcggcctcccaaagtgctgggattacagtcgtgagccaccgcgcccggcctcagaaagcttttaaagggcttcgaagggagggaggaatggcagaggcgtcttttcccttaaagtggccacagttctgcacacggcactccccgcccgcacaaatccagactaggagggccgctcccaaccggcgcgagcgagcgacggccccgcgggaacagcgacccctttcccccatcagtcgggacgagggcgtttcccatggctgcctgccgacgcccctccctcccaaccctcgcctggcatcccgggacctggggccgacaagccatacctcgtctcgcgggccacgcgcgtgcacctgcgatcgcgacgcccagccttcgcgccttctccctccgcgctccgccccctctgagcccgggggcacggggcggggcttgccggcagccaatccccggcggccacggcgggaagagcctcgcgctgcccaggaccgtgtgccaccgaagagtaacggaactagcgcaggagctggcgaccgttgtccctgcgcccggacctcgggccgcaacctctgccctaccgccaaaaataacgtctgcagaaagagtggagtagagcggagtgggtgggcgaggggcttccttcccgggggtgagcggcgcacgtgacactcctgggcgcgtgtgaaggcagcgcccggccgagaccggctcggtgcagacgcgggctgtcggcggcagaagggggctctctgctcagtggggcgcggccgatccgcacgtgcggccgccgcccctttctccagagctcgcagcccgacccgcctctgccatggcgctcaccccgccgcccccagctctgggcaggaggtggcggggctgggaggcgccagccgcggaggggaggggcgcgcggagttgatgggccgctcgccgtccgtccaccgtctgtcgctgcgccggggatactcccgccgcctccgctcggtcctctctggtccctgggagcgtgggctgggccgcagggggcttccgtgggcctggcctctcccaccgcaggaggaaagagcagggggaagcccccggcgcccgccgcctccgagagccacggtgtcctcgggccgggcaggcgttgaagacgagcccgggcggggccccccgcgcgtcgtgcctgtcgcctgccgtgtccggagcagaggctagcgcccgcccgctcggcgccccgagccgtgagaaccccaccctgccgggcgtgggcgacggccggccgggggcgcacggagcagccgtcgcggggcctcgccgcggcctccagcgccccagtcacggggaatgcagtggtccccgacccctggcgcctctgcgtgtctgggctgggcttcctcgctcgcctgctccacggccccgacgctcctgggccgagccggccggggccccctcatggcggccaagtggttcaaggagttccccctgaacctgaagaccgtgtcggagcgggccaagcccgggggcggcggcggcaaattgcgcaagaactcggaggcgggcggcgctgggccgggtcctggcaagggccgcaagaactcggcggccgagctggggagcggcagggccggcgtcggccccaaggacagccggctgtcccgcgacagcctgcagggtctgattcaggccgccgcgggcaagggccgcaaaaactcccgggccacggaggaggagccccaccggggtgcaaccaagagctcgggctgcagcacctacatcaacaggctcatcaaggtggacactcaggagaagaacgggaagagcaactaccccagcagcagtagctccagctccagctcctcttcctccgcgtcctcttccccttcctccctggggcccgagctggacaagggcaagattattaagcagcaagagacggtaagaatacagcctcccttggaccacctctcagtcgaaggggagccctgggcgcctgctaagccctaggcttctttagacctaagaggcagtgaggataggtttcctaaggtcctttctccctccaccatttgggaattcctgaccatttaaaattcttagactgttttttaattcttgaaaaactcttattttagaggtggggagttttgcagaaatgtactagccattgaattttgttagcagtttagaagagtcgttgaatgagatattcctgtttggttacatttgacccctttatagatgtggttcattttaattttgatattcaggggaattgcaaagctaggcttgtgtatgacttttatgcttcttgagcataaggaatggtaacctctcaagtgtgtagatatgcatttcaaagcttcaggaaatggtttaaccaacagtcttctccactgatttggaagttccatcattttctgcggttccaccgagtaaagggctcctcggaggttcagcaaatctccaagactgctgccctttcattcattccatgggcatttgttgcgcagcagccatatgaggaaaggagcacagggcattaagggctgtggaggatacagaatatgacaaggaaatgctctcaaggaaattacagatgagaagagagggtgtttcctgcgacggacacactggaggttttctgggtgctgtccaatgtggaaaagttaagaaaaggagtgtgaacataggaagggactccctccattcttgctgagatgagttggtccgatctggttgtttttatcttctctccgatgtgaaagggggagagagaagagctcaaatcgagatttcagactccggtccaggcaatcacttcctaacatgcatgggagctttaattttctcttgcccaggcttcaaacatgctacctccctggttgaagtcaagagcccataacacatgctgtgtatgtctgcattgggcacttctgttcattcttccattcattttttcatgctgtaaatacagcatgcccaccctgagccaggcactgagtggagagctgtgtaaagatggacggggacccagctcatatgttattcagtggtccacctgactgtgtgactagatcacaagcaccttgaagccaagggctcactgtatcttgcaaatgcggtacacatggtgggtagtcaagaaaaatgga

SEQ ID NO: 2187 - DNA, 4001 bp, Homo sapiens
aaaaccaaacaaagagaaaatcctgaaagcatcagagggaaaaaacacattatgtacagaacaaagataagaattattacagacattgtcagaaactacgaagacaaaaaaatggaataacatctctgaagcactaaaagggggcaaaaactatcacaccagatagaattctatacctggaaaaataatatttcaaaatgaaaatgacaaatagactttttcagatgaataaaagctaagaatatacaccactagcagatttatcttacaggatatgttaaaattttccaagcagaaagaaaattatactggagagaaatttaaacagaaagaattggagagcatcagaaataagtgtaagtaaacaagtttttttcatttttaatctcttaaaatttgacttttatgtttttaatattttagtattaaaataaatatttctatttaccttaaacattttctaagcaaaaataacaatgtattaagaggtatataaaatgagaactaaaatgtatcacaataagagcacaaaggatggaagaggggaaatgtaaatttactgtcccgaggttcttacattttatatgaaatgttataatattatatgcaggtcaattgtgataagttaaaaatataggttgaaaaccctaaggcatccactaaaaatataaaacagaaaaatatagataataaaaaagataaagtggaatcctaaaaaaaacacttaaccaggtacaaggcaaagagtgttccctcccactgctttgcaacatcttgctggagtcctagcaaatgcagtaagtcaagaaaaggaaatgaaacaaacagactgggaaggaagaaataaaactgtcctttattcacagatcacatcatctatgtagaaaataggacagaattttttaaaaactcctggaactaattagcaattatagcaaggttgcaggatgcaaggttaatgtacaaaagtcaatcattttcctatattccagtaataagtgaaatttgaaatttaaaaaatactatttacattagcactcccccaaatataatacttaagtataaatctaaaaaaatatgtacaagatctgtatgaggaatactacaaaactctgatgaaagatatcaaagaagaaataaacggataattattccatgttcatggatagaaaaactcaatattgtccagatgttagctcttcccaacttgatttatagattctattcaatcccaaacaaaatctcagcaagtaattttgtgaatatcaacaaactgattctgaagtttatataggaggcaaaagatccagaatagccaacaaaatattgaagaataaagccagaggattgacactacccaacttcaagacttattgaaaaagctacagtaaccaaatagtgtggtactggtgaaagaacaaatagaccagtggaacagactagagaacctagacatagactcacataaatacagtgaactgatctttgataaaggagcaaaagcaaccaatgaatcaaacatagtcttttcacaaatggtactagaattgaacatccacttgcaaaaaaacccacaaaaacgaccccacacacacatatctagaccttacacccttcacaaacattaacttaaaatggatcatagacctaaatgtgaaattcaaaactataaaactctttgaagataacataagataacactagctgactttggataaggcgatgagtttctagaaacaacaccaaaggcacaatacatgaaagaaataattgattgcctggtcttaagattaaaaactacttctctgtaagacaagtcaaaagattgagaaataagccacagaatagaagaaaatatttgcaagacacatctgataaaagactattattaaaaacaaaacaaaacaaagaactcttaaaactcagcaataagaaacaatccaatttttaaaaaatgggcaaaatacctgaacagacctctcactaaagaagatataccagatggcaagtaagcatatgaaaagatgttcaatatcatgtcatgaggggatttcaaattaaaacagcaataaaatatcactatacagtattagaatggccaaaatctaaaacactagcaacaccaaatgctgaccagcaatggggaacaacagaaacattcactcatcactggtgagaatgcaaaatggtaccaccactttggaaggcagtttagcagtttcctataaaaacaaacatatctttatctgacaatttagcaactgtactccttagtatttacccaaatgaattgaaaactgctatccacacaaaaaacccacacacgtttatagcaactttatgaggaaacaagcaagacgtccttcagtacaagtggataaactgtggtaccagacaatggaatattactcagtgccaagaagaaatgcattataaagccatgaaaagacataaaggaaccttaaatgcatattactaagtgaaagaacccaatctgaaaggctacatgctgtagaagtccaactatatgactctctggaaaaagcaaaactatagtgacagtaaaaagatcagtggttaccatgggattaagagacgagacagatgaacaggcgcaagcacagaggacttttaggggagtgcaactattcagtatgacactacaatagtggatatatgtcattacatatttgtcaaaacctgcagaatgtacaacaccaagagcaaaccctcctaccccccacctcctcctgaacaggtgctggtattcacggctgagagacctcattgttgcaagatgaatgcaacaaatagcaggattaatgcaatagtacctcacatctcaaaactaacatcgaatgcaaatggcctaaatgctccacttaaaagatacagaactgcagaatggataagaattccacaaccaactatctgctgccttcaggagactcacctaacacataaggactcacataacttaaagtaaaggggtggaaaaggcatttcatgcaaatggacaccaaaagcaagcaagggtaagtattcttatatcagacaaaacaaactttaaagcaacagcagttaaaagagacaaagagggacattatataatggtaaagggccttgtccaacaggaaaatatcacaatcctaaacatatatgcacctaacactggagctcccaaatttataaaacaattactaatagacctaagaaatgagatagacagcaacacaataatagtggaggacctcaatactccactgacagcagtagacaggtcatcaagacagaaagttaaagacacaatggatttaaactatacctaggaacaaatggacttaacagatatatacagaacatttcatccaacaactgcagaatacacattttatttaacagggcatggaactttctccaagatagaccatataataggccataaaacgagcctcaatacatttaagaaaattgaaattatatcaagcactttttcagacaacagaggaataaaactggaaatcaactccaaaaggaaccttaaaaaccatgcaaatacatggaaaattacctgctcctgaatgatcattgggtcaaaaatgaaatcaagatggaaattaaaaaattcttcaaactcaatgacaataatgacacggtctatcaaaaactctgggatacagcaaaggtggtgctaagaggaaacttcatagccctaaacgcctacatcaaaaaggctgaaagagcacaaactgacattctaaggtcatacctcaaggaactagagaaacaaaaacaaaccaaacccaaacccagcagaagaaaggaaataaccaagatcagagcagaactaaatgaaattaacaacaacaaaaaaatacaaaagatacatgaagcaaaaagctggttctttgaaaagataaataaaattaatagaccattagaaaaataaaccaagaagagaagagagaaaatccaaataacctcatcaagaaatgaaacag

SEQ ID NO: 2188 - DNA, 4001 bp, Homo sapiens
ggaagaataggggcaacccttcctcggtaaggtactcgccgatgagatctcggtccagaataaatactaggtcttcccttatgcattgagtttcgaagcttatggctgctcctctgttttgcaactaagcttgctattcctttggtagattcatctggaatggctgagacgtgaaaaatagaaatcatatttaggaggaaaacttactcccttctttatccttagtatctgtgtttatacagtttttaactctccaaggagctgtttatccaggcagcacgataaacagtaactcttggttcctcgatttcttgcattttgggcaacagcttgctagctctcctgccagctgaagaaaagttaactcaatgtattatcattacaactaattgacccctgacagattttttgaaactcttgggatgaactgcaaacttccctacaatagttttttcttgtgcttcacgaaatttaaaacatgtttttataattaagaagtcctttttttgtttctctcgacttaaggtgcaagaacctgaaatcatatgtaaaaatgtagcttttgtgagtgcacgattgtttgggggaatggtttgttaattttgcagaggttccaattttgcccacaacctcaaaagcacctatgagtctccctcccccaccaaattaaaatccactggctgggatgcataataactgcagaactagaataattatttactaagcaattgtttttattacaaagtttatagaccttcaaaaatcttaaacctacctttcagtattacagtaccacctgcaccggggcagacacgaacaacatcaggcatgtccaataccagctccatagtggaccgatacccaaggattcggagtggtagatggttgccaaccatcaaaaggtactccttctccaactcctgtgggctcaaaccatctttggtggaaatgagaagtgaccttatttccttccgcagacattcctgtatacgctcttgttcagacattgtgccctacaggactgaagacagaaacgcagctgaggaaaagggggcaaacccacgaaaaaagatttaaaaaaaaaccaatagtgggatacaaataactgagactccagttttaagggtaataaggcagaagtagtagtatgagggtgccctgcggcttgcgcgtggccgggcgattcaagccctgaatctccacctgcgttgattaagctacaggtgtcaagaactctgcccctggccatgcggaggcgttaactggggttcctgtcgggtgttggactccaacgcaaacttcccatccgaagccttcaggggctcctcgggaaccaggactaggaactaaggccaacgcaatgccgcctccgccctgcagggcgagggccccacgaaaaaaggcgctcccgccgcacacctctggcaccccaagccgagggggcgctccccgctccctcttacctgaaggtaccaccaatcttcgcccgccccctacctggtctagggttggggtccctgccccacccccaacgtctctcggtgaccctcacgggagcggggcgtggcccttccacctgccctggcggctctctgcaacctgaggtggaaaggaaggcaggaggcgccaggtgaggcgcccttctcggcccggcaccgccctgctgccagtcacccgtcttgcccccaccgcgccctgacgccagcgctgctggtgcgggccgagtagagattagggggccctctccgaatcggcgcaggaaggtagctgcgacggcggccccgcgcgcctgcgcaccagcgccccctgaccagcaggcctctcccggggcgccgcgttccagccccgagggcacgtggcaggtgggacggttgggcaggattagccgctccggggtcaggtgtgaggtccgccccagtctcaggagccgctgggcccggctgcagaggctggccgccttccaggatcccaggcgcctacgtcctccgacgcggtgggaagacgcgaggtggggctgcagcccttgaaccaatccaaccacctccagagctagggccgggcctgacgcagggaggggaagcgggccgcgtgggcctcagaatcacctgtggggctatgtaagaggcgaaaaggatgcacaggtctgataagcagagattctcattcaataggtctgggtttatttgaggaaaatcacagacagaaaattctgattcttggctgagaatccctgcagagctaaaggcaactctggctccctgatgaaggaatgggtggggctaggagacctttttaaatgagcggacaacattctaggtgccactagagatttatttggatgtatagttggtttggtagaatgagccagatttataaagtccttgaaaaccagaaaacagtagtttaagagatatagaatagggaggggcattgtataatataaagacttgtaccttaaaatgtacagtctaattaaagaaacaagacaaaccaaaataaccaaagaatttgaatcaacaaagaggcttaagcacacacaatgaccttatcttccttcttttttttttcttataaaatgtaaggtttaatatatgacagcaaggagcaccccggaggctgccagcgcatgtgacttcgtgtttctgtgctacatgagactagtgtcctcatcttccatcgtgacaacccttctctctcccccaaccctctcccccgcccacagtgccaacaggctctgggcaaagctgccccgttttcttttaacctaagggatgccatggtttggctgactatgtttgactaccaccactgaaggcagctgatgtctcaagcagctggatactgtggcgatgggaatcagacgaggtactagcatggagggcgggggtgcagggtcaaggtcgtctgggttctcaggagccagtctgtgccacagaaccatcggcagctgccttcgtaaggcacctcggtctggcattcggaaaaccaccctgtcttgccagagccccttggtcttggttagcaaaaactgtatctgatctaaatcatgctttcaatcagaagaaatcacattccttcttttccctttctaatatattccaatgtgtctattttttctcaattttaacaagcaaattgtaccaccatcttattctgagatgctcctttttaaaagctgtagatcacattaatggaagtgtttactgctgggaatattttccatgtacaatgatttgtaaccctcttatctcaactagttgcacattattagttcacatccagttcaatttataaattaagaaaggtgccttttgtctgtacaaaaatcaatgcatatttatgaacttcttttattcaaatatattttcacacatcttatctaaatacataaaatgcagaagtccgtgtgagtttggcagtgtggcccaggagggcctgagactaacacatccaccttggcaaaaggacagacaatgtctcttatggttggaaaaaatagccttttgtgtgtttatttggtttacaaaatatactcaaaatgctattattagctgaatttgtgatttccttttgaatttctgagttattcttatttatttttcccattttgtttttgcaccaaggagaccgcagtcaaaaagaaagttactcagcaactgatttcctctctttggactgaaaaattaaacagatactaaattatgacagtgaatttagaaaggagggctccaagggcttgaaagaacatatctgggatgatatgatgcttctaagagtactgcaatcacattgtggcgatcaccggagcatgccgcataactacctccttggctaatctgctgtcttcttggtgatgactaatcctcttctattaaacagcagtaatgctggaagaactcaactgtacaagtgtaatgaagccagtattctccctggacagattagctacaactgacttgacacataccatcataagggcttcaaacctgacaaactctgtg

SEQ ID NO: 2189 - DNA, 4001 bp, Homo sapiens
ggggcaacccttcctcggtaaggtactcgccgatgagatctcggtccagaataaatactaggtcttcccttatgcattgagtttcgaagcttatggctgctcctctgttttgcaactaagcttgctattcctttggtagattcatctggaatggctgagacgtgaaaaatagaaatcatatttaggaggaaaacttactcccttctttatccttagtatctgtgtttatacagtttttaactctccaaggagctgtttatccaggcagcacgataaacagtaactcttggttcctcgatttcttgcattttgggcaacagcttgctagctctcctgccagctgaagaaaagttaactcaatgtattatcattacaactaattgacccctgacagattttttgaaactcttgggatgaactgcaaacttccctacaatagttttttcttgtgcttcacgaaatttaaaacatgtttttataattaagaagtcctttttttgtttctctcgacttaaggtgcaagaacctgaaatcatatgtaaaaatgtagcttttgtgagtgcacgattgtttgggggaatggtttgttaattttgcagaggttccaattttgcccacaacctcaaaagcacctatgagtctccctcccccaccaaattaaaatccactggctgggatgcataataactgcagaactagaataattatttactaagcaattgtttttattacaaagtttatagaccttcaaaaatcttaaacctacctttcagtattacagtaccacctgcaccggggcagacacgaacaacatcaggcatgtccaataccagctccatagtggaccgatacccaaggattcggagtggtagatggttgccaaccatcaaaaggtactccttctccaactcctgtgggctcaaaccatctttggtggaaatgagaagtgaccttatttccttccgcagacattcctgtatacgctcttgttcagacattgtgccctacaggactgaagacagaaacgcagctgaggaaaagggggcaaacccacgaaaaaagatttaaaaaaaaaccaatagtgggatacaaataactgagactccagttttaagggtaataaggcagaagtagtagtatgagggtgccctgcggcttgcgcgtggccgggcgattcaagccctgaatctccacctgcgttgattaagctacaggtgtcaagaactctgcccctggccatgcggaggcgttaactggggttcctgtcgggtgttggactccaacgcaaacttcccatccgaagccttcaggggctcctcgggaaccaggactaggaactaaggccaacgcaatgccgcctccgccctgcagggcgagggccccacgaaaaaaggcgctcccgccgcacacctctggcaccccaagccgagggggcgctccccgctccctcttacctgaaggtaccaccaatcttcgcccgccccctacctggtctagggttggggtccctgccccacccccaacgtctctcggtgaccctcacgggagcggggcgtggcccttccacctgccctggcggctctctgcaacctgaggtggaaaggaaggcaggaggcgccaggtgaggcgcccttctcggcccggcaccgccctgctgccagtcacccgtcttgcccccaccgcgccctgacgccagcgctgctggtgcgggccgagtagagattagggggccctctccgaatcggcgcaggaaggtagctgcgacggcggccccgcgcgcctgcgcaccagcgccccctgaccagcaggcctctcccggggcgccgcgttccagccccgagggcacgtggcaggtgggacggttgggcaggattagccgctccggggtcaggtgtgaggtccgccccagtctcaggagccgctgggcccggctgcagaggctggccgccttccaggatcccaggcgcctacgtcctccgacgcggtgggaagacgcgaggtggggctgcagcccttgaaccaatccaaccacctccagagctagggccgggcctgacgcagggaggggaagcgggccgcgtgggcctcagaatcacctgtggggctatgtaagaggcgaaaaggatgcacaggtctgataagcagagattctcattcaataggtctgggtttatttgaggaaaatcacagacagaaaattctgattcttggctgagaatccctgcagagctaaaggcaactctggctccctgatgaaggaatgggtggggctaggagacctttttaaatgagcggacaacattctaggtgccactagagatttatttggatgtatagttggtttggtagaatgagccagatttataaagtccttgaaaaccagaaaacagtagtttaagagatatagaatagggaggggcattgtataatataaagacttgtaccttaaaatgtacagtctaattaaagaaacaagacaaaccaaaataaccaaagaatttgaatcaacaaagaggcttaagcacacacaatgaccttatcttccttcttttttttttcttataaaatgtaaggtttaatatatgacagcaaggagcaccccggaggctgccagcgcatgtgacttcgtgtttctgtgctacatgagactagtgtcctcatcttccatcgtgacaacccttctctctcccccaaccctctcccccgcccacagtgccaacaggctctgggcaaagctgccccgttttcttttaacctaagggatgccatggtttggctgactatgtttgactaccaccactgaaggcagctgatgtctcaagcagctggatactgtggcgatgggaatcagacgaggtactagcatggagggcgggggtgcagggtcaaggtcgtctgggttctcaggagccagtctgtgccacagaaccatcggcagctgccttcgtaaggcacctcggtctggcattcggaaaaccaccctgtcttgccagagccccttggtcttggttagcaaaaactgtatctgatctaaatcatgctttcaatcagaagaaatcacattccttcttttccctttctaatatattccaatgtgtctattttttctcaattttaacaagcaaattgtaccaccatcttattctgagatgctcctttttaaaagctgtagatcacattaatggaagtgtttactgctgggaatattttccatgtacaatgatttgtaaccctcttatctcaactagttgcacattattagttcacatccagttcaatttataaattaagaaaggtgccttttgtctgtacaaaaatcaatgcatatttatgaacttcttttattcaaatatattttcacacatcttatctaaatacataaaatgcagaagtccgtgtgagtttggcagtgtggcccaggagggcctgagactaacacatccaccttggcaaaaggacagacaatgtctcttatggttggaaaaaatagccttttgtgtgtttatttggtttacaaaatatactcaaaatgctattattagctgaatttgtgatttccttttgaatttctgagttattcttatttatttttcccattttgtttttgcaccaaggagaccgcagtcaaaaagaaagttactcagcaactgatttcctctctttggactgaaaaattaaacagatactaaattatgacagtgaatttagaaaggagggctccaagggcttgaaagaacatatctgggatgatatgatgcttctaagagtactgcaatcacattgtggcgatcaccggagcatgccgcataactacctccttggctaatctgctgtcttcttggtgatgactaatcctcttctattaaacagcagtaatgctggaagaactcaactgtacaagtgtaatgaagccagtattctccctggacagattagctacaactgacttgacacataccatcataagggcttcaaacctgacaaactctgtgcttgcttct

SEQ ID NO: 2190 - DNA, 4001 bp, Homo sapiens
tctcggcttttcctctgttacactcttctttagcatcaacaaagaacctgctctggtctgctctacagaaatgacatctgaagccgcattaagcacttcaaacatagagagaaatccatattgcatgtattggaatgatcgtccaaatcttttggcaaatgccttttcaaaatcagaaagaagaacaggagataacgccaacaggtccttcaactcactcttcacaacagctggaagaataggggcaacccttcctcggtaaggtactcgccgatgagatctcggtccagaataaatactaggtcttcccttatgcattgagtttcgaagcttatggctgctcctctgttttgcaactaagcttgctattcctttggtagattcatctggaatggctgagacgtgaaaaatagaaatcatatttaggaggaaaacttactcccttctttatccttagtatctgtgtttatacagtttttaactctccaaggagctgtttatccaggcagcacgataaacagtaactcttggttcctcgatttcttgcattttgggcaacagcttgctagctctcctgccagctgaagaaaagttaactcaatgtattatcattacaactaattgacccctgacagattttttgaaactcttgggatgaactgcaaacttccctacaatagttttttcttgtgcttcacgaaatttaaaacatgtttttataattaagaagtcctttttttgtttctctcgacttaaggtgcaagaacctgaaatcatatgtaaaaatgtagcttttgtgagtgcacgattgtttgggggaatggtttgttaattttgcagaggttccaattttgcccacaacctcaaaagcacctatgagtctccctcccccaccaaattaaaatccactggctgggatgcataataactgcagaactagaataattatttactaagcaattgtttttattacaaagtttatagaccttcaaaaatcttaaacctacctttcagtattacagtaccacctgcaccggggcagacacgaacaacatcaggcatgtccaataccagctccatagtggaccgatacccaaggattcggagtggtagatggttgccaaccatcaaaaggtactccttctccaactcctgtgggctcaaaccatctttggtggaaatgagaagtgaccttatttccttccgcagacattcctgtatacgctcttgttcagacattgtgccctacaggactgaagacagaaacgcagctgaggaaaagggggcaaacccacgaaaaaagatttaaaaaaaaaccaatagtgggatacaaataactgagactccagttttaagggtaataaggcagaagtagtagtatgagggtgccctgcggcttgcgcgtggccgggcgattcaagccctgaatctccacctgcgttgattaagctacaggtgtcaagaactctgcccctggccatgcggaggcgttaactggggttcctgtcgggtgttggactccaacgcaaacttcccatccgaagccttcaggggctcctcgggaaccaggactaggaactaaggccaacgcaatgccgcctccgccctgcagggcgagggccccacgaaaaaaggcgctcccgccgcacacctctggcaccccaagccgagggggcgctccccgctccctcttacctgaaggtaccaccaatcttcgcccgccccctacctggtctagggttggggtccctgccccacccccaacgtctctcggtgaccctcacgggagcggggcgtggcccttccacctgccctggcggctctctgcaacctgaggtggaaaggaaggcaggaggcgccaggtgaggcgcccttctcggcccggcaccgccctgctgccagtcacccgtcttgcccccaccgcgccctgacgccagcgctgctggtgcgggccgagtagagattagggggccctctccgaatcggcgcaggaaggtagctgcgacggcggccccgcgcgcctgcgcaccagcgccccctgaccagcaggcctctcccggggcgccgcgttccagccccgagggcacgtggcaggtgggacggttgggcaggattagccgctccggggtcaggtgtgaggtccgccccagtctcaggagccgctgggcccggctgcagaggctggccgccttccaggatcccaggcgcctacgtcctccgacgcggtgggaagacgcgaggtggggctgcagcccttgaaccaatccaaccacctccagagctagggccgggcctgacgcagggaggggaagcgggccgcgtgggcctcagaatcacctgtggggctatgtaagaggcgaaaaggatgcacaggtctgataagcagagattctcattcaataggtctgggtttatttgaggaaaatcacagacagaaaattctgattcttggctgagaatccctgcagagctaaaggcaactctggctccctgatgaaggaatgggtggggctaggagacctttttaaatgagcggacaacattctaggtgccactagagatttatttggatgtatagttggtttggtagaatgagccagatttataaagtccttgaaaaccagaaaacagtagtttaagagatatagaatagggaggggcattgtataatataaagacttgtaccttaaaatgtacagtctaattaaagaaacaagacaaaccaaaataaccaaagaatttgaatcaacaaagaggcttaagcacacacaatgaccttatcttccttcttttttttttcttataaaatgtaaggtttaatatatgacagcaaggagcaccccggaggctgccagcgcatgtgacttcgtgtttctgtgctacatgagactagtgtcctcatcttccatcgtgacaacccttctctctcccccaaccctctcccccgcccacagtgccaacaggctctgggcaaagctgccccgttttcttttaacctaagggatgccatggtttggctgactatgtttgactaccaccactgaaggcagctgatgtctcaagcagctggatactgtggcgatgggaatcagacgaggtactagcatggagggcgggggtgcagggtcaaggtcgtctgggttctcaggagccagtctgtgccacagaaccatcggcagctgccttcgtaaggcacctcggtctggcattcggaaaaccaccctgtcttgccagagccccttggtcttggttagcaaaaactgtatctgatctaaatcatgctttcaatcagaagaaatcacattccttcttttccctttctaatatattccaatgtgtctattttttctcaattttaacaagcaaattgtaccaccatcttattctgagatgctcctttttaaaagctgtagatcacattaatggaagtgtttactgctgggaatattttccatgtacaatgatttgtaaccctcttatctcaactagttgcacattattagttcacatccagttcaatttataaattaagaaaggtgccttttgtctgtacaaaaatcaatgcatatttatgaacttcttttattcaaatatattttcacacatcttatctaaatacataaaatgcagaagtccgtgtgagtttggcagtgtggcccaggagggcctgagactaacacatccaccttggcaaaaggacagacaatgtctcttatggttggaaaaaatagccttttgtgtgtttatttggtttacaaaatatactcaaaatgctattattagctgaatttgtgatttccttttgaatttctgagttattcttatttatttttcccattttgtttttgcaccaaggagaccgcagtcaaaaagaaagttactcagcaactgatttcctctctttggactgaaaaattaaacagatactaaattatgacagtgaatttagaaaggagggctccaagggcttgaaagaacatatctgggatgatatgatgctt

SEQ ID NO: 2191 - DNA, 4001 bp, Homo sapiens
gggcatagaaatcacaagattttataactagaagggactacagaacttatttgattccattaataacgttgcaatttgggaaactgcggctaagggatagaaaaggattgatctaagatcacacagctcattagtcatttctacacaatacagtgtgcaatagaaataagtctgttttgatggccagtcataatcacacctctttacagaggcccaaaggactagcagcacttttgttttccagttctgacactatcaagatcaagtgcagaggggtctctgcagccaaggcccctcaatctcgaccccctacactgggttgaattacattgctatgggtttccacagaatccccaatatcccttgataacacatgccatgcttgtcattcttgattaacatctgtgtccgtggtgaggagaatgaattgaaggcagcaaccgtggctgcaggagaccaatcagggcctagtccaggtgtcaatgatggagatggagaacagatgaattggagagtttgttgttgtttatttagagacagagccttggtctgtcacccaggatggaatgcagtgaatgataatagctcactgcagccttgaactcccgcagtcgtccggcgtagctgagattataggtgcggttttggccgacttctatttgaagcaaaaggtaaatttcactaactcctcttcaaacattacaaatgaatttgtgctaattgagttatcagctgatgtctcaaaaaatgagactctacttgatctgtcactatggttttgttcacaattttcatatcctttcagctataagtttctcttaaagagaaatggaaaataatataatgtaaacggggataactgcatagtactgactgctagcttgtgtttgattttattacttaaaaattgaatgggaaggaggaaaatactagaacttaagaccacagtttctaggggaagctaagaagagaagatgaggatcattgttcagtgaggaatgtggttagataatggttttcagtgaaagctaactttgaaatttcctgacatttgtattgaacaattgccaaaaactatctgatatgcatcgctaaggcttactttatcatttaaaatgacaggagtcaaataggatgtgatgagaagtcaaatcacattgttagctccatgaaagcatagataactcattccagtatctcctaataaccagaacctacaaagaacctacaacatggtgacatgcttgaatcgaagcagctcaatgttctcatccttggtacgtttattttaaattcacgagaaaaaaaaaagtgtcaacccctttctctcaaaacaaggaaagggtctaaaagtcagtctttgaaataggggtctccagccaacccccacgatgatacctggattaaggaatgagggatactggaaaaacaaaaaccccaatgtattattctgacgactgtaaacagccatcctattagcgataactaaagaaaaagctggggaaagttaaaggcaaagtgatatacggatggcagctctcagtctcaaaaaggcccagtggaagagtctgaactgactcagggcaaacacaaacgctcccgcaccgggtccgttgtggcgtaagcgggtgactggagcatcttcctcagatacagttacgagttcccagtgggtcaagttgcccccgagcggcgtctcacagcccagggctctgactcccccgctgcgccccacatccttccctcgccccggggcacgccagacccctcccttccctcgctcccgcatttccgtctcctagtggccagggctgcccatgaccctgtctttcccactccccaaaccttcggtctccatcctcgcctttaccgctgctccagtcagccgtcgagtgcgccgcctcgcgcctcaccccagctgcagccaccagcgccgccgcctcccactcacaccaccacagtgagccccgccggcggcgcttcagccgccacttccccgcccccgcagcccgacagcaccaatcaacaccctgctcgcagtccgaccaatcgccttctcccgtcacaaccaatccttccgcgggctgcccctgagcgacgtggctgctgctagccgctgcccaattacccggatggaatccaaagcaggcccaccctgtcagccaataagatccaggaaaagcagatgttgttaactgagaccgcacctgctgagaattaaacagccaattacaagcttcccggcgtcctcgcagaccacctctaggccaattaccgaggagttttctatcttctaacccttggaggaaaatctgcgctccagcagctgggaccgaggcatgagagcgttgaatcatgagtggcaccgttcgcaaaaattggtgtctttgtacaaagacagtgccacaacacaactcagtgaccatcgggagagcagcctcatgatgggcgatgctccatcagttttctcttgcgatcttttgcatagatcggtcccgccccgcatatggcgatgaggactcaagagacacggaaaacgttttctttctggaaaacatgaaataggctttgtagatggacaggaagtcaagggacaagcggtgcgccgcagagagcgaggacccactcttctattcctttgcggaggcacggacacacggtgtggcccgaaacagcggcaggagagtgagacccgggctccgaccgcggtggtaagggggcggcgggccataggggcgccaggggcccacccttccctggggattcgaggaaacgggtcgaggcgacagcgtgaaggcctacgccgggggagggggtggtggcggggggcgtttctgtgggggcgaggaagggagcgggtctccgcaggcggaagtttgctttggaagattttattccagacgctgtcctggtccctggacggttaggaacggttgggtcctgctactgcctccgtggggcagggagcctcgcgagaccagcactgcgccctactcggtccaccctgtccccgctccgcgctaggggctcaccctgggaacaggggtcgggcgatcctggtcattgggggatcttccgcactagcttccatcacaatacctggcaggtgatgagcaataaatatttgctgaaagaacgcaaggttgtatcttttgtcaattaggcagatgcctttgggcctcaggttttgctttctattaatataaaaatgtgtatgcgttttgaataagtaatacatttacattctacaaaattcagaagaaacaaggttattatagtgaataaattttccttccttcaaggcaactagggttaccagtttcttgtgaaaaatttcacaagatattctatagttaacgtgtgtatatgtgtaatatataaagtgtatatatatatacacacacatatatttttttaacccagttgataacatacatactattttgcaactttctttgatacagtctggaaatgtttccgtagcagcatatacgtatctgcctcatagtgatagtttcatagtatgcctgagggatatatgaagatatatttaaccagtcctttaacatttgattgatatgcaaggatacttcatttccctcttgcatatgtgtatgataaatacttagaaatgcaagtgccaagttaaagaaatgtgtgcattgttttttcatttggatagataaaattttgtaaattcccttcctcccacaaagatttttataattttaatcccaccagcaatttttgaaaatgattttagttagtattaccaaattgccttccctggaaattttaccaattttgtctcctgtcagcaatgtatgaaaagaacctgtttgatagcacactggtgctgttaaacttcctgatttttgacaatctgatagtgtaaatgctatctcattgcaagataaaatttcattgctcttataagtaaagttgagcatcttttaatatatttaaatggcaatttttttgtaaattctctgtttttatat

SEQ ID NO: 2192 - DNA, 4001 bp, Homo sapiens
ggtaaatatgtgactgtaggatgactggctgtgatttgcaaggaaaagaaatttgcaaagacccaagaatggtatctgctaaattgcatgtgcaagggtggtcatggtgaaaaggaaagtttgggctagaataagagtaataaaatgagaagtcagggaagtaccaagcatttgaatgctataaaaatgctatagcagttgaattctatacaaatttaaattatggaaatttgaaatgttattaagtatttaaaaagtctcactttatatgtaaagtttgaaatgaagccaattcttgaaagctgcggagagagaaggaggcaaagcgagcataatttcagcctgtatgaattaattataaattctatcatgctatttccacatggtggcaccactttggtgagcacgtaaagtacccacttttctttatcaagatgagatttgaatgggtccagttttgagttgtgagaagtctttattccctcaggtaaaaggcaatcccttgtgcctgatgacgctaatgacagcataactgctagactctgttctcctcccttcacagctcttccttttgttgcattctcttcccccagtggcttttcttgcacactaagaagaagtgttctcctcgtccttttccctccctcccgcaaatcccatcagcgtctctttctcaatccctctccccttatcttctcagtaattagaggctcagggacagaaaatgcaccagcacgggcatggtggcaggctcctgtaattgcagctactcgggaggctgaggcaggagaatcgcttgaactcgggaggcggaggttgcactgagctgagattgtgccattgcactccaggctgggcaacagagcgagactctgtctcaaaaaaaaaaaaaaagaaaagagaagaaaagaaaatgaaccagcagacgggaccaactgctagccttcaaggccattacctttaccaaggagggtaccatgctcgtggctgaggagccaacaggaggaagatgaggtggacgatgtgccagccactgtaggccctgtctcagggggagctctttggaaggaggagagcctggtcctctttctctgactgctccacttcctgtagcaacttgtagaggggtcctggagtgcttgcataatatggagcttctttgggcccagtcagcttcaagctgggtctgaaacaatgataccaaaaggaagagaagccatagattcccaacaggaatgaggcattgatcatcacatgccagcagaagaaggtggtgacaaacatgatgtcactgatgtcatcgtcctgccatgggtagccagagacgggtctgtatagaataaagcctgcctgcatcagccaggagcccatcatcagaatcagaaaggtctccatcagctggagatgacacatgttgggagcccacagctctgcagtcaacaccagcaacagcaggaacaccaccaagatgagcagagaataaacgtgcagctccaccccttctgaatctttaacatgtgacaccatcagcagcaggagctcgtagatgatcaggaccagggtacctttttctaggcccacacacctctgaggcagcacattcttgctcatgaagtccacacagccattaagagtgaggaggatgaacatggtgaggtgctgccactctttggggtacatgaaccttgatggcacttgcttcctcatgagcaccatcccgccatcaagacagagaaccacataaaatgttaagagggagccagtcactatctttagtaatcctccataggctattttccacagcctggcacatctttgcttattcctgggagagcacaaaggatacaggagacaacctttgagtatcatgcccttggagaccactgtggcctgatatagtccataagagaaaagaaatagccccagttaaaaatggccaatggactttcccatggaatacaggcctgtccgactgaagcgtgaagagcaatactcaggacctctctgctctcctctccctcacaggcctctcgagttctgggcctatatatacagagctaagttctacctacttttatcatctccttctgcccactgctctctcacagactggaaagttctggacaggagcctaggtttttagtgaggtgggtctcattgttccatttcattccagtacactgggaactaattgagttctgccaaagtagaaacataaatattttttagtatgcacctgtgggaatttgtgctctcaggagctctgcttttggacccttgaggaccttctggttacacttgtccctctctctcatggcttgcttccttctgcccctgttcaatgctcggagtagaaaaagagaggtgcctgagcacggagattatccagagaagacccgggttactcacaaaccttaatgcatcctttaagactccttactcggacaggcatggtggctcaagcctgtaatcccagcactttgggaggccaaggcagatctcgaggtcaggagttcgagatcagcctggccaacatggtgaaatcccatctccactaaaaatacaaaaactagctgggcatggtaaagagtgcctgtaatcccagccacttggaaggctgaggcaggagaattacttgaacccgggaggcggatgttgcagtgggccaggatcatctcactacactccagcctgggtgacagagcgagactgtctcaaaaaaaaaaaagactccttactcatatgttgggtcatatactgagagcaaatacattcttcctagacataaaagtttataaacgtttggatgtgtgctcatatatatagatactgagctcttgtcctcttcattcttctgtaacagtttttggggatcacaaagaaagcagctcaattgccccaaattatctttccaaagaacagtagatgaatgtaaaatgtcaccttttgagatcaattttggaatgttaaggtataattttttattaaaatgcagatatgttgagataagtagatccaacaaactgcttatattttaatgtgaattaggtcctcaactttattctctctttaattatcatttactatgtgtctaacacatataggcagaaagagttctaagcactaggtagcagccagctgcatatgaggggttgcatccaaggcaagagtcttcatttatttatttttatttctatttttatttttatttttagacagtgtctcgctttgttgcccaggttgcagtgcagtggcttgatgacggctcactgcagcctcaacctcctgagctcaatcaatcctcctgcctcagctgctgagtagctgggacaacagacatgagccaccacatccagctattttttgtagagatgaggtctcactacattgtccatgctgggtctcaaactcctgggctcaagtgatccacccacctcagcctcccaaagtactgggattacaggcgtgagccaccgtacctggccccatttatttatttattcattattttttattttttaaaatgaaagcacatttattaagaaaaaaaggaataaaagaatggctactctataggcaaagcagcccccatttattttttttataaaaattaatgtctatatagcccctccttatccatgggtgatactttctaagactcccagtggatgcctgaaacctgggataggttagtactgaaccctacatatactggtttccccatacatgtatacatacctataataaagtttagtttacaaattaggcacagcaagagattagcaataataactcaaaataaaatagaacaattataaaatgatgctgaaataaaagtgtgaatataatttctctctctctctctcaaaatactataatattttcagactgcagttaactgtgagtaactgaaacctaagaacatgaaactgcaggtaagggaggactactgtatttaaagtgtaccacattttttgtttgtttgttttttgttttgagac

SEQ ID NO: 2193 - DNA, 4001 bp, Homo sapiens
ccatgaacatgcggacgacctgcctctcccttaccagagctgctcgaaggcctggctgaccttctgttgcaaggccttcttggtggcctcgatgacctccacctctttatgcagctcatcctccacagggtccttcaccacatcaatgtctcgccggctttcccgcagggtcaggcactcaatggccacatccagaggcaggttcttggcctgcaggttttgctctgctgactccttcatctagaaaagagggcgcggccgggcacggtggctcacatctgtaatcccagcacttcgggaggccgagttggatggaacacttgaggtcaggagttcgagaacagcctggccaaaatggtgaaaccccgtctctactaaaaatacaaaaattagctgggagtgatggcgcacgcctgtagtcccagctactttactcaggaggctgaggcaggagaatcgcttgagcccaggaggcggaggttgcagtgagccacgatcacaccactgcactccagcctgggcaacagatccagatgctgtctcaaaaaaaaaaaaaaaaaaaaaaaaagaaaagaaagaaagaaaaaaaaagaaaagaaaagagtgggcgggggtgctggtggggccatccatggggaagtagcgcttgtccccactttagcagggggccagtgactcggatggacatgccactcatgaccccccatcaagggcttctcaacctagctgtggggaaggaggggaggtttcggcagcagcccccgggcacccagtcctggatccctgcctgtgtcagggcatcgatctcggcatctaaatctgtcagacacttgtccagcatctccttccaccggttgacagtatcaatcctctccaccagtcgagtcctgttgtcatgttcatcccaaatggtctgagagagacagagccagatagagagggtgtcaaggggttgggggctatccctttgcccacccagctgagttcccatccccaacctggttgttggtctcgttgcggagcacccgggcctcctggcggatctgatgggaagcatctcgctgcagctgggcattggtggatagcaggtagctgttagtgtgccagtcgggcagctggaagcgccgacttggcttgacgctcagcgtggccatggcacagaaaccagaagggtcagaaacccctaggcctgttcacagacaccacctgcagagggaaaacactgctgcgggagacctttccggagacctcctggatcacacgccccctgcgcaggacttgttcctgtccattttgctctgagccctgtcctgctggaagcctgcttggagacagcccttgctttactcaactttgtgtgaggtattaactaagtttccctccctcccgtccccaggcggacacaaacccctggaccttgcaggtcctggagcaggtaaaaaggaataatggagtcccggaagcctcgaagtgtgtgtgaagtgccaaatgcctggggggtaggcggatggcagaaaaaaattgcccttaatgcattttccacacctgcccccagccaaccatgccttgttgatcttcctttcctttcttccccaggctgcgggccagtccccgtgggggatctaagggcaggagccctgttctgtctccagggacgcgtgcctgttggcactggggagctggggggcggcccccggggcggccccctccccgtctggtagccgccacgccctcccgcccctccgccctcgcctactgttggaggggaaggccggacagggagagccccgtgggaagagctggggtcagtccggttccccgtcaaacccctttcttcccctccgcaggatgatcgcctttggtttagatcagtaccccggtccagcgcggaggaagggggcgcccccgcttccctagctcccttacctcctttcccgcttcgctctccgcgccccccgctctgagctccagtgtttggcaccaccggttgctaggcaaccacccctcccctacccccccaaccccccgcggccaacgcggcctgggcgcttcgcttggcaaccgcggcggcgtcgggcggcgtccccggaggcctttagggtaggcgaggggcggccggccgagcctgggagaggtggggggcatcagggcagcgctttcacttgatttacaaattaaatgaacatttgttgtcttttcagacaggatctcgctctgtcgcccaggctggagtgctgtggctcagtctcggctcactgcagcctgaacctccccgactgaagcgattctcccacttcagcctcccgagttagctgggaccacaggcgcgtgccaccacacctggctaaattaaaaaaaaaatttttagtagagacagggtttcaccattttgcccgggctggtctcaaactcctggcctcaggcgatccacccatcacaacctcccaaaatgctgggattacagatgtgtcactgccccggcctaaacaattttattttgataaaggtatgcatagacatgatagaaaatacgaaaccaagtgcagtggctcacgcttgtaatcccagctactccagagacccaggcgggaggagcgcttgaggctaggatttcgaggtcagcctcagaaacatagtagttgccagcaaacgaacagtacatagaaaaagtaggctgggcgcagcgactcaggcctgagatcccagcactctgggaggccgagaccaggtggatcgcttgagtccaggagttggagaccagcctgggcaacatggcgaaaccccatctctacaaaaaatacaaaatttggccaggcaaggtggctcacgcctgtaataccaacactttgggaggctgaggcaggtggatcacctgaggtcaagagttggagaccagcctggccaacgtggtaaaacgctgtttctactaaaaacacaaaaattagccaggtgtggtggcaggtgcctgtaatcccagctacttgggaggctaaggcaggagaatcacttgagcctggaggcagaggttgcagtgagctgaggtggtgccactgcactccagcctgggtgacagagtgagactccatctcaaaaaatagattaattaattaaaattaaaatcaggtgcactccccagcaggtcccctccagcaatggatggatagttaatgttgtttacaacatttcttctattctgtcttgcccaacaactttgcccatcttgaaggtcatacaaggaatgataaagggatgataatcatgtttggagagggcacaaccctgagagaggtaactggggtatgagaagcaatgctctggtggcacacgcctataatcccagctactcgggaggctgaggcaggagaattacttgaccctgggaggcggaggttgcagtgagctgataacacgcctctgaactccagcctggggaacagaacgagactctgtctcaaaaaacaaaatgaaacaaaacaaaacacaaaaaaaccagagaagcaatgctcaatattcaaccatttctttaaaaaaagaagggaaaaaaaatcatgtttgtcttattgtctagtactgtattgtctggtattgcctagtatttctaggggttggaaaaatattaacatttaatcttcacaactaataggtgaggtgggcattgtccccactttcttaggtaacaaaagagacacactgctaaaaagcagggagggaaacccaggtgttctggccccacccagaggacactctgctgtgctccacactgcctctcatggggggctgggatagagaggaagacaggtgtgcaggcctggtcctgttctgaggactctgctgaaccggatcctatgaggtgggtactgttaccatcttcactttataggcagggagactgaggcataggccagtgaggacgtgcccaggtcacatcactaacaagtggtacagcctggattgaaacccaggcagttgggcccagggggaaagaagtcccagaagggtcc

SEQ ID NO: 2194 - DNA, 4001 bp, Homo sapiens
gctggacctcgaaagcacgtgacattgatagtcaccgccccccactcccttcttgaaatcctttctttggctcctattataatgctgttatgttctagttcttgtcccgttcctttaatctctctttttcagtgtctattacctttcaaacaatgatgctccttctggtccacagcccttctcatctttcagtattaccattccatactaaggcacacaaatatcccccatatattctcttgaccctccaaatttatgtatccaggtccaagctttctcccaattttcagacccaaatttccagatacccacagtgatatttcaaaacacctcaaactcggctgggagcagtggctcacgcctgtaatcccagcactgtgggaggccgaggtgggcggattgactgaggtcagacgttcgaaaccagcctggccaacgtggggaaaccccgtctctactaaaagtacaaaaattagccggacgtggtggcgcatgcctgtaatcccagctactcggtagtctgaggcaggagaatcgcttgtacctgggaggaggaggtggcagtgagctgagatcgtgccactgcactccagcctgggtgacagaatgagactccgtcaaaaaaaacaaaaactaacaaacaaaccctgaaacttaacttgttcaaaaccaaatttattaccttctctcaaaattgcttttttatgctccctatttcagatgagatcaggagcgttgagggtggtataaccagagactatgttccctatttcaattaacactaccgattcacaccatcagccaagtcagaaactttctactattcttctcaactttattttgaaacctcttggaatttcgggccattccctcccgcctggatgagcacactcgttttctgcctacctggcctttccgcctccacggtcttcactttcaatccttcctctatattttcaccaaagataatgcaatcataccaagctcctgcttacaaaaccttcaacggctccccatgcatgcagcatgaagtccaaattcctcagcaagttcttctcagaggtatacaatttaaagacttttaaattacgcaaacctggatttcgcttgtagcgaaatctgaacactggcttagtccactcttcacagcgaagagtaaaaagcagagaggggaaaggaagggagacgatgacaagcgaggaaagaagagggggaaggcagtagggtctgaggggagggaattgttttcctgggtagaggtgaacgttttcgagggaagagtgtatcggagggaagtcaagtgaaggaacccagatctctgaggcaggagcgggtatgcgagcagggaggcgctcagtggggagctggaagtctctgaaacaagagttttccgagaaaacgaaagatccctaatgcgagcgaggtaacttctaatgggttcccaggttctaagggggagcagacgtggcggggagcctgagggaagtgagaaggaaaggggaaagcggccaggaagggagcgtccgccgccgctgagagggggacctctgggaagccgaggggtcccgtcgggtgcggagggacgcaggcgcctctgctccggggcagaggaggtggagcggcagcgcgcgcgggccaggcaggatgcccgggtttgtgacccccgtcctcttttcacgttacctgaggcaggactgagcagccagaggggtgcctgcgcgggcaagaggaggagacggcggcaaagagggagcatagtaaccctcacagctcgttggtggcagcggctccttagcctgcggaggcggtgggagcccctagcgcagaagccggcgactcagctaggctagcggcggcggcgaacgaggagactactgccatggccccacagtcggggccgctccccccgcctgtttggcggggccaggaggacgatccgaccagcgaagccaacagggcagctggtagctctgctgagctcccgggccgcgaaagactgaaacgcctacccggcccagcaggggggttgggggcggggtctcggctggccacgcccctccctcaagccctccctcagagtagccagtcaaccgtcaactcctgataaacgaggtagtggaattgcccaattagcgctaggaatgccacgtggtatgagggtgggcacaatgggcgtccagaaaagccaatcaacagccgtaggtgccaactccggaggacgaagggaaccaataggaaggaagtcgaggtaaaaacagaagaagcagtgtgtgggaaaggcggaaccgaggaggagggaatacacctgggggaaacccaagtccaggagcctcttagagggcggggcagtaaacacaagatggaccaataaaaatgttaaacacagaaatgattggtaattgataaagccaatagaaaatggactagactggcgcggctttcgggttggtcaaggtatagctgagtaaggaaaagcggtaagaatgctgcgtcctgcaggatttcagtatagtgaggaggaaaaaatatatcaataataccgacttgaaatagtaagagcaatcagtagagctaaacaaaatgctagggaagcaattaatcatgactatgagattcggttaagtgaaagcttagaggaggtaacacttcagctagcttgaaaacagattttgaaagaaagctggtggggaataagttgggattttttgttgtttttgttggttgttttttttttagaagggtctcactctgtcgcccaggatgatggagtgcaatggagcgatcatggctcacttgcagcctcaaactcctggattaagatgatcctcccaactcagcctccccggatagctgggactacaggcacacgccagcatgcctgactaattttttgtatattttgtagagacggggtttaccatgttgcccaggctggtctgtaactcctggactcaagtgatcggcccacgttggcctacgaaagtgccgggattacaggcgtgagccaccgctcccagctaagaattctgcccagctgttcaaggcacatatttcttcactttttgcatgtgcctggacatcaggagctcataatctcatgactgaagagactagaacaggaggagggcaagagcaagcagtatgggccttactgtattagcactcccaggggttagagaccccttttcagacatcttaagactttcatcctcctggaagagtataagtggtatgcattcctggtggccataaagtttaagaaatatggccagggccgggagcagtggatcacgcctgtaatcccaccactttgggaggccgaggcagggggatcacgaagtcagaagatcgagaccatcctggcaaacatggtgaaacctcgtctctactaaaaatagaaaaattagctgggtgtattggcgcgtgcctgtagtcccagctactcaggaggctgaggcaagagaatcgcttgagcccgggaagcagaagttgcagtgagccaagatcgcaccactgcactccagcctgggcgacacagcaagtctccgtctcaaaaaaaaaaaaaaaaaaaaaatatggccagacacagtgattcacttctgtaatctcagcactttgggaggccaaggtggatcacttgaagccaggagtttgagaccagcctgggcaacatagcgagaccctgtctgtacagaaaaaaaaaaaaaaatgagcccaaaatggtggcatgtacctgtggtcctagctacttgggaggctaaagccagaagatcacctgagcccagaggtcaaggctacagtgagctgtggatggtgccactgcactccagcctggacaacagagcaggaccctgtcccaaaaaaatataaaaagaaagaaagaagtgtggtaggagatattggagagagaagaggctgcatgtgggttgggcttaaatgccaatattcaaatttgtcttttgttttttatgctgtgagagctattcttgagcaggaccata

SEQ ID NO: 2195 - DNA, 4001 bp, Homo sapiens
aactgttctgttccagattatagaaaagacacctggtaattcgaggcaatgtgtgatcctggatcagaccctagaccagaaaacgtcccctttctgttgttatgcaacacatgtgtgggacaactggtgaaattagaacaagggctatagatgagtattgtctgtgtgttaacttctggattttgataattgcactgtgcctatgtaagaggatattcttgtatttaggaaacaggcactgaggatttggggaaaacttacactcacgtggtttggaatatagacatgcctccaagttcacgcactcacctttaggtcctgtgtcactcctgctttggtaaaccgcccttcttgtttaactgctttgtaatcaaatgtctgtggattgaaacaggaacacagacctttgggaattgcagatgggcggtggaagtgcagaggcagaagagatccccctgtgtttctgttcctcccttagggctaaggcaagaggaaagctggtggccccacctgtgcagaaggttcctctatcctcctccctctttcagctcatcttgttccactcccctgctggcccacggggcctcagctccttttgtcccttgaacagccaggctcattcccaccttgggcctcagtgcatgctgcctcctctgcctagaaggctcttactctgcctttgcaaagccagagtcttgtccttcagctctcagctcaaaggaaggcctttccctaccacccactccacggcagccactcagacatgtctccctgtcttgattcccagcagagcaggtaacactgctgaatgagtccttgttcgtttatgtatctgattggttacagtgtgaagttctatgagagcaagaactctcagtgcatcccccagcacctgggacaaatcttggccactaggatcagcaaatgacccctgactcctggtcacttccccatggatctcaggcctggctgcctgcatggcctcaaaagggcttcttactttggtcggctctggcttcaattccaggcaaactgccttgtagttcttgctctgcaaaaagaggagactgagattcaggctggcagacatcaggattggggaggagaacatctggcccttgcacgggaaccctgccccctgccccccacaaccatgcaaccctgcctgtccaactggcttgagctcaggctcacagaccccgcagcacccggatccgattcctaacaaatcacatcttgtcgtgctgtcctcttcctatgggcgtgtgtctgcctatttggcaggcagccctctccctgctggaggcgccagcgtggagaaagcactttaagataactagaagcaagccccggaagtgttgtttccagagcaagggctttggccataggcagatttgcactatagtctcagctgacctctctactatctctgttattttgggtgagttgcttagcctctctgagcccccatttcctcatctataaaatcgacgtgatgattatatttatctaataaggttattctgagccttagccctgctggttagatgtgggcctggcaggcctggcatgggccgtggaaccatgagtggtcttggagtagggagtgctcccttggcagtgctcctcatccccagagggaggcagcagaggcctctttccttcccacccccaaggctagggattaatcccacaccccttccagactgagaggctgctttatgctcagtacagagaaagaaaaaccagagattcatgcgagcattctctgtatcccttgccccgacaccatctccattcagtaggagctcagagaggacccacactgtccagcaatgtctctcttttaccagatgtgttttcttcaattctgccctcttggccgacatgatggaggaggccagggtgttcttcaactccccacaacagcccctgggaccaggccactgtcctaggcaacttacaggtcaaggtgagggcagggtgaccacccctttgtgtacggaacagctgaggtcacaatgccaggacccacatggtggtccagagcgtcaccacagcttcaggcctggggggcttcggccactgagatgaggggttcaggccaggtttcagagtcccaccaggcctccctcttgcaacagaaggaaagtccacactgaggaggatcatggcctgctacggtcgaagtgcaaggcacgcgtcagaagcagtggctccttctgcagcaggactcacctactgactcagaaggacgtcctccagggacagccagctcctcctctgagcgcacagcccatgtcctctgctgtgcgctcctcgcgcgaaccgaccccacctcggaccggaagccaccttgggctggaggatgccatgaagtctctctggttcaacgtgcatgcaccgtctcacttaacctgggttactctgtatgaggtggggtagccagtctcagcaggatggtttctgatgcctctgacctcacactgcccctgtcccacaaccacccccagacccctgcccacctaaaaattctcttttcctagttcttctatcatccgggaagagggttgggacaagaagctaaagataagaagcttttcgggcaaatgaagaatactaaagaaaaggccattctgcgggtagccatagtttgtgctaaagtagacagtcagaggaacatggcaccccatgggataaaaaatcactggggatctgggttggtgaaattgatttctcttttcctcttatcactggtcattcacttccttcttccctctcatttcaactgctagttgcacagaaaaggccaacatggacatctgaggacagacagcacaggagtacaggaactaatgcaaattgcatgtgaatgacatccccatgcaggccactactgaccacacttaccctcccatttcacacacctgcttgggactatccttcctggaggccactggaacttctggagccacctgcagcacttctgatgcatttcctaggtggtgatttcccagccctgacactggtgacagctgtgggtcttactccaccatagccagaggagaatgtgtctgccactgcatcagcggaaggagagggagttgggggtggtcaccagcttcccaggcttcactttccccacttataaatgaggggctggaacttttcagtttccttggaccttttaattcagccctctcagatctgatggcctcgtggtaggaatgcccttcctctaagggaattacagtgaaaatgactgactccatctcaacatccaccagccccgtgaaaatgtgccccacctccttctgctaattttggcttgggggcctcctggacctgcagtagagcttcccttgcttggctgagcagttgttaaatgagctgccttctagccaagcatagcacatgagcccactggcctatctattaggaaagaaggtctaagagaaatcagggtctcaatgcaaagctgcattataaagtaaaaaattatctatgtatatatacacaagtacacatggtattatcatttgggcagaattttaactacagagccacagctctgggcttgtgccttctcacagcgtttactattcatgttctcaaacattgtacaccattgttttatcgatatattctggcggggctgggggaatccacgtggcgaacctgaatactgattatttatttatgaagagacaggatcttgctctttctcccaggctggagtgcagtggtatgatcatggatcattgcagtctcgaacccctggactcaagcaattctcctgcctcagcatcctgtgtagctgggaccacaggcatgcgccaccccactcccagctaatttttaaaatttttttgtggagacaaggtctcactatgttgctcaggctgatctccaactcctgagctcaagggatcctcccacctcggcctcccagagtgctaggattgcaagcatgagccaccatgcccagtctgaataatgat

SEQ ID NO: 2196 - DNA, 4001 bp, Homo sapiens
acaccagtgccttggggtacctaggccagggcctggcacacatttttgttttaaatactgaacagagggatattgagtccatccacaagtactggttcagtgtgtctccccacagccaaccaccagtgccagttcatattggtgagactcagcaaccaacttggtttgcaaagtgaccccatcagacaggaaggacattgccttcctaacagcaaatgagaaacgagggagccttggacttttttttttttcttttaatgtttcatagcatgacatccaggtgggtcctgacctctgtcaataccaccttcctgaggttagttccatttcctactctgcacctgattcctgcagctcccaccttcagtgagaggaggctacagttctgaaggaaaaggcttggcattgaagctatggtcttcctgggccagattcaggagggaatggaagagaacattcctttcaggacaggtggccaaaggataggagacagagtggttcagcagggggggtaggttgcacaagggtggggcaaagggcacctcctgaaagatgggaagtgggaatggggatctggcctggggctgctgtggagccagctgcagtgcaggttgcaggggagcaggggcttccgccttggggttgctgtcttggtcagcatggctcctgccttcggggatgtccaaatcccacagaacatctggattctggacctcagtctcagtcttggtgacagcaggggcagggcccgtgttgatggctgcattcatgccgtagcgccgtcgcttgttaatccagtacaacaatgggctgtaggtgaatgtggcagctctcatcacctccacccactgctgggcatgctcttcccgcctcaagttcttcctccagtgcagaaagataatgcaccctccagttatcacagaacacagccccaggattccaaagtacaatgagacccacactaaggcagcaagaaagaaaaagaggcatgctggctgatagctgtagcttggggcctgagctgtttctcattcctctttcacttaacccatgcatcaatcgctccatccacttaactactctcaccgttccttccctcccttattgacttgcctcatcattcccttattcagtcaaagctagatttccagggagcttaagcaccacctttaactctttacagatcacaaaagctaggtctagcgggggcatgtgctgcccaggctcagtcaagcctctgattcctaacccaggacccatccaatccatcagactgagaagtttcactatgggcaagtccatcaagaagcaaaagttcaccagcactttgtgaggcccaggtgggcagatcacttgaggtcaggacttcaagtccagcctggccaacatggtgaaaccccgtctctactaaaaattttaaaattagccaggtgtggtggtgcatgcctgcagtcccagctacttcagaggctgaggcaggagaatcacttgaatccaggaggtggaggttacagtgagcctagattgagccactgcactccagccggggcaacagagcaaaacttcatctcaaaaaaaaaaaaaaaagtgaaagttcatcagttgacagagacaccaatgtcccatcccattccattcagctgtgatagtcctgggctattgatagtatcttctctggttgatcagagcatggtctttgccttaaaataattcttagttttctagagtagactatctcctaactgcttagctctcctccaggcagccaggcactgtcccatccatgcaaagggccttccctgagtgtttgtccccaagccctaaggcacaagtccagtgacagggactggaggagcacttactcccagggaagcgcaggtcctcctgttgggaatccatacagctgagctttggtacctggccgatggctctggggagagggaactcacccacccatctgcccagccagtcagcccatctgcccagccaatcagagtctccagaatgcccaggccctttgttctctaaaggagaggtcactgggttctgagaattgggcattctaggggcagtgcttgtgaagtggtcctgggttaatggaaggaggggacttcatccagtggcattttttgggtggaatgtcactactacttccatcagagactggttcacctattgaattgtctgtacctaccccttatggtgaacccacagagcagaccccagaaaagggccattgtccctcaggtacttacggatgttgctggtctttagggaacggttgatgggatacctgtccccagtgaggaatgtaacaaggaacacacagcattgggcagccctgttctcaaaaagtatctaaccaagttggcaggaagaaacctgctcaagggaaccaagtggtcaatacctccttctttggctccaacaatctgtcttttatttaattaccttccttcaagtgctgacaagtgtttcccaggccccaggccctgtggggcttcccaccatctggcctgcatctacttccagccttacttccctcctcgtcctccacacacttttcccttttgcctagtccgtactcctgaacagaccctgctcattcacatctctggaggtgtgcccatgctgctccttcacccaggagtgcccctgcccacttttccaccactgaacacctgctcatccttcaagactcagctcagcccccctactctgtgacagactgcccagaatcatatcatcgccaatttgaagaaactttgagagttgtctagttcatctccaccatctgatcccaccatcagggccatgcttgactcctgggggtagatttttccccacacagcaactaatctccctggactcaagactcacttgagtcaggaacttgctcaccacctcctgaggcagcttgatgcatttatgggcagctcagttagaaagcccttccctaattaagcttaagtcagccttcccagtatgttgcaccactgcttgtagctcagcttcttagcaccattttaatgactcccctctttatagtcctccaatgtgtgacttagggaactatttagcacagaattctctccagggtccacttacccttgttctcctcgtatatcactggcccctactttccagtctcctttgctggtttctcccttttcccctgatctctaaatgtaggcatgtctagggctcagttcttagtgctctatctacattcattccatcagttatctcacccagacccctggctttaaatatcactatacactgacagtacgcaactgtatctctccagcctggaatgctcctcagaactttagactcatacccaaatacctggttgacatccctccttgccagtctgttaaattatcccaaaccaacatgtccaaaaccaaactctgattatccatcctccaaagtctaccctacctacagccttcctcctcttcataagtagtatctctgtccttcgggttgttcaggccaaaaacctgcaagtcatccttgactcctttcattctatcacacccacactgactccatcagcaagatctttaggcttttatttcaaaatataaccaaaatctggccacttttttttatcactatcactttagtccaagtaccaccatctctcacttggattactgttccctgtagggtgaccaacatcctggtttgcccaggacttggggtgggttctcaggacatggggctttcaatgctagagccaagaaagtcctaggcaaactggaataaattagtcacccttgggagagtttccatccttgcctccacatatcctaaatcccaccagcagccagcatgatccttttaaaaagtagatcatgttactccactgcttaaaacatatagtaacttccgatctcattcgatttaaaatcaaagtccttaaccaaggcctaagcaatctaactagccctccctataccttcttggtctcatttctgctgctgtgccct

SEQ ID NO: 2197 - DNA, 4001 bp, Homo sapiens
tcatttccccaactccgtgggaacagcacttccattcccatctcttagggaaacagggaagtggtttaactcgttctgcaaatcaactccagatccacaagagtgccctccccctcggcggggagaggccaggctcccagtgctgcagcccagtgaatgctgatccgctgaggcccaccccaggccacagggtgctgggcaaactcaccaagcccgcacgtctgcctaacatctggctgggccaggaagagtgcctggtggacacccagcctggcgacacacaggaggcacggccggtgaagaaaatggatctgtgcaccaagggcctgcaccatctcgccgggctctgccctgacagaccattccttacctttcttgatcacggactggtctaggaggctcattcccggctcgtccattgcctgcaaatagcagagggcagcggtgagggcgcataaagccctagccgcccatgtcttcccaagcccctgccacccagggtctctgtctgctccgcccaaggcgcaccagcttcgcttggggcggcgacgggcaggcccaggaatcgctatgtccaggcactgagctggagccctgggcatctcactgtgcagtgcaaaaagggaattttgaatcttacactggtaactattatgcttctcttcgccccaggtgcaggctgccccatggatgccacacgtggcagcggggagaaaagaagtgattcggtccctgccgagggttgctgccacccacgcactgctggcggactcagtgccaggcagccttgatggccaggcaacgtctaacccaggaggtgggacacatcctcggagtcaccagtgagatgtggcgagctgggagaaaagtcggcttcctgcatttgtcaccttctgcctccagccatggtagtaaaccaccgcggccagtcccgacccatcccggatccctcgggtctcacctgcaggtcctccagaccgggggccgccgccagccccggaaggccgagaggtgcgtctgccaggccgtgcgcgccgtcggccaggccgtgcaggagccggggcacggcagtggcatagtcacggcgcgggtcaaggcccagggcgcgggcgggcggtgccagcaggccgggaggctcctcgtgggcgcgggcggctgcgcggggcgcggcccaggcggcctgaggaggctgcggctgcgccaggggcgccaggccgccatatgggtcccctgccaggtggggaaaggctgcggcggcgtcgggcgcctgaccgtagggcagcggtggctgcgggtagggcggcgggaagtagggcggctggaattcggcggcagctgtggcggccggcgtgtggcagagcgggggcgccggcccgtaggccgcctggggcagagacgacaggcgggccccgccggcagctgctcccagcccgtcggggcgctcctggggaaggagaggggtgccttaggtgacccactggcagctgaaaggaccccagcctgaaaggatcctcctcagctcgggagggttcagctgcagtccctcccgtttcttggggcccgaggtttatttccgagccacccgcgggcgcaggagcctcaggctggggacagcggtcacttgcgcatcgcgttctcagctggcgaagtccctgcggccccctccctccgagatttcgttagcgcgggacaggagggttggaaagtccagcactcaggcgccccgatcccccggccgaatatgtcccgggcccgagactactcaccatggcggagtaggtgtgcaccagcatggggcggtgagtgccgggcgcgaggcgtggcggcggcggagccctagcccgacggcgagcgctgcgggcagaggcgccgggagccggcacagcccgcggaggtcacggtgcggtagctgggtgcgacccagccgggatcctagtgggcgtggggtcctcagcggtggccgttcccgggcgggtccatggaggcaggacggacgggcactgatcgcacttggaaaagtcggtcaacgggtgcccagcgcccgcccttcctcctctgagcgtagcctgctccatgcactccagttatagtggcgggggcgcgccgggcctccgggggcgcgcattaaagagacaagctatggcagttctctcccttttccccagcggctgccacaggggaggcagtggctttggcgggatcgggtagggtgggtagggggcgtgaattcagcccacattgatcagagccgccttctgggctcgcagctcgcagctgcagtgaaacagaaatattcgaggctgggacgcaagggccctacatttgcctggctctatcacatccttgcctttaagcaaagcactattcttcgctggcctcagcttcctcggtaaaataggtatcaatcctttctctaagcacctcaagagactttggatgaggtgggtaatcgggaacgtggaagaagtttgtgagctgaagactccagcctatctgctcatgcgcacacagtgtcagtgcgtgtgtttagggggtctaccatcacagtctttcctgaatggttctggatcaaaatccctcgaaggtgcccacttcgctctcaggcttcctgggctgaaaacttccaagccaagccaggctctgagggagttggagacagaagctggccagacagagagagagacttgcctgggatgggtttgggtatgagctccacctgacaaggggccaagatatttctgaagccacagggtcctgggctgattgagtgtgggcatgagatacccagagactgttgagtgactgtgtgtaactgactagcatggatgccgtgtgattgttacactaacatgcgcaggctacatgttcctgtgttaccatggcaggcactccctggctgtcaagcaagttccagtctctgtagtcactctctctttctccccaaacccaaccctcccctcctgacaagcagagacagggattaaagatggacaaatgagaggaatgctaaggagaacaggaattaagaaagcagaagaaagatgttttttaaaagcaagatgtgcagaccagggcaaagtagaaataatcacagcagacttattacagaatgtgccagcctctgtgcaaagtgcttcacgaatattgggttctttaaccctcacagcagctctatgaaagagatacccatatcatccccattttcaggggaggggtgaggcatggagaggttaaatggcttgcccaaggtcaagcagctaagtggcagagctggggtgatctgcccctggcccctctctgctcagaatcactattctctactgcctcagactcaggggcttggatttagtcctgactctgcctaactgtgtgatcctagctacatcccgtttcctctgtgatctcagtttctgcaacttcgacaacaccaataaaaaagtaggggaaggcagagaagactagttgtttttttaggtccctttttagtgaagtagtaaatgagaagattaaggtaaaattattgatatagaagaggaggtgatagtgacaccattaactcatggaatatatggttccaagtgggtatcccagaaggcacatggcaggtgcagagctcagggctggatgatctcagcctggggagtggtggggaaagaaggaggctagaagccaaggattcatcattaagaactttctgaagtctggaaccgccagcgaggttccagaggatgaagcggaattgggaagctttgcaactttcctgctcgagatgggtcagagatcaggattgtgtttgtgtgtatctatatatgagggagtctgtggcaatgccctgttcctccctccctcaaccccagccacagggcatcagaagtcaagctccaggacaggtgtcagtgcgtgaatagaaattgatgaactcctctgggagaagtctaggagccgcaaaggagatgatgcctgtgcccagctgcggggatgcccctgctctctccagcagc

SEQ ID NO: 2198 - DNA, 4001 bp, Homo sapiens
ctgtgtgcttaattccatttccttaaaccactcacagatagttgaacaaacaataacatacgttgagaaactaaaaatatacctccaaatgtggaataaaagttttgtcactttcgagcgcaaccactttggcaccagcttcaagtaatgcctgagtcaggattccaggacctggcacattaacagaacgaaaagtttatttgtacaagaaacataatctctttcaataccaaactttcattagatgtttcacacgttattacctggtttttaaatctgacagcatccgcaaagtagatgtcactctcctttttacatataaggaaacaggagattatatatacttatttgactccagcgtcaaaagtgatgcagcttggctttgaaatcattgtcagcgactgcaaaacctgcactcttttttttttttttttgagacgaagtctcactctgtcacccaggctggagtgcagtggggcaatctcggctcactgcaacctctgcctcttgggttcaagcgattctcctgcctcagcctcccgagtagctgggattacaggcgcccgccaccacgcccggctaatttttgtattttaagcagagacggagtttcaccatgttggccaggctggtctggaactcctgacctcaagggaaccactcgcctcggcctctgaaagtgctggattacaggcgtgagccaccgcaccaggtcaaaacttgcactcttcatcaccatgattcactacctcttagaagaaaaaagtcacagcaaaatagattgcctctagcctatcacttcctcacggactacacggatgctttaaccatcaaagagattgtcaagcctaaacagaactgactccctgtgatatgaaatggtgctttaaaaaactatcattcaaaaagcctataaatcttgtgttcttagcatcctgctatggtctatagggaatgcacggaagaataagataacatcattttttcagctggcagaggcttgcaactcttttggggagataagatctaagagcatgttttatcaaaatattgtgtaaagtgcaagctgctacagaaatactttgtggtgtcattaacgatacagactctacgcttatgtagtgggcaatctctccaactaaggagcttcaaacaaagacccgtatctggacgggcgcagtggctcacgcctctaatcccagcattttgggagacctaggggggaggatcacgaggtcaagagatcgagaccatcctggccaacacggcgaaatcccgtctctagtaaaaataagaaaattagctgggcgtggtggcgcgcgcctgtagttcttgctactcgggaggctgaggcaggagaatcgcctgaacccggtacgcggaggttgcagggagccgagatcgccccactgcactccagcctggcaacacagcgagactccgtctcaaagcaaaagaacaacaaaaaagaccccccagtatctaaaatagcaccccgaggagggtcaatacgtttgaataaatgatgaacatccaagaaaatgcaattcagctggactcacctggattgcactccagcagtaggtgtggaggtctacttggttttcccaaatagatttgcgccagggtctcagccaatctccgatcggttacgtaacgcttaaagtctaagctggccttagacgccttccttggcggattcctgaaatccggttcgggccacagctgcggagaggagtcagagagcccacagtggttcctcgccggcaaatgctttcgcgtcgccgcttcagaccctaaaatgcaaaagcgaccagcgcccgccaaggcggagagcctcagccgccgaggaagcccgaccactgggatccacatgtccttgtctctcaggcccgctccaagaatcacctagtgcagctactacagtgaaccccacgcagggtatcccacgtggaacattttctggcgtccgggccaggtcaagcggaagtaaacactagagcctgcgcatgcgaacagcggagccttcctgcttttctccctcacttccgcttccgcctcggctcagccgcccgaggattgtgagtggaccgttgaggagagcgaccgaccatccggctggtgtccggactcgtactctatggttgtccgcgctctgcgcttcctctctagccgccagtgctctatgctccgcggtcgcgggccgccagcctccagccggccagccgcgaggggtgcgcagagggaggcggggcggaaaggcgagaggtgtctcctccaccggagccaggggagacccgagcaagctccgtgacagcacgtcggccgccatgtcgccgagtggggctggaaacagacccggcgcccagcggtagccctccttgcgcctccgattcccaggtgaggagaggaggagcgggatgcaggggacccgccggctcgcggccgggatggaaagcctttcggaagcctctcgctcctccccctgcgctgtcctcctccagccgcgcagcctctgccctccgggtgaggtgtagcccggtccccttacctcctccgcctctcaggtcgcctgttttcctctcctttctcagctactgtgggtctcctattgctgcgcgtcgcgccaatttctccctccctaggggactagcgccagaagtcgttcctcacccggctcctggaggagcctgcggcttccacggtctccgttcctttctgttgtgtggcccacagcccgctctccccaccctcgtggatggttttcatttcccccccacacctggtcccccccatcactaccactttggttgtcaagaaccgcgtggtgtctcccttccattcctctctctgggccaatattttccttaattttttcagtttgtgtgtttaaaagacttaaagttaagattaaaaatgaagatgtaaaagcttacaattcctttctaagcttaaaaagattaagactttaggatgcttactgtattccttatgtaaacttagtcaaacacatcgtactgtggaatgcgatttaaaagacccaattttgaagactaaaaataggatgctgtaatggaaattttggcagtctttttttttttacctattgggcaatgttagaagacacggttctttgagagtgttttccgtgtttcaggatcaaacttagagcttttacccattatccttaccaccaaggcaagaaacggcagccaatcaactccgtgtcttagaatacgtacaatcctttctgcttactctactgagagtgtaattgagtttggcatttaaatgcacgaggaaaaggttcctaaggaatgtatcacccagcaaatagtctgaagattatactcatctgatgaagctcaagcggataaagaattgacaactaaatatgaccttttgtgtattataaatttgttaggacatcatagaaaatatctcatcaactgttgtgcaaactgtggggactcactcattggtcttaatttgcttaaattcttttttcgtacagttttctcactgacaattttctagaggtgactttgcatcctctgaacctctctccattactgagctgcctccccctctccccttaaaaaacattttcatagattcagaaatacacttttttccccctccaggacctggagtcctaaatatttttaaatcagataaaatagaattatgtcttcatggttcactcatagaaatgtgtcgttgaatttctgactttttaaaaaaaacactgtggtggctgggtatggtagttcatgcctgtaatcccagcactttgggaggccaaggtgggaggatcacttgctgccgggagttcgaagccagactgggcaacatagactctgtctccttaaaaaaaaagaaagaaagaaaaagagaaaaagaaaaataaacacattgtggttaaaaacaaaacagttattttaaaatgcactgtcttatttcataatgtttgtggaccaaagttagcctactgagtccta

SEQ ID NO: 2199 - DNA, 4001 bp, Homo sapiens
ccgactaaagaacttcagggaagagaaaaagagaataacgccttttaaagcaccgaattgttagggggaagggaaagatggagaaaataaagtagaaagtaaacattttaaagcctgatggcctcaagcatacaactgaaaaggaggtggtggggtgaaggacaggagaacgggaaaagagcgaacgggaaccgcgagagggaagggcgatcccgggagctgctgcggttttgagagctccgggcagagctaaacctcaggggatggaagtcaaaataagtacttactttcggaggggaagaagggcggcatgtctattttgtaaacctccttggcgtagtactcttcgtcgctcctctcgcgctcgcaggcggccgccctccggctcgccttctcctggagcaagtccctggtgctgttgtagatggaaatcacctccggggggacttcctcgggctcaggatagtcttctgggggactggtgagcttcagcttgctcaggatctgcccgcggatcgcctcgatcctcttgcgcatgaactggtccatatcgagtgtgctgcaggtagacaggctgagcgcgaccgtgaccagatgcaggatcagaaaagcgctcagcacacagtagtgcattttttaaaaaagtggaaaaaaaagttgtttttaaaagtcagaataaaaaaaagaaatcaacaattctcaaagtatagatcaaggagagttgtttggttttttgttgttgttgtttttgatgcgaaacttttgcaaacaatctagtcaatgcccaacagaaaaacgtatcctgcttgaattcctttaaaaagaaaaggccagtagttccaaaagtggaaatattaatacgggacgggcagagggaaccctgactttggcgagtaagaagaaaaaaattcttggagcaatgagatggggaaaaaaagagacgagtggctattaagtagaaataaatttaagaggaggaagtggagttcagtgtgtcagtctcgggtgcggagtggcggatctgaactcggctcctccggccaaaagggaagagatgaaaaggtcccggggctggcagctggcgaactgacgggaggggcgccgggagcgcggtgaggggggccgccgaggctgacctgggctgaaatttatatatttaaagaaggagcggttcggtcctgccttccactgcggcgctgagagcaggagcagcagcagctccggagcagagaagcgcacacgtgtgtgcgtgcgtgtgtgtgtgtgtgtgtgtgtgtgcgtgtgcgcgcgctgggggcgagcccagcgcaccgcggggaggagggtgcgcttcgcagggcgctcggtactcggtcgggtgccgcaggggccgcagaggctgctgaggcggcgcggatcctgctctgggagctgcgctccgtggcctacaccctggcgggcgcgcgctgacccgcttggttactccacgttgctgccgccgccgcttgcaaacgcttccagcctccagctccctccttctcctgctcctccttctcttgctccaaacgccaacccagccacagacgatcagccgtcgcggttgcgttcaccccctgcggatcacaacggcagcccttgcgacaccctggctggggagttttattcctgagggggttgcgcaggggctcccttggactcccaccctttcccaacctctgctggcttctccccaacgtggaattgctcgcttagggtaggtaggcacttgccaccctaaaatagatcctctctgtctcctcctgtctgcagccgggcagcccctcagtttgttcctggatgactccctagaccgtcaggctaatattctccatccccctcccctgcctctttcacttgcgctctcgctctgctgtctctttctctctttctctttctatctctatctcaatctgtctttctcttgtcaggagcttctggagctccgctcggagcgaaccttctgctgccagcagataacatcacgatcttgccggggaggggagatttataagttctctctgaaccacgtgtctgccttcaacaaagtgacgtgctaggattacagtcagaagtcctctcgttacttagaccacgagctctccccgaaccgttgagggagtgtggaaatgaggaccgctgtgggtaagggaggaaggaggtggaatgtgcgccctgacaacagtgatttacggtatttactttccagtcattttggacaggtctgttgaaggaaggacaatcaagtctcccgtttttacttagtgtagctcagtcacagcctcccaagctgaatcacttgctctagaagggaaggcttccctcctgtattatgtgtgcacacgcacccctatgggagggagcactagtctactcagggccaggccagtactgaagacataccttccaatcttttaaattcatgtcctacctcttattttctgggataccttagcaggttgccatcccagaatttattttgttagtttgttgtttacaatgtacccctctgtttgtgaactgctggaaaacagagatccatcaattttacctaaagaataaggtatacttgtttgttttactgatttgaatgaatggtcacctttataatttgctgcctaagccacttcttgtatggctttcttcttcaccttcttgctaggctaaacattatcaaccaacttcattctttccatagcattaatccaggaagctggaattttaagtgtttgatgtctactgttctacactactcataacttgacattttcaatttcaactaagtctaaattagatgaatacaagaataactcttaccactgttccaccttccctttttcttttattttacctttagttactcaaagtcaacattttcatttcggcatgactctgcagccatactgaccagacagatgatttaaactggaaactctgttgaatgtactcccaaacccaagatctctatactgttctctacttcagatgttcctgagttcagaaaagtcacaaagaactttctatcacttttggaatttatacttcagttgtgtatggggcctaggttattagtagagcactgaataaataaaataataatagctaacatatactacacttagtaatttgatgtgtgttgtgtatggtcatttaatcttcactatgaacctataaagtgggtcttattatccatatctggcagatgaggagactgaggtacaaagaagttaagtactttgttcgagaccacagtaagtggtagagctggatttttgcagtcaggatccactatgttcttacctactatgtacttctgagaaacaatggtcccagaatatgttctgacaaacaggaattctggagtcaaacaagtttgggagatactgggtactctcctgtcctcttagattcctcattctggaacattatcatgttaaaggctctgaaactcctgtagaagagaaaaccttttcactcttttaacccagcattttccaaactcccttgaatacagaattttttccattatcacacattgaaaaactctggaataaaataattgttccaacccacttctgaataattctaaaaattatgtataaatcagcaccagcaggttcctttccttgataccagttttgagttgaagcaaagctaccatcccagtagcccaagaaaaagataatcaagaggcgctactgtcagactagtagtttcatccagttaggtcctccctctgagttcagtttgagaactgcagtaggctagctctacagattggacaaaaagtgaatattcttacacctgtggccattatagacacagagcaggagctccaaaccagagctactgagagaagatgctgctgtggaatatggctggttacctgaattagctatcactgtattttgctgaggatacaggttcagcttccacaagccagtgagcatctttcatgtttatagacaaccttcttggtacagaca

SEQ ID NO: 2200 - DNA, 4001 bp, Homo sapiens
actgcactgcagcctggggacagagcgagactctgtcaccaaaaaaaaaaaaaaatttccatgttaattaatacaagtcagagttctatttataattatttggggccagtttcagaggaactttaattgggcaccctcataagtatgtaaaatcgcctaaattcatcacagataccttatgtgtgtttcaagagatatgcgttcagctcaaatagaaagctgaaagatgggagaagatgcatggactatgcacacaaatctatgtacacacaaatcggcctgcacttgccgctctccgctgaggaaggaaggtagctttggagtcagaactaacagaaagttatgtatgatcttggacaagtaacttaacctctagtgtcttatctgtaaaatagggttattaatagtgcttttcccatagagatgctgtgaggattaagtgcacacagtatgggcttagaaaacgttagctgttattattatccaaaagaaacaactgagttcacactgaagtaactgtttgcactctgcattcaggaagaagaaacggtcttgacgtgtgtttttactacctgtggagacttctcccaaaccgctcacttcttcggaaggacataaaactcagaatacgcctggttccccagcacagcctgtcactcctactatcctctgccctcgccgctcctatcctgccaccgcagggctagcggcaagcagcgctaacctccgtgcggtgcttactcggtgccaagcactgttgtagcacctcacacacattaaatcattagatgctcacagcaactttacggggcaagtactactatcctcacttcacagctagggaaatggaacggttttcttcttccagcttttcgtgaggacaccaaatccactaagttctactttgccaaggtaattcatgcttgacacgtcggctcctgacactatgcgattctgcaaagcggggcaaatgccctaataagatcaagtctgcaagcagattcttctagcgacagtccaagatttccaagtttgtcctaaccaaatgaatacaagaagagagccttcaaaataaaccggggcgggggggggccgagctgcagcttgcggctcagcccgcaaggcaccctgagggcgcggccagcggggaacgcaaaccgcgtccgtgcacgagtccgggagccacagcctgggccacggcaattgactgcgaacccacaacaaaccattcccaccgaagctgtcacgcgcccggagggaagtggccgccgcgccccgcaggggtcagaaggacccgcggagaggaagagtgagggcgggcgtggagaattcctccccagcactgcgcatcgccgggggcactgcctgccccgtgcggccgctgcccacgcaccgctggccaccggtgcctgctccccggagggtaaacaccgccccaccagcgcctccctcccaaggccggaggtcctggcggctggagcgaccctggccggtaagtaggcactggcagcccgcgccgcgccgacgggcacccgcgcagcctgcagagcccacagcccgggcgggctgcagcgccgcggggctgggccggcacgtacctcggaggcggtgtgtccagcggagatccacccgcagcaagttggaggaaagcggcggcaagtttccccgcccagcgctcggcggcggcgagctccggcagctgctgcgccgcggcaaaactacgccatccggacccgctggggactctcacctcctgcagggagctccgggaatcgcgcagggaaagtggccggggcgcgagagccgccgactgccctccttcactcgctgggaagaggaaagtgccgctcggcgtccccgaaaccctcgattacccccatcaggccgacccggcgcactcgccctccctcgcacacacgcgggcggggacgggcaggacgccacagcaatcagcgcgcggggggaagggcgctcctccgccggccccaccgggggctctcggccgcccagaaactcctcctcccgcctcccgcctcccgcctcctctctcctccccctttgcctccgcggctgatggatgagccccgaatgctgctcgagcctgtgcttcccttcgggacgaggaggccgagagagaaggggctaggggcgcggccgggctcagcgtgcccgggttggggcggcccctgtcctgggggaagcgcgagggagacgtgggcacgagctgcggggactcgctccctcaaacgaggtcctttgaactttccagggctccctggaagagttggattttcatttggttccttggtctttatataaaagttctgaaacctcagataatctgatcacagcctcttgccctctccccagcagagctcccccatgcacacattcattctgtccctgtgctttttcccaacctccggtcccgcttgttgtcacgctctgatggtgggcgccggcggagtcttgcctcttcccctccagcagctgagactgcattacccagccgttccccctgctagctaaataaattaatacaaataatggagctaggtcagcattaccggcgttacccggaggtgggcgcgatatgaacgacagtctcggcggggcaacgtcctaagtacctgtgcctgtgcgacgtcctaagtacctgtgcctgtgaagtacacgctgcagaagttgaactgctggcaccagaacaccactctgatactcttgcttacacccagtttttcttattaaaaagtatacttaagtaacaggacattgttttacaaacaggcaggtgaaatgaccgtggactgacaggtttcaaagaccagacttccagtcctgactactgtgcgaccttccacaaatggctaacggctaatacccgtcaaggctcagttcaaatgaagggcttggcctagaaggcttcttccagttctaaagggctatggacctatgcctttttttttttttttttttttttttttgagatggagtctcgccctgtcgcccaggctggagtgcagtggcacaatctcaatctcagctcgctacaacctccgcttctcaggctcaagcgattctcccacctcagcctcctgagtagctgggattactgacaaatgccaccacgcccagctaactttttgtattttttgtagagggggttggcagggcgggggtctcacttagttgcccaggctggtctcaaactcctgagctcaagagattcgcctgccttggcctcccaaagtgctgggattagaggcgttagccgctgcacctggctcaatcctaggcttttaatatgttggagagtagaatgaggaggcttcttatgacatgttatttggaaagttattgagagaacaggaaatatttctcgtcctcttcctcttgtacctataggcagagaatccacccaattgcagaattggagattcattcacaaaggtcaaatgtcatcagtcacctgaattactgcaaaaatctcctcactgaaccatttttttccttaccaatattcattgagcactgactatgggagagccctgagtcaggcattgggaatacaagtaggcataatattctgaaggaataaacagtccagatggagctagcctctgcttttataaagtctaagtttaaggccttaagatttctcctagactcaaattaaacagtatttgatatggtttggctgtgtccccacccaaatctcatctcgaattgtaagtcccacaatccccatgtgtcctaggaggaacccaatgggaggtaattgaatcttggggatgagtttttcctgtgctgttctcatgatagtgaataagtctcacgagatctgatggctttaaaaacaggagtctccgtgtaccagctctctctgcctgctgccatccacgtgatatgtgacttgctcctccttaccttctgccatgattgtgaggtctccccagccatgtggaactgtaagtccaataaacctttcctttgtaaattgc

SEQ ID NO: 2201 - DNA, 4001 bp, Homo sapiens
atctctactaaaaatacaaaaaaaattagccaggcctggtggcgcgttcctataatctgtaatcccagctactcgggaggctgagacacaagaatcgcttgaacccaggaggcagaggctgcagtgagccgagatcgtgccactgcactccaacctgggcaacagagcaacactgtctcaaaaaactatagtaaaaccctgctaactcaaaaacttactttggaaacttatagagagcacagtggttaaaagcatgggtttgaaattagaaagatcagggcttggattttttttttttttttttttttagaaatatcaacatgagggcttagatttgggttctactacttgtcagttgtctttctaatttcaaagcccatgcttgagcacattactaaacctaaaattctttttttttttttcttgctctgtcgcccagactggaatgcaatggtgggatctcagctcactgcaacctctgcctcccgggttcaagcaattctcctgcctcagcctcccaggtagctgggattacagacgcgtgccaccacatgcagctgattttttttttttttttttgaggtggagtctcactcttgtcacccaggctagagtgcagtggtgcaatctcggctcactgcatcctctgcctcctgagttcaagcaattctcctgcctcagcctcctgagtagctgggattacaggcccccactgccatgcctggctaatatttgtactttttagtagagacagggttttgtcatgttggccaggctggtctcgaactcctgacctcaggtgatccgcccacctcggcctcccaaagtgctgggactataggcatgagccaccgcgcccggcctaatttttgtatttttaatagagatagagtttcaccatggtggccaggctggtcttgaactcctaacctcgtgatccgcccgctttggtctcccaaaatgctgggattacaggcatgagccaccatgcctggccagattctttacctgtaaaaaaggaacaatcacacctaccttttaggatttctgggcgaattaaatataaataatgataggcttagcacacttcttggcacaaaatatgtcaatatgttgtagctattattagtacagaactcaggatcatttctcttggcatcagtttctacagaataatcctattaatgttggaaatgtaggtgattaagttgaatccacactgacactctgacataacctggaattacatctttgaataatcctcaggatcagttggcttatttaacacttttctctagggtacagaaaaatgctagttatttgagctttctaaatttagcatgccaaaccaataaaaatttaccagttatccaaaagagattgtgataagttttctattactcacaaccgttgaccagttactttttgtttttgtttttgtttttttgaggtaagagtctcactctgttgcccaggctgaagtgcagtggcacgacctcggctcactgcaacgtcggcctcccaggttcaagcgattctcgtgcctcagcctcccaagtggctgggattacaggcgcccaccagcacgcaaagctaattttttgtatttttagtagagacggggtttcgctgatccacccgcctcggcctcccaaagtgctgggattacaggcgcgagccaccgcgcctggccaaccagttacttttgcttgcaccaagttgatcattcttacccctagatgaaaagcagtatcaaagcacttttggttgcaaatgatggaaattcaattaatattagcttaagcaaaaaagaaggtactgacctcaatgttgccagagctctgcttccttgtgtgtgctggcatccatctgcagatagcttcttcctgcacagcctgatgttaagaccatgcgcagcttcaggctcatgcggttctttcagtttgaaggcccaaggaaaaaaagctcctttctttcttagtagctacaaatcttaaagaaataaattttaaagataattctggacgggcgcggtggctcacgcctgtaatctcaacactttgggagcccgaggcgggtggatcacgaggttaggagatcgagactgttctggccaacatggtgaaaccccgtctctactaaaaaataaaataaaataaaataaataaatacaaaaattggccgggtgtagtggcgtgcgcctgtagtcccagctactcaggaggctgaggcaggagaatcccttgaacccgggaagcggaggttgcgatcgcgccactgcactccagcccgggcgacagggtgagactccgtctcaaaaaaacaagattcttagttcagagtaggtggggcactgtgctcatctcgcgagaaccacatggccaggggaggggcgattccccaaaaggaaatcaagatctgattccagacaaaaaggaatggtaggggggttcaaagaatggtagggaggttcatccctgtgaggctggtggggcggggtgtctaggagggtgtccctgaggtttctggggggtcgcggacacttcttgggggatgcccaagaggcagggctcagtaaagtctaatttcagagctttatttgcactatccctaagtttccgcagagtaataattgaattaaccagttttctgttttcttctgtccttcatttgttttaggggagggttcgaagagatgtgcctgtacctgcaattggcgtcctctcttctttagctgttattagctctgagcagtcccttttgtatagggaattgtgttaatttttttgtgcacccagagctatgtaccttttgaaagatacatgggaggcactactgaaagtactttttttttttggcgtaaaatggataaatttggatatcataaaggctgtataagtgtgttcatgtgttctagagcctttcctatttctctaatggggaagattatcaaataatgaggaatataaacgtaagtgtgcatggctgtcaatgaaacagggaaagcaaagggagcatgtatatttacccaggaatacagtacctttctctttctctttcacttttttatctcattctttactgtttaaaaaatatattattccagttagaacgaataatatctagtatctaatagcacaacagtatgactaaagtcaataataatttcattgtacatttttttaaaaaacagagtataattggattgtttgtaacacaaaggataaatgcttgaggcgatggataccacatttaccatgatgtgataattacacactacatgcctgtatcaaaatatctcatgtatgccataaatatatatacctactatgtacccacaaacaataaaaatttttaaaaaattttttaagaggtatggtagagtgtgcagaaaaaacaatagatgcccggctgggcacagtggttcacacctgtaatcccagcactttaggaagctgaggtgggcagatcacctgaggacgggagtttgagaccagtctgaccaacatggtgaaaccccgtctctactaaaaatacaaaattagccgggtatgatggcacatgcctgtagtcccagctactcaggaggctgaggctggagaatcgcttgaacccaggaggtggaggttgcagtgagcctagatcacgccattgcactccagcctgggtgacagagtgagactccgtctcaaaaaaaaaaaaaaaaatagatgcccacagcagatagtttgggttggattacccaaaaacaaagacttcagcatggccatcttgactctattaaaatatacatttgtgccaggtgcggtggctcacctgtaatcccagcactttgggaggccgagacgggtggatcacctgaggtcaggagtttgagaccagcctaaccaacatggagaaacccccatctctactaaaaatacaaaattagttgggtgtggcggcacctgcctgtaatcccagctactcaggagtctgaggcaggagaatcgcttgaacct

SEQ ID NO: 2202 - DNA, 4001 bp, Homo sapiens
ggaggatccagcaaaggagactgagaagagacacctgtggccaagaagtgtaccagacgccatgcgggaaaagtgacccaggctcaggggtcagttgtgtgaaatgctatgcaatcgatcagtgtcacaaggctcactagtgatgtgacagagctctcgtgggagtggaggaaacgacttcaagagagaaggcgcagcaactccatccccaagtacatacctgacagaggcaaaacagatagatgcactgcaacacaagtcccaccaaaactggccaaaacaatgtttgttttgttttgttttttgagacggagtctcgctctgttgcccaagatggagtgtagtggtgcgatctcggttcactgcaagctctgcctcccagggtcaagtgattctcctgccttagcctcctgagtagctgggatttcaggtgcgcgctaccacgcccgggtaatttttgtatttgtagtagagaagtagagacggggtttcaccatgttggtcaggctggtctccaactcctgacctcaggtgatccacccagctcggcctcccaaagtgctgggattacaggcgtgagccaccacgcccagcctccagaaccatgtatttgtcatccaaaaaatggggccacccaaatgcccttcaattgtagaacaaatcagtaaattctggcacttgcattcaatggaatattatgtggcaacgaaagcgaatgaactgcaatccactctgatagcgggcaggatagggttccctttgggcaggagagaggaggagggcctgggagggggtccaggtaggggttcttctcgggggtagtgatgttttatttcttattttgagatgaggtatcgctctgtcacccaggctggagtgcagtggcaagattatagctcactgcagcctcgaagctgggttcaagcgatcctcctacttcagtctcccgagcagctgggactacaggggcacaccaccttgcctggctaatttttttaaattatttgtagaggtagggtctccttctgttgcccaggcaggtctcgaactcccaggctcaagcgatcctcccgcctcggcctcccaaagtgctgggatgacaggcttgagccaccgcgcccagctggtaacgtttcagttcagtgacgttcacttggggaaaactcgctgggctgtatacttatgattcgtgcatttttctgcatgtacattacgtatacttcaagcaaagcatttatcacaaaacagaacaatgggagcagagggaatgggaacgatgagcacaagccccccttcggaatgtgcccaaaagtgggtagagaaatggtgccgtgactggaccttggagaaagcgcaactgtgactaatgacgattgctcctgggccgggccgggccgggccgggcgagtgctggagcagactccaaagtctccagcgtcctcccgcgaccctgcagagtcccttcccactgccaggacgcccctgggggttccactcctccactgcactgcccaggtgccgggctcccttcaggaccgcgcgcggcgggggctgcagcgaccagggacacagcaaaccccggccgcggcccgctagtctgttcagcaaacacctgctccgctccctgcacgtcccggccctggccccgccaggtgcgccgctgcccctccgtccgccactccccgcatccccgcggcgggcgcggcggcgccagcccctctgggcccaggacctcggcctgtccccgggcccagcggccgcacgcctttgggcctcccgcccggcgcgccaaggcctcggagtcggtccgcgggccccgggtctgggcctcccgcgcccccgggtccccgcctcttaccggtggaaggtgagctgcttcctgcggctgctgtagcggttgcagcactgccgggccgcgcacgacttcggcatctcgagccaggcctggctgcccccaacaaagatggcggcggcggcggggcctgcggagaggggagggacctgcggggaggggcggggccgctgggaggtggtgacgggcctggctcgcctccagggcgcgctcatcctgccatcccagccacccgcgtctccccagggtcggacgggacccggggcgccacgtaaaggggtgctccgggccccaattcaggcccgaaaccccaactcctagccttgggcctgtgcaagtcttaccccattcgccaatgctggtcgcctttcacctccttgctttgagcacccaaccaggacgcatagccactcacaggcttggacaactggaaaccaacggccaacccctcagtgtttttagggctttgaattgtgaataggtctggactcctctgacgtcactggaggtggtactagttggccactggtggtgtcagttcagaggccagacagctcactgcccttaagtttggtcacagggaacccccaaacgtgaagaggcaaaaagggcaactgaaggggagggagattccagttcaggccttgcagaaactccgaggctgcagctttctcaaagcagcctatagggaaggcgtcatcttgtaagaagaaaaaaaaaaaaatcggccaggcgcagtggctcacgcctgtaatcccagcactttgggaggccgaggcaggcggatcacctgagatcaggagttcaaggccagcctgaccgacatggtgaaaccccatctctactaaaaatacaaaaattagccgcacatggtggcgggcacctgtaattccagctactcggaaggctgaagcaggagaatctcttgaacccgggaggtggaagttacaatgagccaaaatctcatcacagcacttcacagcctaggtgacaagaacgaaactcaagtctcaaaaacaaaaaaaaaatcaaaagtaggctaaccactcactggggcttgagctaatcctcaatctgatgaagaaactgcaaaaaccattcacatctactcgtcctgtggtttgtttctaaggaattcaccagcaaggtaccttaacaccgtgggcattttccatcctgctaagtgcacactgagacgctgccttcccagagacttgatgtaatcatgctttggggaggtagcaaggagaaaagaaacacaattgtccttcagcacagaacgcaatcgcctgaaccttgaatcatgaacctcaaagtagcaatatatttatttacaaaatatacagtttcacagaaacagcttcgctttatacacataaactttaaaattacacagaaccatgtaaacgatgtgaagtgtctggcctggccaaagccaatgggagggcctacttttggggtgacatccctccctcccctcacttcattagccaccaaccaggaaccacagatgggtcgtgcctaatttgcatataaagaagctgattgcagctgcccagctcaatctaacacaaaaaccaaggtgtccgacttcttagacaccacccacagggacagatctgctaaaagaacaaaaatgcaatcaaggaaacaaaatggagatgagtatcacatgcattccagaggcatcgaaccttctagcacacgtgacagttgccagggccggcagttccattctaaagtcacatggattcttaaatgcacctttaaaagcttgtggaatttttttttttcaaagcagaaaaacactttggagcgctggttattcacgtggtgaagacactggacaggcgttatctcagggtagatctttggcaaattcctctccaatgcgtcctggctgtttgccctcgtcagtttctaaaccagcttactatttttctctaccgaacctcccccttggggatcttcacaataaactggcttcagaaactatttctctctagtttcgtgttaatacaagcaacagaacttttaaaaaaataagacggttggacaagtgtgaaagatactaggacaaaaaaaatgcctctgattagccaaattacggttcaagccccttggtgcttcagtgggagaaggtgggaag

SEQ ID NO: 2203 - DNA, 4001 bp, Homo sapiens
tttgttttgttttgttttttgagacggagtctcgctctgttgcccaagatggagtgtagtggtgcgatctcggttcactgcaagctctgcctcccagggtcaagtgattctcctgccttagcctcctgagtagctgggatttcaggtgcgcgctaccacgcccgggtaatttttgtatttgtagtagagaagtagagacggggtttcaccatgttggtcaggctggtctccaactcctgacctcaggtgatccacccagctcggcctcccaaagtgctgggattacaggcgtgagccaccacgcccagcctccagaaccatgtatttgtcatccaaaaaatggggccacccaaatgcccttcaattgtagaacaaatcagtaaattctggcacttgcattcaatggaatattatgtggcaacgaaagcgaatgaactgcaatccactctgatagcgggcaggatagggttccctttgggcaggagagaggaggagggcctgggagggggtccaggtaggggttcttctcgggggtagtgatgttttatttcttattttgagatgaggtatcgctctgtcacccaggctggagtgcagtggcaagattatagctcactgcagcctcgaagctgggttcaagcgatcctcctacttcagtctcccgagcagctgggactacaggggcacaccaccttgcctggctaatttttttaaattatttgtagaggtagggtctccttctgttgcccaggcaggtctcgaactcccaggctcaagcgatcctcccgcctcggcctcccaaagtgctgggatgacaggcttgagccaccgcgcccagctggtaacgtttcagttcagtgacgttcacttggggaaaactcgctgggctgtatacttatgattcgtgcatttttctgcatgtacattacgtatacttcaagcaaagcatttatcacaaaacagaacaatgggagcagagggaatgggaacgatgagcacaagccccccttcggaatgtgcccaaaagtgggtagagaaatggtgccgtgactggaccttggagaaagcgcaactgtgactaatgacgattgctcctgggccgggccgggccgggccgggcgagtgctggagcagactccaaagtctccagcgtcctcccgcgaccctgcagagtcccttcccactgccaggacgcccctgggggttccactcctccactgcactgcccaggtgccgggctcccttcaggaccgcgcgcggcgggggctgcagcgaccagggacacagcaaaccccggccgcggcccgctagtctgttcagcaaacacctgctccgctccctgcacgtcccggccctggccccgccaggtgcgccgctgcccctccgtccgccactccccgcatccccgcggcgggcgcggcggcgccagcccctctgggcccaggacctcggcctgtccccgggcccagcggccgcacgcctttgggcctcccgcccggcgcgccaaggcctcggagtcggtccgcgggccccgggtctgggcctcccgcgcccccgggtccccgcctcttaccggtggaaggtgagctgcttcctgcggctgctgtagcggttgcagcactgccgggccgcgcacgacttcggcatctcgagccaggcctggctgcccccaacaaagatggcggcggcggcggggcctgcggagaggggagggacctgcggggaggggcggggccgctgggaggtggtgacgggcctggctcgcctccagggcgcgctcatcctgccatcccagccacccgcgtctccccagggtcggacgggacccggggcgccacgtaaaggggtgctccgggccccaattcaggcccgaaaccccaactcctagccttgggcctgtgcaagtcttaccccattcgccaatgctggtcgcctttcacctccttgctttgagcacccaaccaggacgcatagccactcacaggcttggacaactggaaaccaacggccaacccctcagtgtttttagggctttgaattgtgaataggtctggactcctctgacgtcactggaggtggtactagttggccactggtggtgtcagttcagaggccagacagctcactgcccttaagtttggtcacagggaacccccaaacgtgaagaggcaaaaagggcaactgaaggggagggagattccagttcaggccttgcagaaactccgaggctgcagctttctcaaagcagcctatagggaaggcgtcatcttgtaagaagaaaaaaaaaaaaatcggccaggcgcagtggctcacgcctgtaatcccagcactttgggaggccgaggcaggcggatcacctgagatcaggagttcaaggccagcctgaccgacatggtgaaaccccatctctactaaaaatacaaaaattagccgcacatggtggcgggcacctgtaattccagctactcggaaggctgaagcaggagaatctcttgaacccgggaggtggaagttacaatgagccaaaatctcatcacagcacttcacagcctaggtgacaagaacgaaactcaagtctcaaaaacaaaaaaaaaatcaaaagtaggctaaccactcactggggcttgagctaatcctcaatctgatgaagaaactgcaaaaaccattcacatctactcgtcctgtggtttgtttctaaggaattcaccagcaaggtaccttaacaccgtgggcattttccatcctgctaagtgcacactgagacgctgccttcccagagacttgatgtaatcatgctttggggaggtagcaaggagaaaagaaacacaattgtccttcagcacagaacgcaatcgcctgaaccttgaatcatgaacctcaaagtagcaatatatttatttacaaaatatacagtttcacagaaacagcttcgctttatacacataaactttaaaattacacagaaccatgtaaacgatgtgaagtgtctggcctggccaaagccaatgggagggcctacttttggggtgacatccctccctcccctcacttcattagccaccaaccaggaaccacagatgggtcgtgcctaatttgcatataaagaagctgattgcagctgcccagctcaatctaacacaaaaaccaaggtgtccgacttcttagacaccacccacagggacagatctgctaaaagaacaaaaatgcaatcaaggaaacaaaatggagatgagtatcacatgcattccagaggcatcgaaccttctagcacacgtgacagttgccagggccggcagttccattctaaagtcacatggattcttaaatgcacctttaaaagcttgtggaatttttttttttcaaagcagaaaaacactttggagcgctggttattcacgtggtgaagacactggacaggcgttatctcagggtagatctttggcaaattcctctccaatgcgtcctggctgtttgccctcgtcagtttctaaaccagcttactatttttctctaccgaacctcccccttggggatcttcacaataaactggcttcagaaactatttctctctagtttcgtgttaatacaagcaacagaacttttaaaaaaataagacggttggacaagtgtgaaagatactaggacaaaaaaaatgcctctgattagccaaattacggttcaagccccttggtgcttcagtgggagaaggtgggaagagtctgcctggtggcctggcacaaaggtgccacatgaaggggaagcccccagcagtgagaacgcgggcccatcccactgaaaacaaacatgacttgcttgagcattcttccctttccatgccttaaagaaacaatgcttatgaaaacctaccaatcaattagaaaatgttttgagaacaagtacttgaactgctgaagagcagtgttcatttcagagaaagccggagcccctctccctcccagccccagaactaccagtgttccagggcaccctgccctcgagca

SEQ ID NO: 2204 - DNA, 4001 bp, Homo sapiens
atatcaggactcaagcctcaccctattgtttggtacatgggctcctaaagcaccttataagcaccccataccaggtgcccctgatgtctgggcacagcctgatgggaccttggtccctagtggaggccaaggagaatgaggaagcacttgggaagtagggatgagggagagtgcttaaggaggtcaccattgcaagaaaggagatgcccaccagtcacctttgttgatcttgcctacaacagaggcctccagccatcgagtgttgtcttggcgagaatagaggccaaagaggacaccaccctgcttggggggcaggcggaaggtggataagaggtagatgtccccagcagtgagcaaggctgtccggatcttctctgccacagctaccatctgccgagactcgcccacagtcagcaggtcaattactggtcaggcaggggttatcaaggttagagaatgggatcaaatgctaaggtatgccctcccccgagcccacatcaccccctacccccaccaccaggcagcgttagtcacctcaaaattcaacccttggctgggcatggtggctcgcacctgtaatcccaacaccttgggaggttgaggcaggtggatcgcctaaggtcaggagttcgagaccagcctggccaacacggtgaaaccccgtgtctactaaaaatacaaaaacaacaacaaaaaagaaaaaaaaaccacctagccgggcgtggtggcgggcacctgtaatcccagctactcaggaggctgaggcaggagactcgcttgaacctgagaggtggaggttgcagtgagccgagatcgcgccattgcactccagcctgggcaacaagagtgaaactccatctcaaaaagacaaaacgaaaacaaaaaaaaacctcaacccttgttgctctcagaggacagaggcactgtgccttcctttccccattattgcctattactaccttccaggaacctgcaggtttgagactcacttggaaacacagaaacagcaccccacaaatttgagatgcccccaccaggtggcgcaaaggagatgctgtgctgatcccccacaggagtggcacctggtgtccacaacgtagaaatggaaggcagcttctctttccactcctgggtttggctcgttccacaccctagttcccctcctcccatcctaggggcgcagcacactcgctctggataagaacagctgcccactgaggactctaaccctcccaccatctgggctatctcccacgggaatgtaggacccagctcctctgcctcctgtgtcctggccaatctgtggttttccctccagccagtaaagaatctatgcctgtgtcatctgctccagctacctctcccacatccatcggcccatcccaccaccagacctccgggagagcccaggcttcttggtccccacccccgccctgtccttgggcagccaggagcccagggggacgaagcccagggacctacagtacgcccaccttcaggctgctctcccagaccctagggtgcctacagatgctcaggaaccaccccagccaggcagcctgagcatccagttcctgagtcctctgccctggcctcatgcctgaccctgtcctgttccagctcccccactactctccggtgcccactcctctccaccaggccataatttcaccaactctaggcagtcttaagttttcctctggctcaatttctggactcttcccctctccccttgcccacatgttctctgctacttgggctgagggcaaatggggaagaagcagagagcggtctaagaggatggagacaggcttaccctgcagatcctgactggcagatgtgaaaaagcaaaggaggagaagagccagggccccccgaagttcctgcgtctccatgcctctcagccggctcactacccctggcaggcaggcagctgggaggggaaaaggctaggcggagagagcaggagccggggggcggagggacagaattggagggggggccagcaggcgggtgagggggggctgaaacaaagagctgccaatcaccctggaggcatcatcagctctgggaaccaggggcactgggaaagaatcctggaggcctccctgctttctacctctccctaatgatcctcccccaggtgcctccctctccgcagtcatcattgttgggggtctcggcacacagcgctaccgaatgccactgttttctggaagccacgattgtggaaggcaagaacccctggcaggggcagtgctagacagtgggcattattccacagctggcaggaaaggatgccaagggagtggccgcaactagcttgctatagtgcccagggatgcccacatggcatgaattttgctgttctggcggagcaagtgctctttattagggtggggggtcccctgacaagtgcctgtttctccattttccctcattcgtaggaaagcttgggagtctggaagcgtctgacgggaactgaagggagaatctaaagcagtggtcagtgaggtcagagtgaagaaaccaaaaaagaggaaagggacaccagggacaggcgcagaagaccaggggtacaggcgaggagccaaggaccagactgtggaacactgtgggtactagcggacgggccgtgacccggatgaagcagaggggcgcctgagttcccgtcacctaagcgacagcctgcgagcctctcttcccctcccccacccaagccccagcccggcctccgctccggccgccgccaccgcccctgttttgtttccatggcgacaggcggcgcagggcccgctccaaacataacgcgctgtggaaaacatgctgctcgggggacccccccgcagtccccgctcggggacgagccccaaggggccctggagcagtacaggccacgtgcagtttggcaagagcccccagacctggcccaggcgcacaagaccccgctctccagagcctgccgcgccttcaggggttcggggctccacttggacgaggcgccgtgactctccgaggcgcgccgggccgacagcgctgtcccgctacgtgggccacctctggatgggccggcggccgccctcccccgaggcccgcggcccagtcccccgcagttcagctgccagtcgggccagaagaagcctcgcctccccggggatctccccaggccccctgaccgcaacgatcggaggggcggtggcggggggcgggcccaggcaggggagggcagaagcacacaaggaagtgtttccgggacagagggtgggcaagatggcggcgcccatggagctgttctgctggtcagggggctgggggctgccgtcagtggacctggacagcctggccgtgctggtgaggggtggcgccggcgccctctgctgtgccctgatgactggggagggggccgaactagccaagcatccaaaccttgccagggctactcagcacgggcgcagtgggggaaactgaggcagtcaaagagcgtacgtggccgatatggcctcagtgccctatgctgtagttttctaggcttaatgcagcaatgaaaagacgcctggttgggagttcaggtgatgggttctagtccttgctcatccattcactggctgtgtgaccttgcggagatcctttctctttgggcattttttttctccattcggaggtttactaggctggactgtctcagggacctactctagcttggaattcctgccttctcctcagcccccttctcctcttcctcctcacttaacagcatttactgaggctattgtttgttagaccaaacgactcacagccaggctttgtataaagagcttagcaatcagacttcctttgcttcatttattcattgactccttgctttaaagaggatctattagatttcttccaaatattaaacattgccaggcaaagatgaataaaatttggttcctcccttcgagtttacagaaaggcagataggtaagcaaataaatataataaaatattcacatataagt

SEQ ID NO: 2205 - DNA, 4001 bp, Homo sapiens
ctgcagcatgtgtgtgtggtgtccagtagccacacagggcataaatgagccacagccactgcccaggctccaaggcgccggcatggctggctggcgttccctaccaggtgcctgcagtctccccctccccattccagggagtctagctctgtcccacagcaattaagctcctctctctggtggaggaaccatttgcataggaataagaggttcttcccccaggcatccttatctcctctccaacccatcagcagtatacttttaaaggaggtttttcttttccttttggaagacgttttgctcttttgggaatgatgaggattaccgtttatattttctgtaaagttttgtgcgaaaggatttgtgaggtaagtcgtaagctgtagccaatctgtgtgttttgcatgtctttctgtatgctccacagcaaacttcgctgcaggcctccatcttgttttacgtccttgggggcgtggcctgtaaccccattgcatagcttcgtttagcccggcatggcccagattcatcctggcttagggaatgagtcctttctggtttggtatctgtatgccctttcgctatttgtcgattcccctgccctccaccaaccaccttggattttcctttctctgagcctttaagtaaagtttgaaagccagaaatattggccgcttggtggagctaaagttagataataagggtgttaaaagaattttcttaaggagtgctcagcttaattaaaagtagatatctaagttgtaattatatttataaggcctttatgttttccttttcttggaccttattttgctggaaaaagtgtttctttgcggtcgactgagttatttttctccattttgccttgccacttttaatgcctgcataagaggggcgatctctgttttcctcatggaaccccaggaattaaaagcagatagatccctctccctgtgatgaaagatcttatggcaactgggttttcttctgcctgtctgtgtagttatatatgtgttgtgtgtgatgtctataaaaagatctctaattaattgacctaaaggaagataagcgtttggatcaaatatttttttaaagggaagataaaagctgtggtatcttttagttcacgtcactttaatctttgaaaaataaaaacagcctcaaatattattggtaaaatacagatgttgtcaaaatataaatagacagactaaattatgcagttcaggtagcgccctgccgaccctgtctcttaaaaaacaaaaaaacggggtcacctttccatcccttttctaacggtttgaatctcaggactgtattcctaggcccctgttgcttatgctgccctgtggtgcccaggtgagcttttattctgagattggctggttggggtatggataacaatcgaaggctctgttaccgcaggcgtgtttctgagtcctgctcccgccccatgcccgagggtgcccagactcaccagctcgggtcgcggctcgcttcccggcaggcgccggcctactggcggcaggcacagagcccccagcgtgcggaggcgcgcggcgcagctcctcagcatggctccgggccgcggggccgcgcttgctctagccctggacggcgcactctacctccgccacaagagcgcgcgtgcgagttaacccctggggtggacgcagggcggggcttggggaggaggcggtgcgcactactggcggctggctggccggggtgtgaggccggcggggtccgggtagggcatcgctgttgagtctatcttctggttccggccttttctttccgaagacctcccgctgcggccaacagccgggccacttccggggcttctcaaaggcaagaggagcgcggccggagcggatcccggttatcgccttgggcccctcagcccctcagccccggaacccgcgcgccgactggaggctttgcggtcatccttcccacatgacccagggcgtacgcagtgctccgtgtccccaagtagttatccctcccccggaagactgaagtccctggggcgggtaggagcgcacgctaggagtagtatgaataaagtgttttcttggaggtcatgggcaagtctctggacagggttgatagtgctgatttatagagggcagtctgggcacaaagagcatttatacgatcgaaaagctgctttccctgccaacagccccataccctccccaggagcgcgcttacgccttaaaagactcttttgttatgtaaactgacagttaaattaaacgaaggtaatggatactaaaggcgtaacaggtattgtaactattttactgttatcgatgcttttgaggttacttacctcgcttgtattcgtatggtgggaatactaggcgcataccttctgagcttcgaattcagtaacctcactgggaccttgaaatcggactgggttggagtattcccattactcagataatgcaaatccgggccatcatacccctttatttttaaatgcttaccagtatgccatagccctagtccatcctaaggtgaagactctaatgggttttttttgagacagagtctcgcagagatactgctattgcacttcagcctgggcaacatactgatgccccatctcaaaaaagcaataaattaaaaagaaaactcgaatgacctgaatgcattagatattttgccttgattcctttcccatgaacaactccagcagtttgtcagtaggtaagaacacctagatacattttaagcctacactattaactgggggaaggtgtaacattctgagagaaagggaattggggagagaaggcaatgcagttaggaggggccccttggaatcctagagctactgaaccgaagatcaggcataaaggatggttgttgagattctgtaattctaagaggttgtattctgatatctcctaagcaccccccccaacctcccacattccctttatctcagttgtcttcctttttaatatattaatagtattgcagtttcctggtggcagggatggggtcagattgccttattaattgtaacaacgtgcacgtagtgcttgaatacttacttagcagcaagaatccaaagtatctttggtgtctgttgtcttcccatgttgtgcgtgcagatggaggcacgagcataacgtaaatctctaaaattgagatgactactgttaatgaatagaaaagtttattcaggtaacttaaaattgcatctatttacaatttacagtgtagtcaaatcaatcaatacctatagacttcaaccctgctaagattgtctatatgattaatgtaccaatagctcacctaacagcttccttttgtttttttgagatggagtctcactctgttgcccaggctggaagtgcagtggcatgatcttggctcactgcaacctctgcctccagggttcaagcgattctccctgcctcaacctcccgagtaggtgggattacaggcgcgtgccaccacatctggctaatttttatatttttggtagagacggggtttcaccctgttggccaggctggtcttgaactcctgacctcaagtgatctgcctgcctcccaaagtgctgggattaccagcatgagccactgcactcggcacctatcagcttcttaaaagaccttagacttagggcaattagaggtcagttacactgagtttaaacttcattaaattttaactctaaatttttcaagtagcggcagtgcatttagttaagtcatccacactcttgcatggcttactctgggatattcgtgttgacagcacatataaaatgtctggtcagatttggaagaggaagggcaggttacagtctagaaataggattgataggctatggaagtgaaggagtttgaagcttgtatggtttaggcaaggaacaaatgttcaatcttgatagaactaggcttcgaataagccaatggtatgaaacttaatagtcttctcaccattctttaattttgtagacagctttattgaggtgt

SEQ ID NO: 2206 - DNA, 4001 bp, Homo sapiens
cttcatcactaggcaggaagacaacatatatgagtgagagagacagggagatacacatgcgtgcacacacgagtgcacacacacacacaagaaggtggaagctctatcattaggatccattaggatcattaggtgtttcaggagtgctgctccagaccccgcacagcagggatgatgtgcagggcctcagtggaaggggtgtggggtccaagggctttcatggggttggggcggaaggcttgggatgaggcttgatagttagggaggggcagtcagtgagaagtcggggcaggagctgggctggctgtcctccagtggggacatgcttggctgggagcgaaggtgggcccaccagggtgtgctgcttcagatgggaggaggggagctggagacctgagaggacacccgccgcctgttgcctggggctgcagcatcaggggtggagttggacagcaggaagaactcgctgagaactggaaggcggtctgtgaagttgcttctcagtcttagaacacagggaagggcggctggggtgtgtgtactcatggtcctgtccttacctgaggaaactgccagtccagatgggagcttgagtccccggatgtggtctctgttggacttgaaggagggcagcttgatccagccgctagacttagtcttctccagaaattcttggtacaggctcagcatgtccgaacaccagctggcattgggaagagcataatccttcaagtctgtcttctctggcaagaatcttgagaactgggcaggaaaaatcagaatgactagacagcatcctggaggggggctgctgcctgggctcgggacctctaaacagctgttcctgggtgctggggcttctcaatcccttctgccagagtatcgatccaagggaaagggcccatattccttgcaggggggctgcggacccctatgggtgacggggcataaggatgctaaagagcaagggaagggcgggcagggagtggggccagagatgatgggcatgctgctcgatgtggtgccttacccttgttctgcttaaaacatgtgagcagttctttaaagttgacaactgctcatattagcctcactgtacagatggggaaactgagggaatacggccaaggttgccaagcatgtgactgtgagagctggtggtcgcactagatgctgtctcctctgcagggcagggtcacagttgttgaggaccattctagcaacccccacctcaggggctactccagctctgcccactgctgtgggcctgcctgggcagggtggctcctttgaaacacatttgggcccccacagaggtgtggtgccatggctggggcacagactatgtgcccatctgtgtgacgtaaggaagtcctctgtagcgtcacctgctcatacaccagtcacaactgtagacagcatgtgagctgcttgccaatgccacagatggggtcctctgtctggggataccccagctttgctgcagtagtctgagtcccacaggaggaaagtcatttgttggtggccacacaagacacagagccagatgcaggtctcctggtagttttagttttgaatgggggcaacttggtatcccagagcactttctctttgccaaatcaaatagctcctccgaacactgcccacctgccctggccatgggctgggaagaggagatttggggtgctccttaagccctaggctcctgggaaaacactgcccatctggctgagctgggaactcaccatggagtctgtggaggatccaaatgctgaggcagggttgagtctgggcaggatacggggggcctcaagaaggcctctgtggtggccaagtcttgctgccacctggaagcatctccttatcatggccaagtgcaaggatccagccctgcttggatggagggtcttggctgactcccaaggagtgctttcagctgcacttggggccgcttctctcccttctgttgcaggctttctttcagagagctaggcgaggctgggctggtgtgctgcaacacccacagatgctcggcgcctttagctggtctaggagccccacccagtgcttggggagggacagatgctgcttgggcatgaaaaggcagcaggactggcttgagttgcaaaaggagtaaacaagtacataaacaaatagtatggggtatatagagccttggagagctgcctgggggttctgagggagaatccaagaatatttccagaaggataagggaagcctgtcccttgattggagggtgctggtggagtgttcttggtatgtgctctgcagtgtataccggactctgaaaactctggtatgattttgtgactcagaaaaccaactcacaggccgggtgcggtggctcacgcctgtaatcccagcactttgggaggccgaggcggcggattacgaggttaggagatcgagaccatcctggctaacacggtgaaaccccgtctctactaaaaaaaatacaaaaaattagccgggcgtggtggcgggtgccggtagtcccagctacgcagggggctgaggcaggagaatggcgtgaacctgggaggtggagcttgcagtgagctgagatctagccaccgcactccagcctgggcgactgagcgagactccgtctcaaaaaaataaaaataaaaaaataaaaaaaaagaaaaccaactcacagccttagacacctcttttttttttttttttttttttttggtgagacggagtttcaatcttgtcgcccaggctggtgtgcaatggcgtgatctcggctcactgcaacctccgcctcctgggttcaagtgattctcctgcctcagcctcctgagtagctgggattacagacacacaccaccacacccagctaaattttgtatattttttttagtagagatggggttttgccatgttagccaggctggtcttgaactcctgacctcaggtgacctcccaaagtgctgggattacaggcgtgagccaccgcacccggccaacacctcttcttatatcccggacaagggttagcacaggagagtttcacctgctggtctctggctggggataggagttggaggtgggggagggcttgacagggagggcagaaaataatttgggaggaaacagcttggcagggatactctcatgttttgggaaccccgtgcccagggagtggctcatgtcagcaggcagtgctgggagtgaggtgggcgcggcagtgaggctttgttgagtgggaagggacactcagccaacatctgcaaggcagtgggatttggtggtggtgtgtcttctattgaatttaaactgccaattttcaattaaaagtctcagttttaaattgactaaaataaaagcatgttctaaagatcagtcctcgcgcagtggctcaaggctgtaatctcagcattttgggaggccgagtgagaccttgtcttaaaaaaaaaaaaatcagaactgtgcaaaggtggaatcataacagtgatgatgacgataataatagttgtgatgattatgacattttggcaggttccaaaagatgaaactgatttaatgcggaaatttaaaagatttggttcaccctctgtatttggttgccctagaagaagactagaatataaatatttcccctcacctcctgcaaaggtttgaattaaacttcctcaaggactgggggaaccatttttttttgttgttgttattttgtcagagtctcactcttattgcccaggagtgcagtggcaccatctcggctcactgcaacctctgcctcccaggctcaagcaattctcctgcctcagcctcccaagtagctgggattacaggcgcttgctactacgcccggctagtttttatatttttagtagagacggggtttcatcatgttggccaggctggtctcaaactcctggccttggctgatctgcctgcctcagcgtcccaaagtgctgggattacaggcatgaggcaccacgcccagctggaagtttttttggttgatt

SEQ ID NO: 2207 - DNA, 4001 bp, Homo sapiens
tcccaaagtgctgggattacaagcatgagccaccacaccctgcaattttttattttaaaattttttgtagacatgatgtctcaccatgttgccagggctgatctcgaactcctaggctcaagcaatcttcccacctcagcctcccaaagtgttgagattataagcatgagctatcacacacaacctatgttctattaaacaaaaaacagggcctggtgtggtggctcatgcctgtaatcctaacactttgggaggccgaggcaggcagatcacttgagtccaggggtttgagaccggcctgggcaaaatgacaaaaccccatctttacaaaaaatacaaaaattagctggacgttgtcctggtgcgtgcctgtggtcccagcctctcaggaagctgaggtgggaggatcacttgagcccaggaggtcgaggccgcagtgagctgtatcgtgccactgcactccagcctgggcaacagagccagactctgtctcaaaaaaaaaaaaaaaaacctaggttgaacccagggtgtttgcctccagagccagtgctcctaaccaaccacgcagccagccccttctgagtgccctgtagacgcctgcccctattggcatggccatctgtcctccgcactcaccccatccgcacacccacaccctgtcagggccttctctagtcaccatcactctgacttccaccatttccaccatcccgcgtcaggcaggatgaggaaacaggtgttgtaacaccagcaggcaaagggtgctgggaggacgaagacgcttggtcctgggctgggggaagagcaaacagatcccaggcgccttcctgcagaaagcccctggaggtagagtcagaatttgaacccagatctgccagattcccaagcagacctggagagacccactgcgaggtggtggccccctgcgggacccttcatgagggacctccttggtctaggaccccacttgggacctcaaacactctgctggaagctgctgcgacagagcgtttttctgcagccagggaacaggatggggcagggccttcaagcctcagttcgctctctaaggaaggaacccgcacccccacacagcatctctctcctccacctccatctcccctactcggtggcccacgggtcctccctgcccacagagcagcactggccacccatccactgtgctgtcttaccctgccctccactgtctgttattccctcaccgcttgctccttcaggcaatgactagtgactgtgcgcctgctgtgtgcccatccctgtgaaccaggccgctgcgggcagacggcagatgtacgggggcgtgcaaggagcagagagccaggaaggcttccgggaggaagcgccatttaagctgagaactgaagagctgatcaaatcaagtactgcccatggtcaaacagaaggccaaggtggacgcagggactgaaggaaggcagtgtagaggagggccgggggaggagtgggaggacacagacgggaagactgaccctgcacttcagaatcaagacgcagccacgaccaccagcggcctaatgctgcgtcccggcgcggtcggagctctgtcccatgcgcaccgcggggccacctaggagtggcccggctgcatccacctcccgcgcctcaacccactgacttttcatcactaccctgcggggcaggtcagcggtccccgttccacgaaagcaaaagccgaggtccaaagaggttgagtgcggccccaaatcacacagcttggccagtggcagtgtcgggatttgaacccaggggcagtttccccggattgctaacgtcttctccgggtctctgcccccgccccacaccaagggagtgctcggaggggttccagcccccgctcaccctcgaagtagacccccgagcagacccgcagcacgcgcgggagggaggcggggtccaaggcgcgcacgaagtcctgcagcggcaccggctccatggtccccgcggctctctgggctcagactgaggggcgggcgggcggtccccgggagccctgcagccccgccccgccgatgccccgccccgcacgccgaagccgccccgccagcccgcgggagccctgcagccccgccccgccgaagccccgccccccgccccctgcagtaccctatggggaaggggcgatgatgaagatgaagaagtcccagacgccccctcagcagtgctcccagttagaaaaaggggacgcggcccgacttgttctgcgtctcataggagggacatgcctctgccctttgggtttgaggagggagatgtagtgtcagggctcccgaatgtccctccaggacactccatggtcctctatcggaaacctcctggtgaaggggatctcattacctctccagaactcccatactctttcgataattattgtctacgttggcctcgaactcctggactcaagtgatcctcccacctcggcctcccaaagtgctgggatcacaggtgtgatccacctgtgagccaccacgccgggcctcaccaattctagttaaaaattcttcctaaggctaaagagaaatctgcttagaagccggaccaaccacttatcctgaccccacaggctcgggataagccttttccatttccctgtccctcaggagtcagaccaacataggttcaaatcccaggtctcctcttgctcgttgtatgacgttaggcaaatcactttgattgtgtgaacctcagtttcttactctctaaaacagggagaagagggccgggcgcaatggctcacgcctataatcccagcactttgggaggccgaggcgggtggatcacctgaggtcaggagtttgagaccagactaacatggtgaaaacccgtttctactaaaaatacaaaaaaacctagccagacgtggtggcacacacctctaatcccagctactcgggaggctgaggcaggagaatcgcttgaacctgggaggcagaggttgcagtgagccgagattgtaccattgcactccagcttgggcaacaagagcaaaactccgtctcaaaaaacaaaaacaaaaacaaaaaaacagggagaagaggctgggtgtggcctgtaatcccagcactttgggagactgaggcaggaggatcacttgagaccaggagtcctagaccaccctgggcaaactagcaagaccctgtctcttaaaaaaaagaataaaataaaataaggccaggcgcggtggctcacgcctataatcctagcactttgggagggtgaggcgggcagatctcctgaagtcaggagttcaagaccagcctggccaatatggcaaaaccctgtctctactaaaaatacaaaaaaattactgggcacaatgactcacgcctgtaatcccagtactttgggaggccaagttggacagatcacctgaggtcaggagttcgagaccagcctgaccaacagggagaaaccccggctctactaaaaatacaaaagtagctgggcgtggtggcacgtgcctgtaatcctatctactcaggaggctgaggcaggagaatcgcttgaacccgggatgtggagtttgcagtgagccgaaattgcatcattacactccagcttgggtaacaagagcaaaactctgtctcaaaaaaaaaaaaaaattagctgggtgtggtggtgcgtgcctgtaatcccagctactcgggaggctgaggcaggagaatcgcttgaacccgggggggcagaggttgcagtgagccgagatcacgccactttactccagcctgggtaacagagcaagactccatctcaaaaataaataaataaataagtaaataaataaaatatccaggcatggtggcatgcacctgcactctcagctactcaggagactgaggcaggagggtggcttgagcctgggaggtcgagactgcagtgagctatgatcatgccactgcactccagccccagcctaggcaacagagtgagaacctgtctctaaaaaaataaaaaaataataaaat

SEQ ID NO: 2208 - DNA, 4001 bp, Homo sapiens
gtggtgacacacacctgtaatcccagctactcaggaggcagaagcaggagaatcgcttgaacccaggaggcggaggttgcagtgagccgagattgtgcccctgcactccagcctgggtgacagcgcgagactttgtctcaaaaaataataataataataaatcgtatgtctgtgtaccctcccagtcatcaacatttcccatctctgtgctaatctcagaaatattccaagcttcctccctccaattcctcggaacaaaatagatcactctttttgtaatccatattttgcaggctaaaccaaatttaaaagtacctatatatttggtattaaataaatacactaaggtggtactactactaccatcaccactgctaaaattgaactgtacctagtctacaaaactaaaaacatcagtctccaaaattggagatctttctctggtgttaaaacgtttaaaaaacaaagagatggaattacactggatatagaggtttttaatcaaatcacttcttacagaaacctcaacacaactctcttacaaaatgcaattaagcccaaatggctgcagtaaaacttatcattaacgtatgaacattggctcacaaaatacatctcccggcaaagaacaaactgagcccgatttgctccacaagttgttcatggcaggagccggttttggctatttaacaagcttctaaatcataatacacacgtcagactgtctagaattacagaacagactacaacagtacttccacaaacgaaaaaagtcagggtcatctgaaacagaagaaaaataacggtgtgatacacgcctcatctctctcggcgcacactctaaaaaaaaaacctataaatgatgatattactttttaacagtggctaagtgatttttattttatctcatttagtctccacaataaccctgtaaaggggtcactgttacttactgctgttttagtgataagaaaactgaggcagctggagatgaagactcttgacctaagatcaaaagatagcagggccaagatttaaacccaagccaactggttcaggatacttctgttatgctcccaacagaagcttcactgcctctctcttgccaggtccttctatactctcagaggctttcccttcaccccaagtaacaaattccccataaacactgtactgccactgatggcttccaacttctgtgcaccattgctgctccccagcttctgctgccatgctccacccctaagatttgtaaagtcaaagacaacagttgataaaagttgcttaggtgctaagagaagcaaaataattcacctcatataagcagaactcacgccgattgccactggaatgcaagccggcctcagctccagcccaagaaaaaagtgagaactctaatattcccgtaggagacaaatttggactatcccgtttttggccaccaggctggaaagaacggaagcggtactaacatttactgagtggcagccacatgcgccctaggagaagaccgaaccaggccaatggggactgggtggggggaagggcactcgggagttccgggaaaagaaatccaaataacggggttcatacgaccaaaacgggaggagtagggagtggccgcccccaggccgactgcaagataaagcggcgtaggagctgctctgcagagaaggcgaccaagagccttgggagctaggccggggccaggggaagacctaaagggcggggaaggggaggagccggagggaacggagcccgctcagaagaggccagggtgtaagctggggggagcgactccacgccaggccttccccgagcccctgaccagcagctggggaaaaaagataagagacgaaaccactagagccggttaagctgccctaacttccatcagaggcgctcactcacctgggcctaccacagagatcgcagctgcagctcgcaacggaacaaccagcccgaacctcgcccccgccccacagcgcgcccagcgtctccgctctccgacgacggcgacggcgtagacccgctgcctcctgggaaatgtagtcctacgccctcctctcctggccgacttggctgccatcagaactacgtttcccaaaagacaaggcgagcgttgggcccgccgctttgcgtcacgcgctcggttgtcggcggtcacgtgggttgctcggggccgtcccctccccccgcctgggtggcctggagatggaggagggcggtggacggaaggggcgggggcgttgctgacgccactgcccccaccattttggaaccagcctggagggagagtctgagccccacccactccgggccagcttgccttgttgaaaagcttccgagttggaagtcgagtctccctgtttttggtctctgctgcgctcccttccgctttgtgaccttgagcaaattcatccctcctctctaaacttgtttcctcccctgtgaaatgagacttgtaatttctaccccacagcgatgttgccaggctccgacaaagtaaggcacaggaaagcctcaagcaccctgaaagcgcaacgcaaatggaggggttggtttggtttcgtttttttaattttaattgtgtgacctcattcggagacccagaaaccgcctctccccagcctgccttctgtaactatgattttctgactgtcgtcctgggaagtttgttaaaatgggtgctactggggtattgaaccaaaagtttaccggggagtgtctccctgcagtctacattttaaaccgatctctcgggtgattcttacccacctacaaatttgagaatctctgcgtttatcagttttgcacaggctggtttcctccggaatttctgctctagtgtctctgaacatttaagacccatctcataggtcatctgtgatgctttcaaagttgactagctcctccctatgcctgtgttcccacagtaagtttgcatcttactctgtaagtatcggggccttccccgacaagactgtgagctctttgagagccgagatcagttttgatggatttctgcacctccagagaaaagtagacacagtacacatcaattaataaagaaatctaatgctcttcctaagagaaaagctgcaaggctcaactcaagtagcagaccacgccacatcagcccttgcccttagtggcttcggcagcattccttgcacacggcttactctttcttccttctttgagcacttcttgtggtcgacgtactgcgcagtgcttcttaaaacgttctaatttaattgattttatttttatttatttatttatttatttattgagattctccctatgtcgcccaggctggagggcagtggtgcgattttgggtcactgcaacatctgcctcccaggttcaagcgattctcctgcctaagcctcctgagtagctgattttacgggcatatgccaccacccggctaatttttctactttttgtggagacggggtttcgccacgttggccaagctggtatcagactcctgacctcaagtgatccacctgcctcggccttccaaagtgctgggattacaggcgtgagccacggggctgaaccaatgtaattttaaattcaaagattttctgggtgtctactgtatacaatgcccagtgtaaaatactgggaacacggtagtaaactagatggataccaaaatacataattttggctccccttttaagaaatacaggcataggccgggcgcggtggctcacgccggtaatcccaacgctttgggagaaccgaggcgggcagctcacctgaggtcaggagttcgtgatcagcccagccaacatggcgaaacccgttctctactaaaaatactacagattagccgggcgtggtggtgggcacctgtaatcccagctactcaggaggctgagacaggagaatcgcttgaacccaggaggtggaggttgcagtgagccgagatcatgccactgcactccagcctgggcgacagagcaagactccgtctcaaaaaaaaa

SEQ ID NO: 2209 - DNA, 4001 bp, Homo sapiens
ttgtttcctgaacgcttcttgacttcatccccacccccccagcctgcctttgttcagccctcatccttactcacctagaccatcccaacagccacagcccctccttctgcaactcatcctccacggtgatctaagaccaaacctgaccttgtgactttcttgcctgtgacctcccatggctccctattgccctcaggataatgttcgtgctcctaagccccgtgatgctcccacgctatccctcctgttgtgttcctaacaggcaccttctctcccatgcacctccatgcctctgagacttgcattttttatgttctggctgcctggaatgaagaccacccctcttagtgaaatcttccttgattccctttttgtctcctacctgaggcagtgtaagctgaactcctcctcagtgctcctctagagctcctgtgtctgtccctgtttagccctcttcccctgtcctgtgttctgcactagaccatgaaccactcaaaggcagcctctgtgttctaatcggctgaccagcagactgaaggaatcagctgccacctactcagaaatccttaccaagcacagtgcactgtgccaactgctctgcatcattttctcatttaaaccccataacaaccataggaggctggcatcatttaatctcattgtacagactaggtgttgccagcctctcaactaatggcccagcacttagcacaactcctggaatattgttggtgctcaataaatgtttgtccagtgaacaactgagtgaatccaacacaattaccctatgaacaccccctgaaaatggccctccacagatcctcagatccaacacagtcagcggctactcctcactcctcccctgatcccaggttgcagtgatttctagcacttgcctgtgttttcctggccttgatctcactttctagtggatcaaagtgatggcagtgatgatagggcttgttttccaaaattttttgttgtggtgaaatgcatataaaataaattttaccatctttttttctttttagatgagtcttgctctgtcgcccaggctggagtgcagtggcgcgatctcagctcactgcaacctctgcctcccagattcaagcgattctcttgcctcagcctcccaagtagctgggattacaggctcctgccaccacgcccggctaatttttgtatttttagtagagatggggtttcaccatgtttgccaggctggtctcgatctcctgaccctgtgatccacccgctcggcctcccaaagtgccgggattacaggcgtgagccaccacacccggcaaattttgccatcttaaccatttgtaagcagcatataacccaatgtgattaaatacattcctagtgttgtcccaccatcaccaccatccatcctttttttttttttttgaaaaagacgaaagtctaaacacaatggagacggggtctcactatgttgaccagtctggtcttgaactcctggcctcaattgatcctcccatctcagccatccaaagtgctgggattacaggtatgaaccaccgcacccggccccatgtttataactcttttaatcttgtaaaaccaagtaaaaatcttgtaaaaacgctgtaccttttaaacaaaactccccatttcttcctccctgcagcccatggcaaccatcatcctactttctgtctctatgataaaatagggtttcttgggtagaaatcagggcctcggggcctagaaatggggtgagggactcaggggagacttacccacatgagaagccaagaagaggatggggagcaagaaagggggcacccgccagaccatactccagaggccgacccaggccagccaggacgagctgggcctggggtcagatgctgtgggcctgactgctcagcctgtgttggtcagtgtgggtcggtgctggggaggaagaggaaatgaggtggcttgggtgggaggggtggcagggtagggggtgggaggactcattctgcctttgagcctctaggccccccaatctggcccccacaaggctggggatgggtgtggcctgggaggagtcacttgaggtggggggaaggttatggtaagggcagacctggggacagctggactgatttttcccatcccctgtctctctccagtactcagtcttgctggcacaaaggaggcaggaggcaggaaagggaggaagccagtggcttccgcctattgaggaggggggtggggtgggggacattgttctggggtctcccctccccccggcacaaacacacaatacggcccacatgagtcctcatgtatgtgccccaggacacagacagttacatgggtttcctagagagcagttcacatacgaaacacaaaggacctctgtgggcctgagaagcacatacactcaaaggaacacagggccctggcaacaaagagccttcgagtctaccttgtgtacctctctcattgtacagatgggaaaactgaggcttgctgtgctcgagggcaccctgaggctgtggcaaggctgggacttgaacttctgacttagtccttgctttcttggtgccaatcgctccacaagggctcacattaagcagtcccggggagcacacagggagtatcggttgcatagatagtcctcagcttaagctgctaatgaaagcttcagcttattgtctgccaggtgtcattcattttgcggcaaacccctgcctattcctgggcactggggcagcagaagtctgcccagggaggtgcactcactcttgacggctgacaacaacctgggagcagtcgcactgctttggcaaagtctctaaagccccatggatcttgcctctgcttccctcccagactcacctctccctgccctggcacccgttgctccacctcttgccaccactggcagttcccagaacggaacaagacctgtaggtacagaacgcccacgaggaggcccttccagggagcagagggagcaaccgttggatgggcagccttgctggttaaatcgatgacccctctgacccggaatggaatggttgggatggatgagacttggtgtcagtttaggtgacttaggtctggtagtacaaaccctccccctgggcctgggacatcttcccagagtgtgttctgggtgaaggcttcattctcctctgaatgcaccgggctcacattcacttttctcaggaggctgggtccctgcagcttggttgagctggtttaggcccagggctcttctgaagcgccctgaaaagtcccaggagacgctttgactcctggagtagcatagaaaaggatcgggaaagacctccctactgatgtgtgacccacagagattcccattcctgggcctgaggctgggaggagctttctctagacaaggctttgggtgggatgggagtaggagcagggggagagtggtggatgccttacacttcagctcatcctggtgccagacctttgaatctggaatgaaaaaggagctggaaagtgctgggactgtttgtatggcaggattcacttttgtggaacttttcctttggttcttggaagacctggggggcctgatgtcattttgcaaatgtgtggagagcacttaggcagcattcattcttgttggaagtgacacagatattggcacaggtatttgctttgaatggaaaagtttgagactgcaggatgctggcacatgcaaagattctgagcccatctgccctccccactctcaactgggaaacaaaaactggtaataatgatctgtacataaataaaatgttaatggagtttgtacacaagaatttgtattataaaacaatatcctacaagtgtaaaagtatttttacatgtgttgagattatgctgcaagtaatttaaatagcatcagtttacaaacaatatgtcccaaatgaaatattactgcacacacaaattttgagtgggttgtgtatacatctgctgttgcagatgtataagacgacttaagccataatgcacat

SEQ ID NO: 2210 - DNA, 4001 bp, Homo sapiens
gcaacaaaaaatatattagaagtacatttctaagccactgatgggaccaccagtaatatcatcaaacccaagttgcaagtgatgataaaataagaccattcacccacttaccactggagaattgcgaaaacctttgattgcttgaaagataccaccaccaatggtacccatcgtaaaggccccaccacagtcatccacaattcgccatgggctaagaacagggggaaaaaaaagaccatatttctcattcacaaaccataaaatcttctttgccaatacagtaaggattataatggaacagattatactgcagggcccactgcaaccaataaatatttggcctataaaatgacttgaggaaatgctgtaatcaaacagggcagtcaaaaaatcaaagcagttttgactacaaagataaccaggtaactgattatattgtttcagggcatacgtactaagagaaagcaaaggggctacctaatgatttagtaaatgaaaacccattatttttctaagttgtttttttttttttttttgagatggagtctcactctgtcacccaggctggagtgcaatggcgcaatcttggctcactgcaacctccgtctcctgggttcaagtgattctcctgcctcagcctcccaagtagctgggactacaggcgcgtgccaccacgcccggctaatatttgtatttttagtagagacggggtttcaccatactggccaggctggtcttgaactcctgacctcgtgatccgcctcggccttccaaagtgctgggattacaggcgtgagccaccacacccggccttatttttctaagatctttaactcaacatagttaaatattttaactctctgctaacctgtgtcattatagtacatcaaacagctatttacagtgtgctgagtcctacatatctgagcacaatccagaatggaggataactgctttgaagaagataagtttgaagagccaggagaccctaaaacttatattttgtatgccatttatgggagaggggaacataaaacatgcaacaaggctaggataccagagtagtaatttaaggtcctgggcactttcacaaattgaggacatcttggttgttgctcttacacaataaaacaaatgattaaccgaaatatcaagatttgattttttacctatgaccctagaaactttaaactctggcaacctgagacttctgacagcaattacatcgttttataattatctatgtgtctggtttattcatactcaataaacgctggatgtaacaatgaatttctgtccatggcttttcagagaacacatgctattacctcttcctatttcccaggtaatttttgtccccctctaccctcaagaaagaattccaagaaggaaaacaaggccccacgcaataaagaagcttatccagaccccttggctaaaatctatgttccattcatttaaaatgcttcactctgtggacacatatcatgatacaagtaaaacctcaagaatgacactccctcaaatgcctattcttcagttcctcaacgcaggaactgagcaaggcgagacggagggacgcgcccaaggtcacctcgacgaacaggggggattataactggccccgcataaagtcgattacgccctgcgttgggaggaggttccgaggttctatcaaactcaagtctggacctccttaccatccatcacaaggtcacacgggtgctgggttgggagagggaggctcacgcggccggggaggtactaagtacagggctaagaagccgactggccgcgaaagaccgcattgcccagttaccaggcccaagtcgacgaggctgcggttgagtctggcttgcaccttgggagcctggacaagggagaaggagggcagtgggcaggggggcaagagaaatgcaaagacagcggtgaagctcaccaaggctctcgcgcgtactcctccatcttgactccaatgccgcgagtgatgccgggcaagctgggcggagcctgaccccagaggcggaagtgatcccgagaggagggcgttaaggtctatgagcattggttcaccatttcccgctgcagccaatgggagccaggactcctgtggccagcgtgtggtcggggcattggccgcggcgtggcgagactggccctgcccacgtcctcaaaggccgcgagtcccggctgtgtgggcggggggctaccaatgacggagtcacactacccggtcaccagaggttccgtggactgaaatcaacgcgatactgcctaaatacgcttctttctttcccttcccttccgccttcccttcccccttcccttccccctttccttttcttctctccttccatcctttttctttctttctttttcttttcttcttctttttttttttgagacagagtctggctctgtcgcccaggctggagtgcagcggcgagatctcggctcactgcaacctccgcctcccgagttcaagcgattctcctgccttagcctcctgagtagctgggactacaggcgggcgccaccaggtccggctaatttttatgtttttttagtagagacggggtttcgccatgttgatcaggctggactcgaactcctgacctcgtgatccgcccacctcggcctcccagagtgctagaattacaggcgtgagccgccgcacccggcctctttctttctcttcttttcttttctttcctttctctctcttctttttctttctttcttttttggtacttttgctgtcaaatgtggattaatgctatcttattcgtcacttactgtgaagctgttaccaaatacacgtagctcctttagggcaaacagtgtctcagtgatttataataaccacagtgcctggaatgtagtagatgctcaataaatgtttgtgaactggaactgtttgggccatctggagagccatgaccaatttggagccctcgatttcagggacattgacaccagagcctctcacaggcctctccactaatgatcaccagaaggtgtgaagatgtttggctcggagaagaggggacttatggggaccaggccgggcgtggtgacacgtgcctgtagccctgactgttcgggagactgaggcgggaagatagcttgagcccaggagatctaccccgcagggagctgtgatcatgccactgcactctagtgacagagtgagacactgtcaaaaaaaaaaaaaaaaaaaggttgggacccatggagcttttagtttactgtcaacaaaatcccaatcatgtgatggctgttaaagtgctcctctccattctgtacgtttgtaattaactttaaaaatatgtatatatttattttacggaaaagtcaatgtcataaataatggaagaggccgggcgcagtggcacacgcctgtaatcccagcactttgggaggccgaggcgggcggatcacgaggtcaggagttcgagaccagcctgaccaacatggtgaaaccccgtctctactaaaaatacaaaatttagcctggcgtgttgcctgtaatcccagctagtcaggaggctgaggcaggagaatggcttgaacgtgggaggtggaagttgcagtgagctaagattgtgcctgggtgacagagcgagactccacctcaaataaataaataaataaaggaagactgcaaagaggagtgagggtctctccaaaagcttggaaataaagtaagcagatgaatcgaaccctccatggaactaaagattatcaataaatgtgtcttgcacgtgagaatggttcatactagttatctgatttgggtgtgtaaggtggagaagacgtgttcagaatgtgactgtaattaagaatagttaactctatttaattgtacaggccaaagagagaatgtgggagaggggacatggaggaattcagagggcaggaatctgacatttagtcagcaccgaagacctggtgggtataaatattttagtaactagagatttgcactctcaccaggaccc

SEQ ID NO: 2211 - DNA, 4001 bp, Homo sapiens
gtccagagccatcctatcagaacctgcagacgcgggccaggcatgttttatccttttgaacacacacacacacacacacacagtgcacacacagtcacgctgaacacccagacacatgctgaaacgttccctccctcactgtgacccgggcacccctcaccctagtgaggcaatggaaatatcttatgcgcaatgcattccaaaaagtttccttctctctggggcctcttagtcccaggcaaagagggagtgggggtggagtgggtgcagggccgcctcctccaagtcgcaggctccccattatttctattaaggctttcagggtttcctacctggcccttctccacttcccatctcagactgaataggggggtacccatgaccccttcctcctcctactgggaatggtggggaggggtggggaaggaaaaaggggccacatttcagggaaggccctgctagaggctggctggccgcccgctcagccatccctgaccctcatccgctcagggcagcggatgctgcagtcagagctttccttcctggcgcccccttctccctctgactctgcagtgacagcaggaatagctgggaggaatagcccagcccaagccaggaggggtggggaaggatctcagttcaagggtgacccctgggccaggcacccatggctggccatgcttgaggaatgttgttggaatgatgttagataagttgacttggtcagtgttaaaattcctctattgcagatgaggaaactgaggttcaaagaagggaaaagacttctcccttgcaaaaggggtcagggataagatttgaaccaagtctgtcagccacaggctcacaaagcaagacccctctaagctccaaacactcaccaacggttacagttgtcccagtacgttcccaagactggatagatacgacctccatgcatacatcctgttggaagggaagagaagagaagtggaaccagaaccagagaggatgggctaattggccaggtccttggaggtcaggtaccttgaacctttccaagattctctctctttctctctctctgtctcacacacacacacacataccagctctcactgaaattaaactataactgaagacatcacacacacacacacacacacacaccagctgtcactaaaattaaactataactgaaggcatcacacacacacacacacacataccagctctcactgaaattgaagccaaactataactgaagatatcacacacacacacacacacaccagctctcactgagattaagctataactgaagacatcacacacacacacaccagctctcactgaaattaaactataactgaagacatcacacacacacacaccagctctcactgaaattaaactataactgaagacatcacacacacacacacacaccagctctcactgagattaagctataactgaagacatcacacacacacacacacacacacacaccagctctcactgaaattaaactataactgaagacatcacacacacacacaccagctctcactgaaattaagctatactgaagacaacacacacacacacacacaccagctctcactgaaattaagctataactgaagacatcacacacacacacacacataccagctctcactgaaattaaactataactgaagacatcacacacacacacacacacacacaccagctgtcactaaaattaaactataactgaaggcatcacacacacacacacacacataccagctctcactgaaattgaagccaaactataactgaagatatcacacacacacacacacacaccagctctcactgaaattaagctataactgaagacatcacacacacacacacacacacacacacacacaccagctctcactgaaattaaactataactgaagacaaatcctgcagggtcacacaccaactgctgtttgggaagttcttcaatgattccaacctggattcctcttactttacttggatgccagccacaacattcctgggatccttttccatttaaataagttagggcttggagatggggagtgggaggagcatggggaagccaaggcccagagaaggtaagcaaccgtcctaagataacacagcactcttgagatgacagctcaggtatgcagtctgccggcccaagccccatggaactgtgggaaggaacgcaagtgattctcctattggacaggggcaagtgcatggaaaaggatgatggtgaggctgaaagcaggaaaagatttgacccatctcccaggtatgagcagccatctcggggcacaggatcctagaatcctcagcaaaggcagaaaaatggctaagatgaccctcaccaacccatatgtgccttatcagcccaagagtgagtcagcaggtgcggccagcaccttccgtgtctggaaaagagacaggattgggagaaaatgtgggaggttgccctttccctgggccaaattagaattctaaccaaggagcttcttcagtcttgctggagagtaaagttcccagaggggcagggaagagtcccagattctacagagcttcccctggaaatgtcagtgcatccatcagctttgctcttgagccttgctgagtctgaggtggacaaagtgacccaccctcctggccatcttagtgcccaccttggatcgggggaaaagggggtggcacgccgaggcagaagtcccagaagtcagggcagcagtcggagaccgtgcggttgcagaagaggtcacagtaacagatggcgcccaggtagggcagggcacagtcgtcggcacggccgcggcagcacaggtcctgctcctggcagtaccggcctcccgcgtcccggatgccccgcaggtgcagacccggtgctagctcccggcgcccacgaccctgctgggcacccagagccaagtggccagccagcggcagcaacagcagtagccccagtggacatcgccacatggtggctcctgggccctggggggcagagatggtgggcagcagagactccctggaacaccagggatgagtctcccagtttcctggagctgtgagttcaagagggcccagcagggagggagatcccgattcctgagtccccaggcaggacacgggcagaggagccccagtgtgtgggccctggctatagggggatggggactgggcagaaacggagcccctccctgacctaggcagggaccttcaaggacaaggaaatgagggtggtggcattcttggtgctcccacccaacactcatcctgtggacccaaggtcttctctcctgtcctaggtctctctgccctccagcagcctccatccctgacctgggtccttgactttgtgctttcctgtctcccccggtcttttgggtacacctctcttctgttcctgtgtccctctgtccccctccactgtccctctctctgccatctgtcttggttcctctacctgccccctccccctgtttcttctctgtctacaccttccgccctctgagcaggggagcgtccctacctggtgaaggtgtgggctggggcccaggctggcccgcgcgcctccgcctcctggctctgcgaccgccggacgctcaaagtcaagagaggagcgcggggcggggcgctttttgtaccgcccgccctctgcaccgccccagcagtggcggaagggaggggcgcctggcttgtacctggagtaactaccccacaactcatgggcttgcagggtggagaaacgacaagcacacgattgtcctggctgggtctcctgtggcggaagccgttcccttaggggaaccccaagcaggaaggattgcggtttcacactgggaaggacttcacagtgggcatccctgtggagctgaggggctctggtggagaaggggggatatgggcagccgagctctgggttatggacacaagtttgggaaatgatggggagggcatgtgaggcaaaattctgtaagcct

SEQ ID NO: 2212 - DNA, 4001 bp, Homo sapiens
tgaaattaaactataactgaagacatcacacacacacacacacacacacaccagctgtcactaaaattaaactataactgaaggcatcacacacacacacacacacataccagctctcactgaaattgaagccaaactataactgaagatatcacacacacacacacacacaccagctctcactgaaattaagctataactgaagacatcacacacacacacacacacacacacacacacaccagctctcactgaaattaaactataactgaagacaaatcctgcagggtcacacaccaactgctgtttgggaagttcttcaatgattccaacctggattcctcttactttacttggatgccagccacaacattcctgggatccttttccatttaaataagttagggcttggagatggggagtgggaggagcatggggaagccaaggcccagagaaggtaagcaaccgtcctaagataacacagcactcttgagatgacagctcaggtatgcagtctgccggcccaagccccatggaactgtgggaaggaacgcaagtgattctcctattggacaggggcaagtgcatggaaaaggatgatggtgaggctgaaagcaggaaaagatttgacccatctcccaggtatgagcagccatctcggggcacaggatcctagaatcctcagcaaaggcagaaaaatggctaagatgaccctcaccaacccatatgtgccttatcagcccaagagtgagtcagcaggtgcggccagcaccttccgtgtctggaaaagagacaggattgggagaaaatgtgggaggttgccctttccctgggccaaattagaattctaaccaaggagcttcttcagtcttgctggagagtaaagttcccagaggggcagggaagagtcccagattctacagagcttcccctggaaatgtcagtgcatccatcagctttgctcttgagccttgctgagtctgaggtggacaaagtgacccaccctcctggccatcttagtgcccaccttggatcgggggaaaagggggtggcacgccgaggcagaagtcccagaagtcagggcagcagtcggagaccgtgcggttgcagaagaggtcacagtaacagatggcgcccaggtagggcagggcacagtcgtcggcacggccgcggcagcacaggtcctgctcctggcagtaccggcctcccgcgtcccggatgccccgcaggtgcagacccggtgctagctcccggcgcccacgaccctgctgggcacccagagccaagtggccagccagcggcagcaacagcagtagccccagtggacatcgccacatggtggctcctgggccctggggggcagagatggtgggcagcagagactccctggaacaccagggatgagtctcccagtttcctggagctgtgagttcaagagggcccagcagggagggagatcccgattcctgagtccccaggcaggacacgggcagaggagccccagtgtgtgggccctggctatagggggatggggactgggcagaaacggagcccctccctgacctaggcagggaccttcaaggacaaggaaatgagggtggtggcattcttggtgctcccacccaacactcatcctgtggacccaaggtcttctctcctgtcctaggtctctctgccctccagcagcctccatccctgacctgggtccttgactttgtgctttcctgtctcccccggtcttttgggtacacctctcttctgttcctgtgtccctctgtccccctccactgtccctctctctgccatctgtcttggttcctctacctgccccctccccctgtttcttctctgtctacaccttccgccctctgagcaggggagcgtccctacctggtgaaggtgtgggctggggcccaggctggcccgcgcgcctccgcctcctggctctgcgaccgccggacgctcaaagtcaagagaggagcgcggggcggggcgctttttgtaccgcccgccctctgcaccgccccagcagtggcggaagggaggggcgcctggcttgtacctggagtaactaccccacaactcatgggcttgcagggtggagaaacgacaagcacacgattgtcctggctgggtctcctgtggcggaagccgttcccttaggggaaccccaagcaggaaggattgcggtttcacactgggaaggacttcacagtgggcatccctgtggagctgaggggctctggtggagaaggggggatatgggcagccgagctctgggttatggacacaagtttgggaaatgatggggagggcatgtgaggcaaaattctgtaagcctctcctgacccctcggtaataaaaatagccatgcacacccctctccactgtgccccctaggcttgggtgccgcccccctagccaccccagctcctaggaatgattggaattccaggagtatgatccttaggtgccctgggcggctcatccctgggaggtgggcagggtgtgggggtggcctctgcaccctttgatcccttgttgagtctgccttcccttgcctgcttgggcccctagacgagcactgccctctctagcaaacccaagggcatcctgcttggcacctgtccccctccaagggtccaaaggcaagggccctaccagctggcaccccctgcagaggccctccttcctgccgcaggcataaacctttctttgcccaggctggcctgggacccaaacaatggggcttctgtcccgccaggtctgccgtcaccttttacctccctattgtgcaacgccctctcttcaacaggttgggcccaggccagaggtctctaccagcaaagaggataaaagagactacacctggacaaaccctcccaggcccaggcctgagcctcacatgtggccccggggaaggcatcagggactccctttgccctcccactgacctccctgcaaacctcccccaaaccaaggggcatcctcagctggccagaccctgggggaagggagagagccgaggatcaccggcacctgtggctgggttacccctgccatggaccactgggtggtgagtcaccaagggggtcctgccctggtggtgggggtggagggataatatccgggggccccagcactggcactaacacacccaggagctgcccatctgctccctgcagggacctgggaggacaaagcctaggtgggaaactgaggctcagaagaatgcacttgcctgaggtcgtgcagccagaacacaggctccctgcctgccaccagcccactcctttacccctagtcacccttagtcacccactacaggtctcaacgtgctcctggttgggaagtctcttttcttatctaaactccattcatcttactgcaggacgggcccctcggtattggtaaatgtcatatcctcagggtaagagatgaaagctgctttctttcaaaagagttcgtgtccagagttcctacttttatggtacctactttttcatggttctggggctgggggcttgtttagagacatctggcctctcttttgcccaaaatcacaccgcataggctaccctcgtgagtctgggtgtgttatctctgtgtgcatgtatgcatgtgtatatctgagttgcggtgtttgtgggggtgtttctgcttctgcttgagtctgtcagtccacatctgatcgtctgggttttttttgctttttgttttttgtttttttttgagacaaggtctcactttgtcacccaggctggagtacagtggcgcgatctcgactcactgaagccttgacctcctgggctcaagtaatcctcccacctcagcttcctgagtaactgggactacaggtgcacaccgccatgcctgcctgaattttttttgtatttgtagtagagatggggtttcaccatgttgcccaggctggtctccaactcctgagctcaagcaatccgcctgccttggccttccgaagtgtgtttacctgtctatct

SEQ ID NO: 2213 - DNA, 4001 bp, Homo sapiens
ctaaaaatacaaaaaaaaaaaaaaagttataaaaaaaaaagaaaagaaagatatagagaggaaaaactcaaaaaagtaattcaatttctggtgggatgaagggaaatttttttcctttcttttctgtattttcctaatttttttcagtgagtctactagaatattaccacttattttcttgaattaggaagcaaacatcgtttcattactttcctctcttccctggtcactccctctgctcaaatcttaaaatgcaagtactcacttagggttctattttatgaccttttcctctggatgacttctagataccttaattcattcccaaagctccaggtaccaaatataagcagataattcccaaacttaaacccacagacgttatcttttttgagctccaagataaatatatctaaatgcctactacacatcttcactttatgacctatacccacctcacatttcaataaactaaactcatcctctaaccaacaccctgcccccatctgcttctcctcctcctgtgcttctcatcttgttcaaaggcatacgatacatgcaaaaatccaagccagagatcttgtcatcagcatagactcttccttttttatttctcctcccatcagctggccatcccagggacttaatcttctaaaacctatcttttctcttactaactggtctccttcccatccctgcggacctgcaatccagcctcaacatggcctccagagaaatctttcagagcgtacatctgataatgcagctcctttggataaaattacacccagtggttgtcagataaaattgaaaactccttagccaggcataaaaattccctcagtatcttgattcccctggggcctacctctcatctctcacaacaccccctatggtacctcacgctccaatcacacggacacagctctttaaacacatcacagctttcactctccctgagcccccagctttacatgcgtcccctgattcccctaaattttgtcaagattcagcccaggcatcaaaaacgcatcacaactcactctgcctgacctgatggcatgtacctatccaccgccccccgcaacggttttataaagattcagttcaggcatcccaatttcccagatggttcgagcccctaaaagacctcacatcactccgtgtatacatcttcattacatttattcacgctgtaatataattgtctgtctctctcacgagactgtgaattgaggcgcacgttgtcttttacatttcctatctcaagcgccgggcacagcacctgacgtgacagaaaccaaacttataaatcatccccgtcattaacccctaagaaaacaggcaacagccacccagaaagaaaggtggtgcaggctgaggcaggaggagacgtttggtgaggggaaagtccaccagaacagtcacactctactcaaacccaggcggattgacagttgacgaaagcagcgcctggcgatccccaaccaaagggcccggaagtgtgactggattatttatcgaagttgtcaatcaaaggtccggtccggagggaccgaacctccgcctcagggaaaaggggaggggctgcacagagttcgccctgcctcccgccctgggccagcaaccggccagcgcccagaccccgtgccccgaagcctcacttctccacatccgccgacttcatgatgtgggtcttggacgccgtcagcttccagggcccgaagcagaaatcccggtggctgctctggaagccgtggatcatcatggctgaggcaggacccgcagaggccacaaggaataagctgaagcagcggcggcggcgaacaccggttcctccgcctccctccggcccagcctcctaggcttccgagccgttaccatgcccggccccgccccctgccggccgacccggacgcgggctctgcttcccgtcttcttctccgcctctttgctttttgcttccgggactagttgctcttgttgcgtgacccacgtcttacgttccggcgttccggaaaaaaggaaaaaggagaaagtcagaggggcggcacttgggttgcagaaggtgtggttaggaacgcaccgccctcttgaactcgttgggtgacgtcatctcgaaggattttagggactgccagggaaggggatgacggttccaacttgatccttacagacctcaaagcagtgtgattacctcatgtgttagtgaatcgtgttacagaggaaatttttctgttttgaggtcaaaaaaagaagtaatcccacagagtttaggaaatccagcaccaacaagatttagaagtggccatctagccactcttgactatgaccaactcctatcaaaaattgcatcctcgtagatatgcgaagactttccatggtctagttgctatgtaggcacccagtatagtgaaaacaacacagctgacttagtgctaaatctccatttgcaacactattgtgtgaatccttgggcaaagcgcttctctaacgattttaggcttcagttgcctcaaaatgagatgattttgttaatggaaaaaaaacaaattctgtaaaaggttttaaagagatttattctgaaccaatatgagtgaccatggcccagggaatagtcccaagaggtcctaacaaagagcatctgaagcggtggcattactctttgttttatacattttagggagttgggaattgcaggtaaaataagtcaatatatggaagatatacattggttcaggctaaggaagtgggatgtcttgaaggagaggcttacagatcataggtggattcaaagattttctgatcggcaatctgttgaaagatttaagctttagtcaggcgaggtggctcctgcctataatcccagcatcttgggaggcctaggtgagaggattgcttgagtccaggaatttgagaccagcgtgggcaccagagtaagccctcatctctacaaaccgtgttaattagctgtgtatgatggtatctgcctgtagtcccaggccacttgagaggctgtggtgggaggatctcttgagcctcagaggctgcattgagccatgatcatgccacagcactcatgcctgggtgagcgagaccctgtctcaaaaacaaataaaaacacaggccaggtgcagtggctcaagactgtaatcccagcactttgggaggccaaggtgggtggaccacctgaggtcgggagttcaagaccagcctggccaatattgtgaaaacctgtgtctactaaaaatacaaaacttagccaagcacggtggtggatgcctgtaaccccagctactagggaggctgaggtgggagaatcacttgaacctgagaggcagaggttgcagtgagccgagatcgtgccactgcactccagcctgggtgacagagtaagaccttgtctcaaaaacaaacaaacaaacaaacaaaaaacagtgttaagctttgtctaaagacttgaagtcagtagaaaggaatgcttaagaaaagggagtctgctatctgtcatgtgattctacaccagtcaggttggaaagtaaggcacattataccattgcacataaaaaaccatttaacgacattttatggtttgtagggcatgacttaatccttgccttgcatggccatagtttttttgttttgttttgttttgttttgttttgagacagagtcttgctctgtcgcccaggctggagtgcagaggccccatctcggttcactgcaacttccacctcctaggttcaagcgattctcctgcctcagcctcccaagtagctgggatttcaggcatgcaacaccatgcccggctaatgtttgtatttttagtagagacggggtttcatcatgttggtcaggctggtcttgaactcctgacctcatgatccacctgcctcggcctcccaaagtgctgggattacaggcgtgagccaccgcgcctggctcgcaggtcttgtttatttgtatttatttttttttttgagacggagtctcgctctgtc

SEQ ID NO: 2214 - DNA, 4001 bp, Homo sapiens
cctcctcagaaacaacaccgaaaacctggcatggctggttttgcattcagacaatggcacctacatgctttttgctttgctcagagctgtaaatatccaaagaggtgatcctctgccatcattttggaaggaagaatcagtcagactgataattagggtcatacgcacaggcatggtcatgctgattgttgaaatttagattatttttggcccagcacagtggctcacacctgtaatgccagcactgtgggaggccaagacaggcggatcacctgaggtcaggagtttgagatcagcccgaccaacatggtgaaaccccatttctactaaaaatacaaaaattagacaggcgtagtggtgggtacctgtaatcccagctacttgggaggctgaggcaagagaatcgcttgaaccctggaggcagtggttgcagtcagccgagattgtgtcactgcagtccagcctgggcggcagagtgagactgtctcaaaaaaaaaattacatatatatatatatatatatatatatatatatatatatagagagagagagagagagagagagagagagagagaaagagagagagagagattatttttgtactgcttagtaattagctttagcacggtctctcctctgggacctcccctggaatttccccacaatccagtaactgaataattagcatccagccccacagaacttctcccagggccctgctccagggcttcccttctgactggctgtgcatggcacactgggaattgttttctgcccacaagaacaagggtgaactgagtcaaggagtccaagagatcttggacgcacttctcagaattcggaggggctgggtaaatgcaggagaaaattgatgaaaccacattggccctgcaagagcctgactgctcctgcacggtagctacccctagcattagcggggagtcaccaatgcctcttccaggcactgagcaagagggcggcattacagatgcacttgccgtccaaacagatcatctcattgactaggtgactgctcagcaacagtatctgaaggacactagggttactctgcttgtttgcagttcacggtgctggacggatgtgttcccaacactaggtaacaacaccgctctccctcctccgggagaaagccgcagccgtcgattcccacccaacagggcctcagcgccttcccagggcagcaccctcactcctgcaaccaccaatcacccaagccacagcatggtcccagacccaccctcgccccttaggaaatggctttccaattgtgttttcacaggagcatggccactgggcaatgatcttcacaggcaggcttttttttccccctctcaacataaaggccagcaatatttaccacggagtcttggccagtgtgcactgcctggtgctgtggggtggggtgtttagggccttttgttgagcagctcagtgactttctgggatttccatggccctgctggagatggccctctgtctcccttttccaaggaagaaagtgactggggacaagccacctgcctcttccacagggtgggggcgagagtgacagcgagacagcacaagaaggacccgctctgtttcaaagcgaggatgtgagtgacttcgtctgtgccgaggtctcttcgtctccaacctgccgggcacagggcacccacatgacacgctcaccccgtccctgggccgagggaccccacgtctcgcgggtgccgcggggcagagagcgccgcctagtgaggcggcgcgagttggacatagactggaaaatagacccggacagcccgggaggagggcggagaggagtccgacctccgcaggcagccgcgtccccgccccgcgctgcctacgacttagggcccccggcccatcccctgccgctgcagggcgctcacctctgggacgcctccccgcgccgcctgcgccacggttggctcctcccggacgcaaaagcggcgccctcgctcgggctcctgaaaacctcgcggccccgcccacggaagggcccgcccacctgccaggccacgcccccgtctcggccacgccgcagctcagggttttctctgagggctgtgagaggctaggcccggggagaggaggcagaggttatgctccggtctctgcagacttccacagtgtctatcgagatcacacatgccagcattgccccctcccatcctctcctcatcgtacggaggaggaaacccaggccgaagacctgaagtgtccaaaagcacagccaggccaaagagaagcaccatcccatgttctcccactcccactccggtgcttcttcaggtaggctaaacttcaggctaaaatgtgaagatcacagtgacacattcctgtcagcagaatctgctgcatatgtttgggagctggggtgtttggaagctccgattttgtgtggaggacccaagagagaagacagacccttcctgtcctataagaacagtgctcctcctgccctaacttctcttttcctttttctaactccctctgcctatggggtttgctgaaactttcaggaaaagggacgtgtcaaaagaaagaaatggacaccccagaggccgtgcaaccacagggttaaaaggaggtagccttatgagaaagcggtggagtggctttctggggtgaaacccagttcaaggacagaaatagcactgtcttgagttaagactggtggtgggggaagcctgggggtggggcgcagactgcaggcggaggagctccctgccacctgccacttggggtgtaatcacagagcagctgacactccccactcactgcctggaggagcttggcggtgggatcgggcaaggcgggaaagataggtgtaaaacaaagcctggcacttaattacagtgcaaagatctcattatagagtcttctcagctcccctcctcggctggcagcttgaagcctgagtgacaaattgcctaggtaggtctccaagggctgtatgtagagggatgaaaccacctccctgcccacccgaaccccactgtgggggctgtggagagggaggggatgttcacactctggcatatgcagggggcagtggggaagtctgtaagggcacctagaaagcagtaagagctgggagccacagtggccctagcctgacataaataacaccttgctggggcaagcccagtgttccctcttttggtagtggaaccgagggcaaggttggggacagcttgacgtgtggcactgtttactctgcatcataggtggatgctgcaagaccagcaggggcctggcttatcatgcaactttgtgaatatgtgggagagaggagccttccagacggtgttatggcctcccaggaactcccaaagccccctccccagggtggcatctggttttggacactggtttctgtcactgagctccagggactcatgtcacacctggaagaacttttagattctgtctgcctggccatgtcttccaacagccgagatcattgaggaagatgacaacttctacctgaacagccaggacagcttagggtcttctcacatgtggaccttgaaatgcacttctgttatttttctccagtatattcaggggaagggggctggtgatcaaagcttttgctgagcaggaacagaagggttgtcacttgcttttttctccactgaaacctagagtagcaaacacatcctcggggtgctatgtgatgctcacaggcagagccctgccagaggttcccgtcattcccatatattaaaccttcaatgtcttccctatgaactacaaacaaagtttatattctaggtcaaaaccccatcgtctagcccctgacaacttctctaggcttgtctgcttccagccccaacctcccagtccccagcctcagcagctgccttccacttgcttaaggtcttcacgcatgctatttcttctacctggaatactctttctccatgactttgcgtagctcactcctacccacattttagtgttccctgtaa

SEQ ID NO: 2215 - DNA, 4001 bp, Homo sapiens
atataaaatataagtacacttgcctaactgaatctgggaacatccacgtccagccctattattgtttatatggtgaaatttcaccatttcagaacaagtaagattcttttttaaattaaatactgacaacctctaggtagttctccagttttaagttactctggaaactgaataataatgttatcatttagaaaaaatgcatttattaattgcctttagtgatcatacattgacctatgaaataatgtttttaaaattatttttaaagacatgtttcttgaagtcttaccatgagctgtgtagtttgtacagttaactggttcttgcgtagcgtcatttatttttggatctttacaaatatatgtaaaaaaaaaagttaaggaaatacggactacattccaacacaacacattatcatgcctttactattcatattatatactcatgttgatattcacatgtaaatagaggctgctagtttgtccaagtcaataagcatatgtacaaatatacttttagtattgctaagtaatacttgaggcaggaggatcactggagcccaggagtttgggaagaacagcctgggcaacataacgagaagtctgtctctacaaataatataataatacataaacattacaataaacctttaaatttgccccataattatccacgtttttactcatgagaaaacagagttcaaataggtcacccaaggttgcaaagtgcaacagaaatttatccactgagtccccacgcggtggttcatggtgagggggatgcggatcgcttgagaccaggagttcaagaccagcctggccaacatggcgtaaaccccgtctctactaaaaatacaaaaattacccgggtgtggtggcgcatgcctgtagtcccagctactcaggaggctgaggcaggagaattgactgaacccgggaggcggaggctgcagtgagctgagatcgtgccactgtactccagccagggcgacagagtaagaccctgtctcaaaaaaagaaaacagaaagaaatttgtctggcagtctaccatctcatgaagtttgaagatgacatgaggtaatatgcataatatacataaagttaatgataaatgggcaacacattggctagatcgttattacttgtcttccccctaggaagagttggcaaacatttccagggtaagagactatccatctttgtattactagtgtctagaacggggcctggcatacttcaggatctacatgttttactgaacaagtaagcacactgataaaaaagaaaaaaaaagtggatcagaagaggaagcgccaatgactagtaaaatcataaggaaatcacaaagggtggcctctggccctcccatctccacaactctgttcaccttcagggatccttcagtcattagaagccacagatcagattatcgttttcactcagtacagccctagccagtcctgacggcagcgacccacctgcgaccccaactctacctcgcctccatgggggggtgttctccacagaggatattgtcccactttgaggtcctcgcacttaagcgactcctcgcccccggcggaggtggcaacagccccccagggtcctgtagtgactgagacgaaccacaggacaccaacgagtctggccgtcacggcctccggagcagacggaccagacggccaggcggccgccatcttggagaccgacactttctcgccacttccgcttccgcctccgcccaggagcgggagggagaagggcaacagggcgaggttcttaaagggacctcgcataggatagaggccagttccgtctcttcgcgtgttcttctgcccgtgagcccgtggaatcacattgggagacccttttaaaatatgcatgtacccagtccctcgaggcgaattttcccccacgaacccttggaaggagctaaggttaatctttgagtgctggaggaaggaaacgagtggtttaggcaatcaggtgcttcacccgcttctcattcccgcgcccttagctgaggcttctcggtcctctgaaagtgccagcggcgtcagaggttggaatcaatgctttcctgacatcatcgcagttagccctgataggttttgggtttacagataaggaacaaggctcaaagacgctgaaacacactgaccttaatcactaagtgactcagtcggaatgaaattgatgtttgccagatttcagatctatgctcttactaattgacataatgtcctcctgtaactttagagaaggattttggaaggctgccacgaacagaacttaaaaactgtgagagacattacgccttttaaaaaaaaaaagtgacaatttaggtgggggataatttggggggtggaaactgtaacaagaggaaaccaaatagtttatgattaagtgaaaagttgaagattttttttcctccatctgttgtttttaaatttctatatgttctaaaagttctgtggtggggaactttaacagtgaggaaaaaatgttttcgtaaagttaagtttaatcttttttttgtctaacaatataaaaatttgaacttgagtggtgcttcttcatccatactttagcactaactttggtggttctcaaactttgaatagcatctgaatcacctgtagtagttattaaaacagaatgatagaaccggcactcagagtttctgatacaaaagatgtagggagggactggataatttccatttctaggagatcccaagggatgtgggtgttgctagtccagggacccccactttgagaacactggtataatgttttacgagaagtaaatttttttttttaagatggaatctctctctgccacccaggctggagtacagtggcagaatctcagctcactgcaacctctgccttctggttcaagtgattcgcctgcctcaacctcctgagtagctgggactgcacgcgtgcgccaccacgctcagctaatttttgtatttttagtaaagacagggtttcaccattttggccaggctggtctcgaactcctggcctaagtgatctgcccgcctctgcctcctaaagtgctgggatttcaggtgtgaggccacactgtgcctggcctcattttggaatatatattctggaagacatacaactatttgaagtaatatttaaacataaactacgtttttaaattttctttttttgaggtggagtttcactgttgttgcccaggctggactgcaatggcatgatctcggctcactgcaacctccgcctcccaggttcaagctattctcctgtctcagcatccggaaaggctgggattacggcgcccactaccagcccagctaatttttgtatttttagtagagacgaggtttcaccatgttgagcaggctggtctcgaactcatgacttaaggtgatccacccgcctctgcctcccaaagtgctgggattacaggcgcgagccacggcgcctggccctaaaattttcataataaaacaactttgtagcattactatgctttattcattcattcatttagagacagaaatggagttgagacgggagttttgctcttgttgcccaggctggagtgcaatggcacgattctcgcttactgcaaactccacttcccaggttcaagctattctcctacctcagcctcctgagtagctggaattacagccatgagtcaccacgcctggctaattttgtatttttagtagagacggggtttctccatgttgatcaggctagtctccaacttccgacctcaggtgatccacccgtctgagcctcccaaaggtctgggattacaggcatgaaccaccacgccccgctgctattttttgagatggagtctcgctctgtcatccaggctggagtgcagtggcacgatcttggctcactgcaacctctgcctcccggggtcaagcaattctcctgcctcagcctcctgagtagctgggattacaggcgcacgccaccacgcgcagctaatttttgtat

SEQ ID NO: 2216 - DNA, 4001 bp, Homo sapiens
attctggttgagggcagttcggcagttaatatcaagtgtaaagttgttactacatctgcccctgaccagaatgagggcactgccaaaaaaaaagaaagaaagaaagaaaaaaaagataatacaggagagtggaaacgtggcatcccttaaggcgtccctctacagagacactgcagcccccatgccatgaccaacccatcttcctcatgaaggcaactgggggaataaatggagaaagcagtttccactgctgtcctgagttggagagtggggaatttccaaagctgcctctcacagactcagctgagggtctcattggtcaaagattcagggtttgctggccagactcatctggaccggctcagaatgaggctgaagtctgcagcagaaggctagcctcctccccacaacagcattcaagagaccccttccccctcaccatctcacttaaaacaggaactacacctcctgaccacatgggatggactcgggggtgacagcagagataaacaccaaggactccctgggcctggcaaaagctcaagcttcttgtgcagagagagcctatcccacagagatcctctagacataagtctagccacgaagctctgaaaaggacggcggcagaaccagagttcagatttgaataattactgcaaagtttaaaaaacacacacaacaataacctagtcgtcccccttttcactcctccccaaggcacacagacaggtaacatacacaggtaagagcacacacactcacctgcgctctgacttcctgactctgagctgctcaggccaaatgaggaatggcattggcttattctggtgagctccttagtggctgctgccataggatataggctttattaaatgcaacagagtcctttccgtttccctagcccagaccctgcaccttctctggagaaaataactgtgaggcatcaatttccaaggcatctaagttccttccttgggctgacatctcgctcagctggacggtgagctggcttgagaagcctgagcctgcagtccctgtggcagttccggcaaaggtgcattatttatctcagctgctgttttaattgatagagatatattcaagacagctcgccaattgtctcggcaacctcaggccggaaaataaacagctccatgtgaacagttctttcggcttctggttctagctgctggctcagcatgtatgcaacttgaactgaggccccaaaccagcccaagcactgctccaccacctgtcagttctccaccctgggggttggttcagcaggcaggcagagatctccaagcactatcttaacctctggctccacctaacggcaggaaatccaccttccccccccgcccccgccaccacccccccccccccgccccttcacagatcggcaaactgagcttcatccaggaaagcgctcaaagatcccaatggggcccggcacggtggctcacgcctgtaatcccagcacttaggaaggccgaggcgggtagatcacctgaggtcagttcaagaccagcctggccaacatggcgaaaccccgtctctactaaaaatacaaaaattacccgggcgtggtggcgggtgcctgtaatcccagctactctggaggctgagacaggagaatcgcttgaaccgaggaggtggaggttgcagtgagccgagatcgcgccactgcactccagcctgggcgacagaacgagactccgtctcacacacatacacacacacacacacacacacacacacacacacacacacacacaaagatcccaatgggtagagacttactcagcaaggaaaactaatggtcacctgctgtccactttttggttagcatcttggatttctccagccctttgtctgcgaataacacttcacacattattcaaacaatctcggatgggtgagtcactaaaacgcttgctgaataatggggaacaaacacagagacctgacacggagctgaaagacagaggcataaatggtacctgacgtcccccctggggtgccagcaaagcatccgctcatcctctctgacctttgcctggcttcccccctcacttttatcctgttaaagcacttctgcgtggggtggcgagagctaagtcgcgggctgggcttgccggggggatggtctgcgctcacctttaaatcaggaggcttgcttcggggacctgggttgggcgccgcggcagcgccggcgtctgaagttggcccgccagcagagttagcacccgtggtctccccaggccggaggtccgcgcccggcaggtgggaagcggcatcttccagcccagctccatcctcctcgccctgttgttgctgcagctcgtccgatctgcacctcttcatggtgtatgtgggtcggcaaggggaatctgtccttccagcgcgccgtcttggggaagaccgcaccccctcttatattcatatgaggcctggggtctaaattattaacaaggaggggagatggcagaccacaatttcttgaattaaaaaaaaaattcttaaaggcgggtgagggaggggcgagaagggggagccttggttatagcttggaatagttcatttcgacctggggagcgaagacaggtcacagtcgaggctgggcagcaagagtccttgggcagtcattgcaggagggagaagggagacaacccccggcccccaaactttctgcttcagggcatgggcaggacggagaggagctgggcggcacagcgcatccctcccggccggccgggctgcggggcgaggcggggcgcggggcagccggccgggcaggtcctagtcggccgccatcggcgccggctgcagcccccggccctgcaaccggcccctgccccgcatggtccggccgcggagcccgcagcgcgcccggccccctccccggcccgcgcgccccgctccccgcctgacgcgcagcctgccgcaaagccgcgaccgcggcccgagcccgcggcgagcgcgcaacctaccccgcccggctgcctccgcccgggagcgggaaggcgaggctaggagggagtgacagcggcaaccggccaatgggaagcccgcggggctgagggggcgtcgcgcagcttcgtttttggggttggttgcaccgtgcgatcccccaggagagggctggaggacgatgctgctgcgtttttgcattgcagagagcgggctgcagttcaggggcgggggcggcgggcgtgggagtcgcagtttcggctccagcttgagggaccctgccgaggagggctcgcccaggatttcctccacccattcgctttatttggcgagaaggagcacaagagggatgtttattatcactgctttttggggctcttaactttgcaccttctagccataagggagacacctatcccctctaggatacttggtctgagttaaatctatgcctacattcagagctgcaaatgccaaggggagggggcgttctctcctcatcgccccgtcccccgctttaagtgcattatttcttaatgagactttacttggcataatttatgctcagaaattgggaagaatttcatataaaaacacaataacgtatgtgagagttccttacaaactgtgaagcagcttttaaataagaaagggtattaatggcaggaggttgctacatatagatgtgtggaaagggaatgctgtctctctttgcataaatctcagccaaactgtgctgagtaatctggaagcagaagagagcaaacgttggggttaccaagatatggagagtagtaataataacaaccccatctgagtgtctattgtatgcctcctgtggacacaatggattttactcatccagcaaccagtggttcacaaattgtgatccttggactagcaacttcagcatcacacgggaacttgatagaaatgcaaattcttggccaccagccagacctagagaatcagaagtagtgagccaagaaatctgtgttttgacaagccctccaggtaattctgacaca

SEQ ID NO: 2217 - DNA, 4001 bp, Homo sapiens
ctaagacatagagagcagttacttttctgtgtcgcatacatactagaaagcagaatggcgaggctgagatgacgatttttttaaaatggagatggggtctcaatctgtcacccaggctggagtgcagtggtgcaatcacgcctgactgcagcttcaacctcgtgggctcaagtgatcctcccacctcagcctcccaagcagctaggactacaggtgcacgctaccacacccggctaatttttaaattctttttgtagagacagggtctcaccatgttgcccaggctggtctcaaactcctaggctcaactgatccacgcaaatcagcctcccaaagtgctaggattacaggcaggagccaccttgcccagccaagaatgttttgtttttgtttttgtttttaaacagggaagtaattgaaggcacaacctcaaagacaactaagtggatctagcaggaataaccaacagccaaattaccatcaccaaggctgagctgcttccctggaccgtgagcccctatctgtcccccgtcacaccctgctccctttggggcttgaggtctcctactttcttggggtggggctggggtgagcctctccaggacagctgaggaaatttagctgcctccagggtgtttcggtaactcaaccccgccagggctggactcaaccctgccagggctgctctggtccgaaagccagctggtgagttctaaacaatggcagggggtgtgggggagtgggggaggcttatgaattaaaaatagatgctagtaaccgccagggatcttgcagagagcatgtggggctgtgtttactagggagagaagaatacctcctattcatgcccagagatcagggcagaaccactactgcttctcacaccagcccagggcctctgggtctgggggagtcagctgacagagcagggtttaccgatggctggaagacctttttcctctgtgacagggaagcaacctttctctcctcaggacccccagggccacgcccattcctggaaggacagctccaggtcaggaaatctatgcaactgaaggggaaatggcaaccaagagataaaatcatcccactcgggctgaggcaaacctgctctccatagactttgcataaaatggtccccagccgggttcagtgacgtcacctctcagatgagtcttgggtacagactaggatcccttgtctccctgccaagacctagctgggtgccataggcaagcagtctcttttcctctaggccttagtctactcatctgtaaaatggagataacacctgctctgccaacttcacaggtatgttataaagatcaaccaggccatacacctaacaaagctgagggttctaaagaaggatataaaatagtcacaagaacaaccatttcccccatgatcaccctgaacccagggaaccgtcccctcatcaggtcacccaaagtgtctgggtctcgtcttccataagcagcaaaaaaagagttcctccctcccatctggatatcttgggcacagtgagccacatggcagagccccacagagaagctccccagctaatgagcctgccccacttcccccaggcccctgcaaacatccacagtccttcaccagcttccgacagtgcccactgcccaccccaacgtcttccccctgctcaggaggtcttcatgggagccctaggcaaccaaagacagcaaggttcacgttttccctcctcataaaatagctgcataccagagactcctgcttgacaggatttttctaatttgatttttaaaatgtattcattgactcacccatgagaggtgggcctggctgcctctacatgcagagtgtctgctcattaagggctgaacaacctggttcattctgctgggctcctccagctctcaatttcacaaagccacgccacccttttagccaacgcgtgcagagctcctcactctgagaacagacttctccccagtggaggctaggcttgcaaatggttcagtcccatcattttaaatactatctatatgctgacaactcccaaatttatgcctctagcttggatctctccccagaactccagactcgtacagctgactgcttatttggcatttccacgtggatgtttaatagccacttcaaactgaaggtaccccaaacctagctctgatttctgcccccaccccccgcccccacctcacaccccttgccaggtactcattctatttgccatcttccttgactcagttattgaccatttcttctttctggctgccaggccgcaaatctgtgaaccacatttgacttctctctttctgtcatgcccacatagaatcatcagaaacctttgtggcttgatctttgaaaccaatccagaatacaggtactccgccccacccccagagtagttcaacagcttctgaaccagatgccctgctcacgccccgttcacagcacttcgggaggctgaggaaagccagatcacctgaggtcaggagtttgagaccagcctggccaacatggtgaaaccccatctctactaaaaatacaaaaattagccgggcgaggtggtgagtgcctgtaatcccagctactcgggaggctgaggcaggagaatcacttgaacccaggaggtggaggttgcagtgagccgagatggatgacaaagtaagactctctcaaaaaaaaaaaaaaaaattgggatatcttcagctggcttagctatctcacaggattgctttaatgaattcatgaaatgatgtctacaaaagcactttctacgttagaaaagtgcaaaaccaaacctgagctgctatacagtgccaggcacacggcatacacacaaatgcttgttgaatgaatgaacatccaaacattttcaaatgtaaacatgcacaagaacttgagaaacagtctgtgttgatgagaggacaatttaaaactgtacgtggagatggatctgctctggtgatcatctaaggtaaaaacaactttatatctgagtttcccttggaactctgacgctggaaaatccacggggcctcacatcccccaaatgtagaactgtttggtcttccatcatgtctcctctcacttccacttgaactgtcttctctttcatccgccctcccactggaccttccagagtcctccttccacaacaaacaagctgcctcctgcccatagtctagcacttgggcccctgcaggctcttactgcagctccacttgccccggagccctcattaatcgcagtgattttttcttcctcttcctccctcattttgtgccctctggagacgggaccagcattctactgtactcagtgttgcttcagcctggccttcgaggtccctgccattgcactcttctcccccaccctccagtcatcaaagagacctgctgccctccttcctgaccactgtccaagggggcatctccatgtcatgtggacagcccatcccacaacctagcctctcagctcttgccactgcaaattatctttccattcattccttgtctgtcatgctctatgagtatactctgacctttgtcttccctatcccaccccccaaattgtaaactccaatgccctctcctgtctctctcactcctctttattcttaatgtacctgctccctcattccctcagtacccccatctccttttctccacattcatcagccttctcctatccccacctccttctctgctagccgaggtttcaaggtccaaccttttgagcattctctgacccaaacaaacccccaactcctttgtcacccttacatgccctcccagcaacccccaaccctggattagcctgataatcgttcagctctgttcctaccctctggctaggaccactagagagaaaacaaatcgcaaccactagggtgctgccagcacaaattaccagcctctacaacaccagacaggtcacccgtgagttcctgctcagagccttgctctgccccaagccaaagctttactgccctcctc

SEQ ID NO: 2218 - DNA, 4001 bp, Homo sapiens
gagcctgcagtccctgtggcagttccggcaaaggtgcattatttatctcagctgctgttttaattgatagagatatattcaagacagctcgccaattgtctcggcaacctcaggccggaaaataaacagctccatgtgaacagttctttcggcttctggttctagctgctggctcagcatgtatgcaacttgaactgaggccccaaaccagcccaagcactgctccaccacctgtcagttctccaccctgggggttggttcagcaggcaggcagagatctccaagcactatcttaacctctggctccacctaacggcaggaaatccaccttccccccccgcccccgccaccacccccccccccccgccccttcacagatcggcaaactgagcttcatccaggaaagcgctcaaagatcccaatggggcccggcacggtggctcacgcctgtaatcccagcacttaggaaggccgaggcgggtagatcacctgaggtcagttcaagaccagcctggccaacatggcgaaaccccgtctctactaaaaatacaaaaattacccgggcgtggtggcgggtgcctgtaatcccagctactctggaggctgagacaggagaatcgcttgaaccgaggaggtggaggttgcagtgagccgagatcgcgccactgcactccagcctgggcgacagaacgagactccgtctcacacacatacacacacacacacacacacacacacacacacacacacacacacaaagatcccaatgggtagagacttactcagcaaggaaaactaatggtcacctgctgtccactttttggttagcatcttggatttctccagccctttgtctgcgaataacacttcacacattattcaaacaatctcggatgggtgagtcactaaaacgcttgctgaataatggggaacaaacacagagacctgacacggagctgaaagacagaggcataaatggtacctgacgtcccccctggggtgccagcaaagcatccgctcatcctctctgacctttgcctggcttcccccctcacttttatcctgttaaagcacttctgcgtggggtggcgagagctaagtcgcgggctgggcttgccggggggatggtctgcgctcacctttaaatcaggaggcttgcttcggggacctgggttgggcgccgcggcagcgccggcgtctgaagttggcccgccagcagagttagcacccgtggtctccccaggccggaggtccgcgcccggcaggtgggaagcggcatcttccagcccagctccatcctcctcgccctgttgttgctgcagctcgtccgatctgcacctcttcatggtgtatgtgggtcggcaaggggaatctgtccttccagcgcgccgtcttggggaagaccgcaccccctcttatattcatatgaggcctggggtctaaattattaacaaggaggggagatggcagaccacaatttcttgaattaaaaaaaaaattcttaaaggcgggtgagggaggggcgagaagggggagccttggttatagcttggaatagttcatttcgacctggggagcgaagacaggtcacagtcgaggctgggcagcaagagtccttgggcagtcattgcaggagggagaagggagacaacccccggcccccaaactttctgcttcagggcatgggcaggacggagaggagctgggcggcacagcgcatccctcccggccggccgggctgcggggcgaggcggggcgcggggcagccggccgggcaggtcctagtcggccgccatcggcgccggctgcagcccccggccctgcaaccggcccctgccccgcatggtccggccgcggagcccgcagcgcgcccggccccctccccggcccgcgcgccccgctccccgcctgacgcgcagcctgccgcaaagccgcgaccgcggcccgagcccgcggcgagcgcgcaacctaccccgcccggctgcctccgcccgggagcgggaaggcgaggctaggagggagtgacagcggcaaccggccaatgggaagcccgcggggctgagggggcgtcgcgcagcttcgtttttggggttggttgcaccgtgcgatcccccaggagagggctggaggacgatgctgctgcgtttttgcattgcagagagcgggctgcagttcaggggcgggggcggcgggcgtgggagtcgcagtttcggctccagcttgagggaccctgccgaggagggctcgcccaggatttcctccacccattcgctttatttggcgagaaggagcacaagagggatgtttattatcactgctttttggggctcttaactttgcaccttctagccataagggagacacctatcccctctaggatacttggtctgagttaaatctatgcctacattcagagctgcaaatgccaaggggagggggcgttctctcctcatcgccccgtcccccgctttaagtgcattatttcttaatgagactttacttggcataatttatgctcagaaattgggaagaatttcatataaaaacacaataacgtatgtgagagttccttacaaactgtgaagcagcttttaaataagaaagggtattaatggcaggaggttgctacatatagatgtgtggaaagggaatgctgtctctctttgcataaatctcagccaaactgtgctgagtaatctggaagcagaagagagcaaacgttggggttaccaagatatggagagtagtaataataacaaccccatctgagtgtctattgtatgcctcctgtggacacaatggattttactcatccagcaaccagtggttcacaaattgtgatccttggactagcaacttcagcatcacacgggaacttgatagaaatgcaaattcttggccaccagccagacctagagaatcagaagtagtgagccaagaaatctgtgttttgacaagccctccaggtaattctgacacacactaccctttgagaaccactggcctagacagtgaaggggccacacggtctctaaaggattttacagtttaccaatctctttcgcacccatcatgccattgtagcctcacttcagtctcactagtcggagtttcttgactttctgttctgtcttcttcccattccaaccactcattttaatgtgtatcctagaagagactaatttgttaagaatttacttcagccaagcagctactttctaaactaggcagctccacttttagaagataggaatttaggatgggctgggaatgtggaaccaccccccacatctaccacaaagaatcgagcacaatgtggaaacacaaagctataagcctttatttagcattttcaatggtgaggggatggcaggatgccagtgtagaccgtgggcaggactagacagaaccggtgggggcaggttcccatggtgcaaggtttcaagcagaggaatatactgctccctgcctgacttggcccagataagtgcagcggccccaaagaccctgagcaagtcttgaggggcacgcggtggccagcaaatggtgagcatgcattgacacatgttcatgacctgactcgaagccgaaggaaagtgaagggatttggtttaaggaagggatttggtttcgtttaaggaagcagagagcattataattttgaattatgcctcatttctatactagataaaagttggtcttaagtttgatttttatattatcatatacatacagcatgacagccacattttctacttgtcgtcatatttgcaaggtgtgattcaggtcagcaaaaaagtctgtggtgtgtttcataaaatcagctaatactttacattccattttggagaggcatcatagcataatggttaagagctcaggctctatggccagataggggacaaatcctagctctgctcttcactgaccatgtgagtggggacacgttatctaacctcttcatgctccagtttctgaattatttggaagtagggataatg

SEQ ID NO: 2219 - DNA, 4001 bp, Homo sapiens
gcagcaactactcatctccaggcagtgcagagccagctgcctattatcagctgacaccaggtagaggcttccacctgccacctcctgtggccagcaagttcttcctcctgccctgaccctaagggctactctcttgtcctggtggagacatccctctcatctaacccttggcttctagccccttccattagggccacccctcagttctgatgaaaactacatcctcccctcagtgtctgccctgtggagaacaaagcccttttgtccagtaaatgtcctgcaccctcctcgtctcctcacacccacagatcccagttggggccccgagctcccctctcatattcaggtcttctccattgtccatcctctgaattccctaaaaactctcagtacccaaacattttactccttatggcctctcccactgtctccctggggtcagcactcactggaccttcacagtccccattcctgtcactgtttcttcacagacacaagcgaccacaaccaggaacacccctccacttaataaggtgcctgggccccagctgaagtgccacatagccacagcttctggaggcatctctgccagggttcacctgccttcctgcacagggcgcccacatccaaccccaggggctctcccagcatttggcagcctaaggctcctcccttctcccacccacaaacagttctctatacctggaggagagctccctgagagactggagtgtaagcacagcccacctgactaactgcagaacaggccttttcccatcccccaactccaccccgcccggtgaaattctctccttccacccaccagacgcctcacctgtgtgggcactgtttcccgaagccgtgccggcgatgaggtacccggggctctgaggccccagctgtctgcggactgtgtcaggcccccggggtcacagaccctgggcagcactgggctgcgagcaggtgtgcctgagttcccagactctgcagccgccatctccagactgaggcacagcctggggattaggggcggattgctctaggagatttccccctcccctggggctcacgggctgctccttcccatctggcaggagacagggaggatcaccgagcgcgggaggaccgagctctgatgagatgcccctccacaagtccagctgttccactgtgagttgtgtgcataaggacacccaggtgtgacaggcatcaatgaggaggggtgggggtggggggcaaagggggttgaaagggatgtgcacgaggacacatgacatgtgcacctgcatccttcaaccacccagaagacaggcactccacctcacccctcccatctcacagaaatgcctcccatgatcagaagctcctctcacaaacagagcagtctcatggattcggaatggaagtgagcctcccagccagccttccaggatagcgaagagctctccaaagccaaaaaagactagagcctggaggggggctccctggcagatcctaacacagccagctccagccagagtcctctcctcctctccctgctgccctgcccgttggcttaaggcaccatcacttccaaggcagtttctctactccaataaccacctggaggaagctgacagcagccagcctcaccaggggaattcttctgccctgagatcctgtcccagaaatccagtctctgccctggacaccaatggccacttctgcactagcttctgcttcccagtctctgccagcattgccctggcaaaaacacccaagataaagcacagatgggaaactcacagcagtctcttcctccttggacttcatcttgacagtgccagcaggaaattctgtgagtggccagcagagggggacagaggtccacagctgaggacaatgagcagtgagcagtgtcaccggctggccagctgagtcctggggcctgctggatctctctaatggcagcttctcacagcagaactgtcgttcagaaagacatggattctgcacccacttgagtctggtgaggaactccaggcttaaatactgatggccgacacgcgtcacgttgattgggtagtcccaaattcaagaaggtgtgaagagataagggcccagtgctatctctgggagccagtgccagggcttgcaggccaaaatcactgagatcaggagtcctcataccctgggctcatggaaactatacaaacatttgtggttggctgatgacttggggtttgtgaagaagcctggcaaagcatattacataggtcccaatttctggggccagctctgacctgtagggccagggaacacttctggcagctcccctacttctgcaaatgatccccctcctatggtactggatcttgactttatattttcgcaccaagcactgttcttgcataagggttatttgtaaataggtcttatgcccctattaaatgataaggcagggatcagatcttatgttcatctggaccattcactgtgcctagcataagactgatcctccctcaatactgacatcgtaaaacaatgaaatgatctacctcatttagctgccatgaaaggcagtccagccactgcagttctgtctcaggtagaaacaaagacagcttggtcttctcatactcaagataccccttcttttttcactttttgagatggagttttgccctgtcaccaggctggaatgcattgacgcgatcttggctcactgcaacctccacctcctgggttcaaccgattctcctgcttcagtctcccaagtagctgggactacaggcgtgcaccaccacgcccagctaatttttgtatttttagtacagagacgaggtttcaccacgttggccaggatggtcttgatctcttgacctcgtgatccacccgcctcagcctcccaaaatgctgggattacaggcatgagccactgcacccggccaagataccccttctctgcccgctccaggctaggccccaccaagctaggatttttttttttttttttttttgagacaggatcttgctctgtcacccagactggagtgcagtggcacgatcacacctcactacagccttgacctcccaggctcaagcaatcctcccacctcaaccacctaagtagctaggactactggtgtgcaccaccatgtctagctagtttttgcagagatggggtttcaccatgttgctcaggctgaccttgaactcctgggcacaaacgatccacctgccttggcctcccaaagtgctgggattacaggtgtgagccaccatgcccagcccaagctaacattttaaactttttcttattaagcagaggaaaaggaagagaaggcagtggcagcaggagacaggtggggaggggccgagtgagctgagagccctggggttcactctgcatggtaggtctctctgtgcttcccgggatcaggagggctcagaagcaacagaaagagtttcctgcaaggccatgctgcaccaccagaatgaactggggagagctgcccccaacacaggcacctggcagctccctaatggaaggttatagctccactccaagagcagcttacccatcagcacaataactgaacagcaggaaaacaggggttcaggagggaaccaatagttcactaggagaaaagtagcaaacaagaaccagggagatgtctgccaggcaagctagcagcagagcaatgcttttctaagcctgctcgtctttatacatgagacgtgttcccaaatctgccaaggatgcagagcttcctgtggtgggggtggggaacagatagcccaaagcatggtggcatggtgggaaaggccctgtagagccctgggcgtgagactcacttccatgctttctaagtgaccttggtcaagtcactgtaggcgctgagactgtttccacaaatgtgatgggaggacggcgtaaagacagggggttaaggtgaatgtgtctggcaggaagatgtgccagagctgggctcgctgggcactggatgagcctttcagtg

SEQ ID NO: 2220 - DNA, 4001 bp, Homo sapiens
cctggaagaatatcacgtttgtgaaggtaaagataacgagtttggcccagatatgctgaggtacataatcaacactgagtaaattaaggaacagtaagctgtaattttaaaagcctgagtctggtctctaattctttgtttgctctgtgacgtaagttgtcattatcatcctgaggctcaattttctttcctatgacatggaggtaatatttatacgagtaaccacaaatggttgctgtgtagatcaaatatggtaatttaagaaaaaaaacttcaaacccctatgaagatataagaaaaagtcacagaatacagaaagttgtaggaattctaagaaacaaaagttatatttaatccttataaggaaaaaaagaagagagaaaactaaatcaggcctataaggaaccattcaccctgtacctttagctgagtcctgtggaattcctgctttatttcaaaggtaacaaacccttcttgtttttaatcttttccttaaacacctcttcaactttctaacccaactgaaactcggcttatctctgaagacaccacttaccttgacaccagtcataatgacatatcatcctccaaacatgccttaaatgttaagatttccatatttttgctcatatgttatttctttacctggaatttcctttccccatttcattctctatccaaattctaactatccacaaggaactgcaaggccatcagcatcatgaaggctaccatggttcctcacaactgaatgaagcctcttcttcttttttttttaaagacaagtctcactattgcccaggaggcagtgtagtgacaccatcgtggcccactgtagcctcaatctcctgggctcaagggatcctcatgcctcagtctcccaaatagctgggactataggtgtgtaccaccatacccagctaattttttctgtagggacgaggtctccctatgttgcccaggctggtgtcaaacccctaagttcagtcctgcctcagccttccaaagtgctgggattaacaggagtaagccactgcgccagattgaacctcttctttagaaccaccacagcacataacatgtatctgctacgcccctcacttccctctagttggtattacacattttgcataaaagtcttctatttctaaataggcttcaagtcaggttcatctttgtatcagctggtgctcttaaaatatttattgtgaacatggacttaatgagcttgacgtgttgaaattatttctaatgtgttgccatactcacattttttactctgtttttccacttctgccttcagtctcttgtacttgtctgtcctgtaaaccaggacccaggttatgcctaaaacattaaaagcaacatgttaatagagaaatgactggaatgatcacaacaaacaaagtggttactgttggagaaggaggaattccaacttttcgctttgtatttacccatagttaacttttttcaaaggctaatacaactgactcttcagccaaaacaacagtaacatgatgtgaaggtgtctccacaaatacccaagtgaaatctacctgagaccaaagaaaactcggcaatcgactccatactcccctcctgctcctgttcacgagttgcccagagattccctgaagtggagtagatgagcctctcaagcaagtaaggctcgcgatctttcccctggtggcacaggggaccccggggcccttcctcccggggactgatcaaacgtctgagaaatacccgctctcaccctctgcgagcagagccgtgcacacagagataaaaacgatgaggagagtgtccgcgaacatagtgctcatctcgcaccttcgtctctgcactctcacccgccagggggaaagcgctctacagccaggaaaagtgaagcgaaaacggcttccgtagactccgccaccaccgagtaacagaccaactctgacagcccgaagatcgcacttccgcttccggggcatagcaccggaaaggctcgtatcggagaacggtgtggccacgagagtctagaggaaaccaacccgcaactcactggagctgaagggctggtagtcaggccgaatctcgcgagaattggaactatttcagagccagaggaggatagtggcggcggcgaactttgcccggtagattttactgactggggtgctggcgcgcgcctttttctcggccagaatccagttattgggatagtcttgacttctacctcagcccaacttctgtggtcgtaatattagtttagcttgggtttgccgtgaagtaagaagactgacttccgcaaaggtactgaacgactgggtgtaggtgccagggcatggacgtgaagctggaaccgcgaaatgagttagttgtgggccgctggcctcaaggagcgaacgtcagcgcgaagaggagaagcttgtgcatacgctctgataagggttttaatagaggtattaccacagtgctgcgtgacacggttgagagagtggtcagaagaagctaatgaaaggaattgaagcagtgccttaggggagtaggagtacttttggagatagcaaaggactttctaggcaaagtggaagtcaaagcacggatgcctgaaaattcatagtgtgatagtgcagtgagtaatgtatctagagaaggggtcttaaacccagatgcctagactggcgagagaaaataaattatcttatgcaagctgagcctaaacaaatggtggaagttactacgatggataagtgagcattaagttcatctgaaaggagaatttgatacccaaatccaacccatttctctaggagaatgagcacccagtttctgagatgtcttcgtttctcaggaaaatccagaaatcctgggttttatgtgaaacttaatttataagtgttgctaactaattaaaattcaaaaatgtctcagcagcgtggtttcagccattgtagacggtttcagctttttcacactggggtgtgtgtgtgtatgggtgaaaacctggaagctggctgagctgtatcctcttgtacttcctcctatcattggtgtttttttgtttgtttgagatggagtttcactcttgttgcccaggtggagtgcaatggcacaatctcggctcactgcaacctctgcctccgggttcaagccattctcctgcctcagcctcccaagtagctgggactacaggtgcccgtccccacgcccagctaattttttgtatttttagtagagacggggttttgccatgttggccaggctggtcttgaactcctgacctcagatccacccacttcggcctcccaaagtgctgggaatacaggcgtgagccaccgtggccggccctcattggttcttttaaactgtactgcacttaaatatataattctcctaaacactacttttgacttttttttagctttatgtgcatttcttgtctcccagacttagcaacagagaccctgtctcctttttaagaaacattattgagcttctactatatgtcaagaactgtggtaggcactgtagggtcaaaaggatggttaagagaatattcctgacttctaagggcccagggagattatataatataataagattataggtattatagaggtattcttaaaatgttgagggggtacagatgaaaacaagatgtattcttcctggggagttggaaaggtttcagaaagatcatatttgagctagacctttatttgagcagttcagacaaggataggtttttattcacctttgtatcacccaaggtaagtgctgagataacaataagagcatgatcttggaaatcagacctgattttaaattcttgctctgccacttacttgacagcagtcctagaacctattgtttagcatctttgagccttcaaaatggtggtaacatcagctatgaagactggatgaggaaaagtatattataaagcatttcaagcagtgcttggcacacacaattcatcaaattcaacatgctattcattgtaagac

SEQ ID NO: 2221 - DNA, 4001 bp, Homo sapiens
ggagttcgagaccagcctggccaacatggtgaaaccctgtctctacttaaaatacaaaacattagctgggtgtggtggtatgcgcctgtaatcccagctactcgggagggtgaggcaggagaattgcttgaacctgggaggcagaggttgcagtgagccgaaattgcaccattgcactccagactaggggacaagagcaagacttcatctcaaaataaataaataaataacaaaagaatatgtatagtaggacagattcttgctaggataagaaaaaaaatcatcttgttccttattataacaactagcaccactttttttttttttgagacacagtctttgtcgcccaggctggagtgcagtggcacgatcttggctcactgcaacctccacctcccgggttcaagcaattcttctgcctcagcctcctgagtagctgggactacaggcgcgtgccaccaccacacccggctaatttttgtattttaagtagagatggggtttcactgtagcaccacttattgaatatatgtgctaagatttacacatacaatatcttctttaatcctcacaatacacatatatatgcgcatgcgcgtacacacacacacacacacacacacacacacacacacacacacacacattcctgttcaagatttaggtcagttggtttgcattaaatgagattttggagaagaactgaatttcaaatcctaaaaattcgattcaaactccaattttgccagctcttacaaactatgtgaacttgggtgggtagcaatcaagttctctcatctacaaaatggagcaaataatctctccctgactgttatgcaggattgtgatggtttaaaatagaaaggccccgtgaccatgattactaaacaatagtgacatatgaaaataagtgaatgctaaaaaatgatccaataacaacttctctctgcatttatcaagtaaacttgtcactctaagaaagccgttttaaaagcctgtcaccttaagtttccactgaacctcagtgcacctcagtttcttcacttgtcatgtgaaaataatctccatccatttcatggaatttttgagattctcaaagcattcaactatattgtatgtcaactattattattggtgactacacagaagtatgtaaaatcctgtctctcacaatcccagccagttaaattcctactccccaaagagctcctatatacttatggagccttatcttgtcaaaacacaataatgaacacattgtgatgacttaatacatatgcctccttatcagttacagaacaatggcatagtaagaaaggccatactcatgatcctagctactttggtgcctattgtataaacatagtagcactcaaagatgaataagtgatcaaaaatttttgagggtaaggctgtcttttcaggttaccaacatgtttggtctattttattacagaagacaagccaaagaccattgtgagaaaagcatttttatgcccaaagcctaattggtggagattttcaaggataacctagtttttgccaacttaagagacaaaggttcgcctttgcacatctgcatgatcttaaaactggtggcagcaatatgggagagaactaatcaaatttcaatttataactatataaatgtttgtaacaaaagagtataacctgaattgactgaatacttcgtttccataaggcatatattcctattcccaataaaatcaagaaagaaatcctcaagatgatttgcacagctggagcaagattatctaatagtcccaaacttgtttgctgaggtgcactagtctctcccaaaaaacttgcttgtatccaattccatactgtgctgagagagagagactctaagaggttgtcccagctagaagatgaagatgttgacattttaataagcagcagctctaggaactacatgtgcagaagcttcaggaatctaaatatgagttagggggagtagtctggaggcctaggtattccagagccattgtgagctgtgctttgtgatgtcactgttccaaaggtcagcttgcttcccactcacccaaccaatgaatcttactcaaaaccaaccaggcaccggcctgggttttcagttcattcatattgctttgtctgatctttggctagttctggctctagcatagtgctgtccagtacaactttttgcaataatgaaaatgttctttatctgccatgtccaatatggtaaccactagttacctgaaatgtgaatagtgcagcagagattgcattttacattttaactaaatttggctgggcatggtggctcacgcctgtaatcccagcactttgggaggctgaggcaggtggatcacttgagcccaggagttcgagaccagcctggccaacatggtgaaatcttgtctctactaaaaatacaaaaattagcctgacgtggtggtgcacacctgtagtcccagctacttgggaggctgaagcaggagaatcacttgaacctgggaggcagaggttgcagtgagctgatgttgtgctccagccttggtgacagaacgagactccatctaaaaaaaaaaaaaaaaaagttaaatagccacctgtggctagtggcttctctcttggttagtgtagatctacatttccaacaattcaaatggacagcagctgttgcagctgttttcacataataaaaaaaactgagttgtattgaggttgaatggaaatgtgaggagatgggattttttatttttatttttttgagctggcgtgtcactctgtcgcccaggctggagtgcagtggtgcgatctcagctcactgcaacctatgcctcctaggttcaagcgattctcctgcctcagcctcctgagtagctgggattacaggcgcccgccaccacgcctggctaattttttgtatttttagtagagatggggtttcaccattttggccaggctggtctagaatgcctgacctcaagtgatccacctgccctggcctcccaaagtgcagagattacaggcatgagccactgcacccagcaaggaggtaggatataaacagggcttttttttttttttttttttttttttttttttttttttgaggcggggttttggtctcgccctgtctcccaggctggagtgcagtggcgcaatcttggctcactgcaacctctgcctctggggttcaagcgattctcctggctcagcctcctgagtagctgggattacaggcatgtgccaccacgcctggctaatttttttatttttagtagagacggggctttaccatgttggttaggctggtctcgaactcctgacctcgtgatccacccgcctaggcctcccaaagtgctgggattacaggcgtgaaccaccacactcggccttcagtttacctttaatagtggcatccacccactcatctgtcagtcacttccactcagtagtcttccatatcatgccctattaggacttactgacttaggcaatgcctactttcaagcctttggtaaattctttttttttttttttttgagacagggtctcgctctgttgcccaggctggagtgcagtggtgcgatctcagctcattgcaacctctgcctcctgggttcaagcgattctcctgcctcagcctcctgagtggctgggactacaggcacgtgccacgcctggctgatctctgcatttttagtagaaatggggtttcaccatattggccagattggtctcgaactcctgatctcaggtgatcctcctaccttgccctcctaaagtgctgggattacaggcatgagaaatagcacccagtccgcctttgaaaaattcttataggttcttcattgtctttcaaacaaaatccaaaatctgtaacatggctaacagggcactaaaatgcctggtccctgcttacctaccaagtcttctcttcctctgccatttgttctttcaactccagctatagtagtcttatcaatgtcaccaacacaccaagc

SEQ ID NO: 2222 - DNA, 4001 bp, Homo sapiens
gggagggagggagagagagagaaagagagagaaagagagagaaaagaaaagaaaagaaaagaaaagaaaagaaaagaaaagaaaagaaaagaaaagaaaaggagaaagaagaaaatgggaagccagagcggggttttaggcagagggtggtaccatgatatcagggcagcttgaagcggaggtcggctaaatggaaagtggattggatttcactctcaccccttctgcctgctgtcacacgttccagagagccagttccccactcctcatcagcagccccggtttataatgtacaacactgtttacaaaacacacaggccaaaagagaacacaatgagaaaccacccactgacatttcttaggtcccacgttagccagccctggtggctgatcagcctttgtagcccagtggtaccagagtagagagagatggtttgagccttatgaggaactctccagaccccagcttttgtgggagctacatgctgagctatgacaacctaatcgatgaactcctcctgtccaactcctccttgggccttaggactaaaaagtataaagtctcccaaagtgtcagatactgcactgggccttttgtggcttcagctcctttaattttcacaacaaccttggagacaggtcatttaacttgcctgatcccactcagttacaaagctgcaaagctagcacctgagcccatctctgtctgatgctgcacacgagggcttgaggccactctaataccgatctcttctgctgtcttcatgtacttcacagttggggaaatgccagtggtctcccctgtgcccagccctccctccccaggctgaagggcagggctttattccaccctctggagtgtacttcctgagggcagcgctcctttttgttcactgctgtatcctcgttgcctaaacaatgcacacagtaggtgctcaacaaatatttggtgaatgaacaaatggatgttcccaaagcttaaaagagtgtcatattttctgcaatgaacactgagttaggaaaaagggggctcatgtgctgactcctacttcgagttaggtagtagtctgggattctagcctggccctgctcctaattcccagtgcaaccccagggaagggccaggcagcctggtcagggcaaaggcattgtggaggccaactctgtgcgaagcactgggtcaggctctccaggcaggtagcccaggtttttatctcttgcttcctagctgtgtggtcttggggaagttacctcacctctctgagcctcagtttacccagctgtaaaatccactcaaaagtcagcagcagtaattcttccctcctgtaacttcaggcatgggcaccagaagacatggcctccttgtaacatgaggagcctggtttttctccagaggctccccaagccctcctggaattctctgtttgagagtctgcggggggacagggagacaggaggcgggggagtcctagaggccttcctgacgggggcgtggaggggccacgtggggcaaggggaagcacagggacctcttgtgaccttgggcaagcccccttcctctctgaccttgaccagcgtcctcatttgtcaagggagcggctgggtgacctctaagaactcggaggccgaggccggagtcgcccgagtgctccgcccagcctcagtttccccctctgcctccccaagatttctaaaagcacttccggctctgaaaacaaaccaaccaccagcaggcggcctgggcttagggcaggcagcgccagggagcgcgcggccgcttcctggtgggtccagtgtccccggggtggagggcggggcgcagggcaaagggccccggggctgggccgggctccgagtgccccgcgtggggccggcggggagtggcccagcgaggtgcgcgccaccgtggcctggcggctcctccggggcccccttacctggaggcggctgcgaaggcaaaggcggaggcggcaaaaccggcgagcggctcctcccgcccggcccggcccggcccctcccctccccgccgcgtcccggccccggtcccggcccgtcccgccgcctgccccgagcgcgcctggtcgccaccggccgggcggagcacttagggagcgcggcgcgggggcgcggggccttccaggctctgactcgccagctgcgggtcccgacctggctcgtcccacctctgccccacctccaccacccatcgcgacaggggtgccggcctctgcaggtgaccggcaagcccgcggcgccacatctgtgtgtgggtccatttaccctccaggaagcagcgagacagcgcggcgcgggagaagggccctgcagggttggactttgcagaaactgcccgcgaaggactcggccccgagagtggcatgccccaaagccacattttgaagacaaagtcttcaaaaatgtataatgtaaacaaagaaccagccgcagaaaccgccttcccgcacgtgtatgcagcactttgtagtttgcaaagtgttcagatatctaagttcttcctgattctactttcattttccctaacgctaagtttggtcctgtctcagggcctctgcctggaggctcccgtgcctgggactctctgccttcagacctccctttcccccaatccatttcctgctttccattctggtctcttgggatgggatctgagagtcttccctgagcacccagcacattcagtcattgaacaaatttaccgagcacctactacgcgccaggtacagttctttttttttttttttttttttttttgagataagagtctcgctctgtcacccaggctggagtgcactggcccgatctcagctcactgcaacctccgcctcccggatttaagcgattctcctgcctcaggctccctggtagctggtactacaggcgtgtgctaccacacccggctaatttttgtatttttagtagagacggggttttgctatgttggccaggctggtctcgaactcctgacctctggtgacccacccgcctcggcctcccaaagtgctgggattacaggcgtgagccaccgcgcagccccaactagactttaaaagccctggaggtgggcgggtttaggctgccttgctctccgctgtgtgcccagccccagggactgtgcctagcacttgcaggtgctcaaaagaagcacttaatgaatggatctctttcccctagcaaccctgtgaaatttcatcacacccactctgaaggagaggaaaccgaggctcaggtccagacaatgcagaagccacagagctaatgagtgccagagctagggcatgaatcatcgtggcctcagaagctgttgcccttactcccagtgaagacaatctagggttatgggaggaaaaggtaccgacgggggtcagagaccagcatcccagctcagagcctgggactcacgcacctgtgaaatgttccttccttcatctgctcatctccccactggccaatcaggaccaagaagggcagctctacccacccatgaagttattgtgagggtcaaatgggtcaatcgtgtgcaggctttaggggaataaggggttatatctgagcatgtgagctttgtcaagattgagaactgcagccagccctcctcttaatgtctggcagccccttccagcagatcagctttgtgggaccaggcaccactctgcactcccctgctttgccctgtctctaatttgattagagaccttgtgttgaacacacttgtctttgggtattggaccctgttcagccattgcccggcacccaaccctcaccctagtcgcccccactgcacacagttcctgatcccatcattgaggctatgggtgggaaagatggagaaaatatgtttaccccttttggtgtatgcttttgagattttgttaggtttggtattggacattgaagaattttgtttcctctaagtaactctcccccaaaggaatgtttagggagttgtggaaggggaagccttctaatgaaccattgactaa

SEQ ID NO: 2223 - DNA, 4001 bp, Homo sapiens
gcctcagttttgctcactatgtgattttagatattttattctctgtgcttatcgtgtgtatctatatacaacttaatcctaaagttccatcgtataaaaaattctacaactttttattttgctctgtatgtgacagtacctggtatttaaaaacaattctctacatcaacttaaaaaattaacatttgatgattataattaacttctaaaaaactgaaagatgaaacacatcaatgccttttctttcccccctgtactgctacctgaaaacatcggaatttgctgtggaacgaacaagatttcttctaagaaattaccccctaccaccatgactacataaaataaggtaattcccagcaagaatattatgcagatactaaaaagaaaacatgctaggcatggtggctcacgcctgtaatcccagcactttgggaggccgaggcgggtggatcgcctgaggtcgggagttcgagaccagcctggccaacatggtgaaaccccgtctctactaaaaatacaaaaattagctgggcatggtggcgcacgtctgtaatctcagctactcggaaggctgaggcaggagaatcgcttgaacccgggaggcggaggttgcaatgagccgagatagcgccactgcactccaactctagcttgagcaacaaagcgagactccgtctcaaaaaaaaaaaaaaaaaacaatgacacgagggaaatgcttacaatgctcaatgaaaaaatgaaaagaaaggttataaagttttaatatacgatttgatcttttgaaaataatggatatataacttaaacggaaatgtatcattaaatatagcaacagcgtcttccaaaaaatttcaaaatcgggcttaatgccaattacacgatcataatccaaaaacccttaactgaagcaaagacagtgatttgtaacatctgaactgtgtgaaaggggtgggggtgattcaaacaagtgtcatcaccttgtccaatgatgaaggagaacgtgtatcagttctgcattgtgaaattctcagtatgagagcgtgtagtggctaagaaaagcagtgggcgaattaggaaacaaagagaaaagccagcgacatcaccagttctggcctccttcccaccggaggaaaggggagaaggcgggtagtcatcaattccaggtccagcctaagttctgggtccccggccccagcgagagcctcgcctcgcctcgcgcgcctgcgcggagcgggctggcttcctgaacggccctcgcctcttcaccaccagggccgtccaccagaagtttctaaacgggtgagaggcgacaacgcagtgcagctgggttaaaggaaggaggctggtttatcctccgcacttacttggtactcgatctccagcgaggccttcaggggcatgggctggtagaagcactccttctggccggcgggaagggtaaaggtgaagtcgctatcgagggaaggtgtgaagccggccgccccaggcagcagcaccggaggcagagcggccagaaggagcacggggaagggcagccagatcttgtcgcccatccctgctggggcgatcccgggctgaaagaggcgtcaggtactgttgtctccgctccgcgtttcctctctggactcctcgtggttgacagggaaatctggagtctgaagaaactccaggtggcggccgcggcggcggcgaacactccctccgaaagagaagcgcagttctccaaagggtagggactctgggcggggctagcagtcctattccgcaaccgcctcagtctcggccccctcaggccaggcgtgagcgccgcccgcctctccccctgacggcctccggttcccatggcttcccccaccaatgggcatcatggcggtaattgtgggaaatgtagtcccgggcgggctccgctagtgggctcgggcgcgctcgccgaccacgatccccggcaagccccgcgccttcggcggcgcctcacgcagtctgcgccggggcggggcagtgaccgggtaggcgcgtcccaacggctcccgcggcggttcgaattctgtgctgccggggttcgctggttctccgagttgtgtccgaggcttccacgcgcaggggcccgggaaagggtcagaggcttcctaacgcagactcgagtgcgaagcgcgcagtcgccgggtgggtctctccccagcgacgatttgggtggtgagcgactgcgccttggcgtggggaaaccggcttacctgggggagttctgttcctttccctcccggcaccttggatgcgctgggactggtcctcgtggttgctgagcatgctgctctgaacggttgtattttatttgatgaaaaataggaggccgggcgcagtggcttacgcctgttacctcagcactttgggatgtcgaggcggaaggattgcttgagcccaggagttcgaggccagccttggcaatatggcgagccactgtctctataaaattaaaaaaaaaaaaaaaaagaggaaactgtcacttccgtcccccacccccgcccccgcttctttcagacggatgtaagattagctgtgtcaagcgatcttgagacaggagactactacataaagttatgacttctttccaaaatgaggaatctttttcgactacagcccattgtatcacatacatagggtataaaagaacacttgtccttcgtttgatgggtgtgcgtgtgcaaacctacaaacacattgttaattagggccgaaagatgatgttgttaaggtcggtgagtaggatgatgtgcttttctaggtatgcatagtcagtgaagatagccttttttgggtaactactgtaaattgaagttaaggacattcatttgacagtaaatgtcccactaggaaaatgaaaacattttagtatcaaatatattcattgctactgcagaagagttagggagttctttcttttttttttgagaccgagtctcactctgtcgcccaggctggagtgcagtggcgcgatctcggctcactgcaacctccgcctcccaggttcaagcaattctctgcctcagcctcccgagtagctgagattacaggcgctcgccaccacccccggctaatttttttgtatttttagtagatacggggtttcaccatcttggccaggttggtctttaacttttgacctcgtgatccacccgccttgacctcccaaagtgctgggattaccggcgtgagccaccgcgcccggactgggagttatttcttgcatggcaatacacagatgttgaactaaaacctgatttaagatgaaatatatagtaccaaatggtattatagaatttgcccaattttctctacccttttctccttcaccatcctacagagagctagagatgttgaataggtaaagcaggatggggacctgatttattgacttgtctgcgagagtcttgtcacttaagcagaagcaaatttgtggaaacaaaaaagggaaagaggatagaaccagtttgtctattaagattacatagtatctcatttaatttcctgccactttctttccataaggtgggagttttctttttaatcttcctccctacatctgagaatttttgagtggggaataaatgtaacataccattctaactggatgagggaaggaaggacagtttagtattcgttaattcattcaaaatattgagcttctctaagtacattgcggtcctgaacgtaatgcacaggacttttaaccttttggaacttgggatgggatcagaatgctaagaagggcgttgaaggagatgctacagtgaaaaaggtaaatgggatctgaaagaggaatgtaattttaagattgcgcagaaagctctgtagtagtggagattataaagctttagttttttattgtattaattacaataataaaatgtgatgctttattgtgatttttatatgcaaagaaatttagtagtttcacaaccctagagatactcatccactgaagaaacaaaagcttttcttcattt

SEQ ID NO: 2224 - DNA, 4001 bp, Homo sapiens
tcccaaattcctctctccaacctacatctccgtcctgagtcaattgtcaccttgatgtccctgtgatgcaacaggtcccaacccaagctcgttgtcttactccaacctgttccttctgcgttcctcacttcaggcatggcatcactgccctctcagccagctcctcctccctctgctgtatctaatccacgtcctgtccctggggctccacctctaaacatttctctagccagttccctgctctcgtatccttggctcccgcctccacctcctcactggtctttctgctccccttgctcttctccacactcgccattcccccatgccatcctcctccacgatttctctaaagtggagcaaaggaaaaaggagggctctggatttgaaccccagctccagtccttcccaccggtaggaacatggccaggcacctaacagtggctgctgatttaacctgtcctccagaggaaagcatgtctcacattgggcaaaaataaagcacatgaggtccctgccttcaaggagccccagtctgcagcagaagacagagacagaagcaagcaggccagtgcctgtgctaagtgtgggtgtgggttagtcagcccagagccctgcagagcccaggagaggggtctgggggaggggccaggaagcctgaatggttcgtctcttagagcctcagtctccttgtctgaaaagtgaagacaataacatttatcttgaggggtggggatgagtcacctgacatcttcgtttcagaattccagtggggcctagagcctgcatagatgctcaaagcgtgctttttgaatacatgaaaacgatgttacccctccaaggcaggacagggcagaagacgtaggtcctgggtcattctgggaatattactatgtggccgtgcacaggttacatcctgacgaggtatctgtcctcccggagactcctctgcagaggctgacccctacccccgaggtgggcgggggctggtgccgatgctctcaaggaagtgggggaggtgggcgtggccgtggagtcagtcccagcattcccctgggctgtgacttcgttggtctgaaaatgcttgcacaggtgtgctgagacaacgggtgtcaggctgggggcggggtggaggttctcaggggagaagcgagtgggagaacatgggggcggtggggcgttgggggacaatgggggaactcacgagaagcctggatgtgctggatccgatccgagaaggcagggccgagcaggtggggcactctagcttggtttccggggagacacttcacctgcctaacctgcactcaggtgagcctgccgggaggaggatgaacaggtgtcgtttccagggcagggcctgagccgattggctgacgtggcactgctccttctgctgggctgaggcattcctgtgaagggaggggcttctgtccgctgcagttagggctcggaacacaattcgcagacctgggcagcaggaggaatgtcgtctatctgccccagagcctgggcgccaacccattccacagctccgaccccgatttagctttagctccagcttcaaaaccaacccctaactctagctgcagctgcaaaccctagctagaactcccagcttccacccctgccccagctcctgcgtcacatctcagccccaacccccagccccatttccaaattcaattccagtcccaactccaaatccaacccctaatctggctagaaacctcagcccccaactcctaactccaactcaaattctggactaaggtcctagatcccaacctcacgctcagcccgaacctcgactcctgttcctgaatccagcccccaaacccaacgccaacctcaaacccagctttagccccaaattccaacatcagcggacccccaaacacagccccagtacctccatcccttggccctaggctgcagcctccaaaagccccgtgctcattctccctcaaatgagccccacagactggatcctactggggaagcaggatttgagtgaacagggaggaggggtgaaggcctttcaggcaggagacaggaactcccagaataaacacttcagaagaaatgccacactccttcacaaggctcataaagcccctgccatatacaccaggccagtcatttgccactggcaccctgccctcctctctgcccttccagtttttgaactcaagagttctcccttgcctgggatatttgccactccccagcctcagtctgggcaacttgcattcttcaactgagatgccacctcctccaggaagccttccctgacttgcaggctggtttagaggtgcctctttggtgcacccatggcccctgtgcttccccaacaactactcttactgcaatatgcttaattgcctattatgtatttacctgtcattccctgctagatgtgtggtccccagcaagcagacggacagtgcctcttttgctaatcatcatgacctcagtagctagtatgtaggacgtaatcaatacatatttgttgaatgattgattagcagactaaatgatagcatgaactgacagctgtgggggttttgagcaggaagcatgtgagaggaagctggaaagacaagtttggctcaggctgttcagggtcttgaaggcccatagtgaggcacttgggctgtgtaaggggcccatggagggttctaaagtttaatagggacatggtgggagcttctaataggcaaatctggcaccacacacacaccaccctccggactggtgaagggcaggctggctggagctgttgtaggctgtccctcatctcctggatcagcccctgtgatgtctcttgctttctcctcctgatgtgtatgaactagaaaagaaaaacaagatcacccttatcttgttattatcagttcacaaaataatggtgctcgacctgctttcgcatctctttgctttgttctgcggagatgactggaggccagtcataattctagaacagccctgtccgctagaaatatagcctgagccgccgggcatggtgcctcacgcctgtaatcccagcactttgggaggctgaggtgggcggatcacgaggtcaggagttcaagagcagcctggccaacgtggtgaaacctcgtctctactaaaaatacaaaaattagccaggcatggtggcaggcccctgtaatcccagctactcaggaggctgaggcaggaaaattgcttgaacttgggaggcagaggttcagtgaggcgagattgtgccatcgcactccaacctgggtgacagagcaaggctccgtctgcgggcgggggctggggcacggggaagaaaaaagaaatatagcgtgagctacatatataaacttttctaatagctgcattcaaaaatgaaaaagaaacccatgagattaatacatttaaattaatacattttaattccaaaacacatttttatatatgttattgatgagctattttacagttttattttgtacagggtattttatttttatttttaaaaatagagatgggggtctcgctatgttgtccaggctgttctcaaactcctgggttcaagcgatcctcctgccttggcttcccaaagtgctgagattacaggcgtgaaccaaaagtcttgaaaatttggtaggtattattttatacttacagagcatctcatttatcccagccacactgcaaatgcccaggcaccacatctgtcatgtggctgtgtccttactggatggcatggctttagatgtcctttccctcagaaaaaggtcagtgcagtctggatcaggaggatggttgggcggagtggggtggggagacagtggtgtggcattgcaggtgttcatcctgccaatttgcaaagcattataaaggtatcccctttataataaaggggcttgactcagaggagcaggggagccaggggcccaacagggcttgctggctgcagattcctcttgcacacatctgacatttatttacccaccctggtccccaggtcc

SEQ ID NO: 2225 - DNA, 4001 bp, Homo sapiens
taacctcaacaggcagtactgacacttgacaagggggagccaggatcctgggactaacacgattattttactgttcccaaaaattgcttgtaggaggaagggggatcaattgagcccaggagttcgaggctgcaatgaactacgatcatgccactgcactgtagcctgagcaacagagtgagaccccaactcaaaaaaaaatttttttttttacatcccctttactaaaatgtcactggtccttcccctcacctttcaagaagtagaaatcctgggcagaaattagcatcccaggaatgactagtgttggcaatagattgagacatatgaatccttagagactcagcacagagaatttaacatgttcttgttataaatcactcatatgataaaggagagctagatatgtagccaaaactgtcagatgtgcaactgttggtgaagaatatgttaaggcaaaaaattaagcttaatgaaagttgcaagagtaagaatccacatgactacaattttcctatcattatcttacactttatggatgatactcttaacaaaccgaatttctgccagaataataacagatttttctaaaacaaagaaaaagtatctaaggcttcaacatagaaagctttaacttcttagctctgtttcttaaatacataaaccaagcttatttcttgtacagggaagcacaatgaatcacctaattgcaaaaaacaagaagatattggaccacaaaatgggggaagaatgactaaaatttattcagcaactaccgtgtcaaactgctgtcttacttcctggttcagattctgtcttcctctgggtaaattcccttttcttactgtgcctagtatcctgagacctctgacttcccaggaagctccaaatgaatattatatataaccagtgtctgccagttctagatcacactacctctcttcctccagtaaaactgtctcacagctaagctgtcactaagaaagggtccagcaaattaatacatacactaaggttttctgaggaactataccttcacgtgctaccccttttctctcataagtttctgcagacaatgccaaaattcacaaggaggttaaattcgagtcttcagtgccaggtctatggacaaagtacttttgagaaatgctttccggagcccctcaaatcatcgtaatgcctaaaaggctttctcttctcctttcctgtaaggttgacactaaaaatcatgaaggccctccttcctgtcctcctctggaattcagaattcataaagtgtttgaagaggcctggaaaattaggtcagataaactgcctcatcatctagaagaggcagtgtctaaatccaccctttgcaacactagtcagggtctccacgtgggatcaccccgccaggactttaaaatcagaaatctttccggtatttttccgtaagaagaagcttttgtggggtctacattcaccagcaaccccaaaagtgtgggacttgatattctatgtcatttattggccctctcaacaaaactacggtccgaaagcatgagaacgcagggagctgggaggaggagcctctctcttccccgggtttaaatagcagtagtacctctgggactgacctctccaagggccagaaagaactaagaaaaagaaaagggaaagcaaagcatagggatagataactcgaggtgtgagcataagaggcactgggggtcctagatgaatatgggaagggggaacccgtagaggagtataggggtacagaagttaggggcgtcgagaggccaaggggggccgggctgggagggggcggggagaacggccacgtcagtcccggccccgcccgccacgttttcccttcgtccttcactcccaccctccgctcagggcatcagttctcaccgttcgtcatggcggctggccctggacctgggtagggggtccgggttcagtggtaatagcggcggagatgggggagcgcccgcttgacacttcccgatccgggccgaggtgactggaagaagccgtagtacgcaggagcaagggccgagaggcgagcgccgaacgctatcaggagtggctagccgattgtcgagctcgggaaactgcgtgtttacgtagggtaagaagaacgctatctcgaaggcttcgtacttggccgtggtaactaagtcttttctgcgtgcccctgcgggcgtagggctggggctggcccgcgtcagtgtgtttgaaaaggtaaaggcttgtagttttgtagtttattttgcgccgtggcggctgctgtgtgtaagcagcagcctacctatgaggttttcatcgtcctgggcttccacttgagagaactccagcaccgcgggtgaagaagccgcacctgcggcctccgtgactgcccttgagctgctcttccttactccggatggaaatctagtcagactgcgtctgaacgttgcaaatgaaatgaggaaccttgtaacaaaaacaagtcgcggccgggcgcggtggttcacgcctgtaatcccagcactttgggaggccgagccaggcggatcacctgaggtcggagttcgagaccagcctgaccaacaaggagaaaccccgtctctactaaacatacaaaattagccgggcgcggtggctcatgcctgtaatctaagcactttaggaggccgaggcaggcggatcacctgagatcgtagttcgagaccagcctgaccaacatggagaaaccccgtctctactacaaatacaaaattagccgggcatggtggctcatgcctgtaatgtaatcccagctactcgggaggccgaggcaggagaatcgcttgaacctgggaggcggaggttgcggtgagccgagatcgcgccattgcactccagcctgggcaacaagagcggaaactccgtctcaaaaacaacaacaacaacaacaacaacaacaaaaaccaagtcgcatctttcagatcctaaagcaccacgtcgtcggaaaacattcaaagggttgcccgtttgcttgtgtgaatttttcttttccttaaactatcaggagaatctcgattctcctgcatttaattaatgctgggatcacttcagccactttaaccagaaatcggcgatatctagacaccgcttctctgaggacactttgacaacgtgacaaaagacattgccagtctaatgatgggggtggggtggaggagacaaaagtacagattcagatttgcatactgaaatccttaattgcacacaactcggcccgctttattagagttcgggcggaagtgcgacaccgagtcctccaaggctaactggagggttaaattatacggttactaatccgccgtgcttgtcaagggcctaaagggactctgcccctttctgctgcagtgccatctgctggctgcagcctgcttggttacccagagggaaaactgccaaagcatcctctggaagctggcctggaaagacaagccaaagtctagtgcaggacagatgccttgagaaaatatacatacatgcagaaagaaaaaaaaaaaaagacggcgtatatacgggacaaaacctaggacaaggccaggcagccactcagattatatatatgtttgcacattcacacacagacaaattcccctgcccaaaagaactgttcaggaccactcaaaaacaaaacagaacaaaagctctattgtttaggccttcgaatccttcatcaaccattgtctaaaacagcagcagctggccgggcgcggctcacgcctgtaatcccagcactttgggaggccgaggcaggcggattacctgaggtcaggagttcaagaccaccctgaccacatggtgaaaccccgtctctacttaaaaaaaaaaaaagaaaaaagaaaaaaagaaatacagaaattagcctggcatggtggcgtgcgcctgtaatcccagctactcggaaggcagaggcaggagaatagcttgaacccgggagggagaggttgcagtgagccgagacagcaccactg

SEQ ID NO: 2226 - DNA, 4001 bp, Homo sapiens
gcacgttatattatcatcagtttattattctttgtttcatttgtgtacatttcattgccattaggatataaaaaaatcacctacttttctatttcccacaatacttattagacataaagcagacattactaattgcagagcacttaaaagcccacgataatgtctatgtttgtgtgtaacaaaactagttaacgtaaaatccacatactttggaaaacattttttggttacatctctgcttccttacacattcagaaatccagaaatgcaaaggccttttattttcacattgccttatgggtttttacctgataataacatgttctcaatgaagggctactagagtccagttcacagctccagaactctactaacacgtactaatctctttccctctcgaattcagacaaaagaaaaaagaaagcccaggtgtattaaatcccggcccactaccaaggttcttagggagagccaagttttctttaaactctcctggtatcacgtcttatatctcctcctgtgctactgggaaagtaacatcttcaatttgtcaccacaggcaggtctaataaaccaaaagagaacaagctccatacctttgtgtctcttgcttttcttttttctggagacagttctctcatggatgctttcctcctgggcatccatctcatcactgctgtcgatgatgtcacagggctcaccagccccagaaagagcttcctctgcaggaacctgagaggcttccaagccacaaagagattttactagaagaaaataaaaggagaatgagatggcacacagctccacccagaaatacaaacaacttagccaaggtatcagcatccattcaggaaaggggggaaaaaaaacatcgttgagagagaaaggtgagaatctgtcaccaaaaaaaataaagattttagtattttaaatacaaaaaaaaaaaaaaaaaaggaaagcaatgggcaaactgactccaaagttgcagaaactccttttttcagccctgaagaaaaaaggtgtgtacaatttttccactataaaccctgcaggataaaagctgatttgtattctcataaggtctacagagaaatgtttgagacaaattgaatccaatttaatcctggtcctgagctggaggcagtaggtgtcataaaacacaagtctcagacccatgagtaaacagactgaaagcaagagaaacaccagaaaaggaaaagaacactccaaggttattaaacaaggaagcaaactgcagagtaaaacatgtgaactacagcaaagagattaataaccaagaagaatgcagtggaaactaaaaagtatgcaaacatgtttttaaatgcaaagaaagaaagaaaatatttctgctacagaaactgctactcttgactaatcctcctccaccccaatatgtaagttaacactaacgaaagcaaacacggttacaggaagacgactaaaggactgcaagaaaaacagaaataaaatacctagttctgtcttcgcggcatgagtctttaaaggctcgcgcaaagcttaccttcctgctgaacagcgttggctacggctttcttgactcgtccagacctcacgaccgccggatccgagttggcgtaatccgccacggtcactgcaacacagcaccaaccctcaaggaagaggccttctctcgtcagcgtcttccccgccaacacctcctcctcgctgcaggcccccggaccgagccgccctccagccgcgggcacgcgagcgctcacctcggcacggtccagccccctcccagccgccagcccccaaaatgtttcagcgcccctgcccccctcgcccacctcggccggagcaggcgtcgtgggcccggaacttgagtcgctttcctctcttgggcatggcgaccgtatcggggcgaggcctgcctagcgggccgggcccccgggccatgtctccggccggagagccggccccgggagccgcaagccagctccgcccggctccgcggccatcccacaccggaggccgctaactctcgcgagaacataggtccgggttccgagtcgcgttgtcggacgacgcctctccacgcgaaccaatcatcgccaggtgcaaggatacgtcatcatccggcacccgcgaatcaagctgggtccgggttccaggtggagagagagctgttgtactgggtggtgtcgcgtatcgccgtacctcgtgtgagatgaatggtgtctcagaaccatagcccacacctgtgttgattagaattgagagtttacatcctggtctccgggattcttcttagtaactcctctgtccacactccaggtccacttcagcaccaaaatgcatatacactgtcatcttcgtgctctatctcggaccacagagactgagcgcctgctagtctaacataggtctgtaagagtcttcactctattttacgaaagctataaataaatttctgaattctcaaaataggagaaggagttcttaaaagcttccaatcggccgggcgcggtggctcacgcccctaatcccagtactttggaaggccgaggcgggcggatcacgaggtcaggagatcgagaccatcctggctaacacggtgaaaccccgtctctactaaaaatacaaaatattagccgggcgtggtggcgggcgcctgtagtcccagctactcgggaggctgaggcggaagaatggcatgaacccgggaggcggagcttgcagtgagctgagatcgggtcactgcactccagcctgggcgacagagcaagactccgtctcaaaaaaaaaaaagtttccaatctatcaccatataaggttagccgagagaaaggacgaaagagagacccaaggtcagccgaggaagtttattaacctgacggctgctccaccacagacagaggaggcacccctgagcttacaaaatgaggggtttatatgggggagagagaccctggggttgtttgctggttaattttgccacatattagcttgtgacgtttattacaggagggtgtaggtaaagtttgtttatgcttcccatcaccttcccctgtgcggtccggatgatttgtaattggggtttgtttattgcagcaaggtctgataagtgaagtctgctggcttcataaggacttagaagtgtaaagaggcttgggggaaggagaagagttgcagagcattagggggaggagtgagcagcacggagaggtttgggggaagtgtcggcagtaccaagaagctttttggggcagtttgttcctaacacaccatacctccaaaaaactactagaagcatccatgaaaaactatcgcagaggcaggaaggtcacttgagtccaggaggtcaaggctgcagtgggccatgattgcgccactgcactccagcctgggctacagagcgataccctgcctcaaaaaaaaaaaaaggagaaaaagaaaaaataacgtctttcctttgtattgagacagaagcgagtcactgagtgaagattacagaactgtaagggagcaggaccctgggctagtattatcaggcctctgagcccaagccacgccaccgcatccctggtgacttgcacgtgtacgcccagatggcctgaagtaactgaagaatcacaaaagtgaaaatgccctgccccgccttaactgatgacattccaccacaaaagaagtgaaaatggccagtccttccttaagtgatgacattaccttgtgaaagtccttttcctggctcaaaaagctcccccactgagcaccttgcgacccccactcctgcccaccagagaacaaatcccctttgactgcaattttcctttatctacccaaatcctataaaacggccccacccttatctcccttcactgactctcttttccgactcagcccgcctgcacccaggtgattaagagctttattgctcacacaaagcctgtttggtggtctcttcacacagacgcgcatgaaaagtaaataaataaataaattaaaaaaaaaagaaa

SEQ ID NO: 2227 - DNA, 4001 bp, Homo sapiens
gttcggggcgcaaatccgggagggaagctccggccgcccagcccaggccgcttggagatccctggcggccacccccggattttcccgggcggcgaggcggggagccgcccgcgctcgggttttccgcagcggagctccgagccaggcacgcgcggcagaagccggagttggcccggccagcgggcggagaggagggaggggggcgcaggctgttccctggcgcatcccgggctgcaaatctgccgcctgcgtccggtccgcaagcccgcgggtcttgggcctcgggaaacgtgcggcccccagctgccgcgtctccagggtaagtacctcccgggctcgaccccacccccgcacgtggctgcaccgtagcaaatggggcgggggcgctcgggcctcccaggtccgcaggggtcgctcgccgggccccacctcccccctactgtgctttacataccgcagcgcgggaggagggggcgtcaccggctccagcctctccctgcccgccccctccttccagacctcctccgcccgcagcgaagctgcagcaggagcgacttgagctagacaccgggaagaccgctcggatcaagaccagccaggcagaggaggagaggcggcgccgacttcgcccaagatttccatcaagtccacgcatgagaggcctctccctcccccagcggtcgtgctggggccacggcagcaggcgggggtgccggtgccgggcgctgggccccgccggacggatgccctcccggctcccccgtcggcccgggcaaggctgttcccaggttgcgacgtttccaattcgggctcctccggatgaatcatccccctttcccgccgcctggcctcctttcccgcctcctccgcccgaggcctccgtggcccgtggcccggtcagagcagcaccgcccctgcgcctcgggatccgggccgcacagcttaagccctcccgattgctggccgcgccctgcctgcggcctgtggcctggatcccgggcccagcaggagtagccgagctgcgtgcggtgtggcccccacgaaagggagggcgagggagaagacgcggcccccgcccaggcgccccaggccgcaggagaggaggctcagggcctagctgtccagggtcgtcctcactgctcgcgtccgcttcctaaagaaccaccgcgctggagcccgcagccgaaacctcggggaggcggccttgctccccgacccacgccccatctgcaccccaaacctcaaagcaggacacccatccctgcctccgactggagcgctcaaggcccgggcctagcagggagccgccactctcccgcgtccaaagcctggtttcacagattgcaactacggcccagggaggccggggagactgcccgaccccgcactaggcgggggctctgccaggtccgacgccgggctccggggccccagccctagacccctctcaggacagccacgggagtatccaggaggaagcgaggcccatcccctccttgtccctgagtttgcagccctttccccagcccgcaaccggaggagcgatcatcgcttcaagccagaactggcgctctcagccccggctccagcaaggtcacccggagccccgcgcgtcgctgccgcgagggaagcgaaaacaagcagagtggggacatggggacacgctcagagaccccgagccgtggaggtagtgggccgacgctggggacaccagggaggcggaaacttggggacacagcgcacagcccgacagaagatgctggggccgagtccccaggactccagggtcccgccaccgcccgcgtccacactcccgcctgggggaacgggagggccgcgctcccgcccccaggggccctgaccgagggagggagggagggagggagggaccaaacgaaaagttgggaaaagtggagtgcggacccctggaccccagctcggctcacctggcgccgcagcgccgcgcgggtccgggtcccagtccgcgcgcggaggctccagagccgcccgggtctccacggcccggccccagccccgccccggccccgcctccagcccccgggaccgtccgacccgcgccgggcccggccccaccgccgctgaaaggcggcagctcaggtcaaaggatcgcaggtaggcgccctgtgcgcgcctggtgactccgggcacccgtggcccgagttctgccatccccactctcccacccccagcttacatcggtcgcaaaggcccacaaaggcgaccccttcctacatggggaaactgagacccgggacccaggagccccgacacccgcacgtccttccccgcttcccagagcccctcatcccaggcgcccggggagcttccaggaggaggcggcccgagtccctgctctgccccggtcccgcagcccttgctgtcgctgaacctcgcggacttcatctgtgcaatgggcaccaaggcttcagcctcgcaagatgccgagaggcaagagccagacgccaagggccagcccggggcgactccgcaaagccctcagcgaaagcagcgcccggggaggggcgggccttgtagctgaaaggaccggacggggtgcggatgtgccgccgggtactcctaagaacaggcgccccttcgccagtgggggagcgggcttgttcccaataacggggagggtgctgagagctgcgaccccgccggcgagcccgaagggggcggcccggccttcgcgccctcccgcccctggaggcaggaatgcagagcgggggagccagggcggccggcggtcggcccagtttccatgatgcggggggcgggttcgggggaggcggcgaccgatttccaggctcagcggtcaggccgggccccccgggaggaatttccggcctaggattgattaaggcccgcccctccccccggccgtggagacccccggcgcgcagccggggggaggggcgctaatgagacccggctgcgcgccgcggacagggaggggacccgaggaaggggcgggccaggggccggggccaccccccgacgcggggcggagccgggtcccggagccgcacggccaggccaggccttgaacctgagctcccaccctctgggtcggcggaggagagtgggggtgcatcagtgccccccgggaccccctcttccagctcttaaaagccccctcggggggtcggtgaggtaacgggcggaccagagggaccacagtggggaagaccgagcctcggctcccgggcttcatccctgcgaggccgtgtgcgagatcgaagccagggcctccttcttgcctccccagtccgactggaggctcctgaggtctcggtccgctccacggaggcctccctccagcatctttgcttgggacccccgcccccatcaatcctccgcttcgtccactccccgcacactgaccccaccgcggtcgcacctccgcctcccagctctccctcccacccctgggctccctcaatcccactccatgcctgcctctcccagcccactgctcttcctccaataagcccggcttctagtctgactccctgggcccctcgatcatcccctgcctccagctctgtgaagggccctttgtccacccaagcacggggtcagccttggccccttcctctccccctctcatcccactcacagagccttgggggccctgctcttttcatctggggccagccacgttctccctttcccatggccactgtcctgctccggcgtccaggctcctcctggagcccatggtctcctgcctccccgtgtcctagtgcgctgcagacaggcagcaagggtttccactctgaatctgagcctgccactacctgcttaaaaccatcagtgactccccaaatcgagttggaaatctcttcttgtctccacgaactggccccgggcctcttacactccctcagggcttggttggtccttgctttccggcaggaacacttaccccctggtcgtgcccttgccaccttctacacatccttcagaccctgggcctt

SEQ ID NO: 2228 - DNA, 4001 bp, Homo sapiens
tgccccagcctgtaacatcccaacctacctcccagtcttaggggcccttgcccaccactttcttgggtttgccaagacactgggtacatctcccagtcaccctggcctggacctccagccctgttagggctaaggccacttacagaggctgaagaaattcctgaggcgagtcctccacaccccacagtgaaacgcaccctctccagctcactgagccctggtgcagctggcatttctctgcccgcatgcaggtcaggatgcccttcacagctgctgtggtcagagcatccatccccagcctgggatgtgactgaaacatctattagacgttgggactcctggtcctttggtcctattagcatggtccatgctgcagcctcagagcaggctgtctcccctctcttcagacccgggcccccaagtcccctcctcctcccaatttggcatagcccccaagactgaggcggtccagccgtggccagcttcggtgagcacagtcccgagctgctggggccccaaggaggagctccccaaggcccagatccagagacttggaatgttcaatgcaggagccagacggctgcacggtgatgatcacatggccagtctgcgtccgtggaccccagggtgggggcagcccggggcccttcagcgggtagctgttgagcaaggcaggtaaccccaagcgaggattagcgggctctgaacgcagactccgcactgacgggacgggtgaagtaccccgacgcggggacgggtcccagatttctggctctgcgcagcctacggctcggggactcctagggccggggctgggaaggagggcgcagtcccagcccgggccgtcggggggccggagcgcctgggcccgcagcaccccctggcggagccgtcgcgtctccaagtctcggttctcatacagcagtgtgttggcgcagatgaacacgaacaggccgacgcccatgatcaccggcccgaggagccgcagccgctcgtgcgggccgtgagcccggcccccgccgcgaccctcgcgtcgcagctcgctcatctggggcgagctggcattggcggcccgggaccctggggccccggcccggtgcggccagtagccggccactgcaatgcccatacccaccagtaccacgagcgcccccagcgccgcgaacgcccccgacggcgagcgcagccgcagccgcgcccgcacccgcagaggctcgggcggggagcgcgggcgccggcggcggcccaggcggcggcccaagcgagagacgcggccctcggggctcctccgcacctccccgcattcttcggggctcccggccgtcatctcgccgtcgtctgggcgctctgcggagagaagatgggaggcaaggactggaccgacgggcctctagcttcagggcgccaggttcggggcgcaaatccgggagggaagctccggccgcccagcccaggccgcttggagatccctggcggccacccccggattttcccgggcggcgaggcggggagccgcccgcgctcgggttttccgcagcggagctccgagccaggcacgcgcggcagaagccggagttggcccggccagcgggcggagaggagggaggggggcgcaggctgttccctggcgcatcccgggctgcaaatctgccgcctgcgtccggtccgcaagcccgcgggtcttgggcctcgggaaacgtgcggcccccagctgccgcgtctccagggtaagtacctcccgggctcgaccccacccccgcacgtggctgcaccgtagcaaatggggcgggggcgctcgggcctcccaggtccgcaggggtcgctcgccgggccccacctcccccctactgtgctttacataccgcagcgcgggaggagggggcgtcaccggctccagcctctccctgcccgccccctccttccagacctcctccgcccgcagcgaagctgcagcaggagcgacttgagctagacaccgggaagaccgctcggatcaagaccagccaggcagaggaggagaggcggcgccgacttcgcccaagatttccatcaagtccacgcatgagaggcctctccctcccccagcggtcgtgctggggccacggcagcaggcgggggtgccggtgccgggcgctgggccccgccggacggatgccctcccggctcccccgtcggcccgggcaaggctgttcccaggttgcgacgtttccaattcgggctcctccggatgaatcatccccctttcccgccgcctggcctcctttcccgcctcctccgcccgaggcctccgtggcccgtggcccggtcagagcagcaccgcccctgcgcctcgggatccgggccgcacagcttaagccctcccgattgctggccgcgccctgcctgcggcctgtggcctggatcccgggcccagcaggagtagccgagctgcgtgcggtgtggcccccacgaaagggagggcgagggagaagacgcggcccccgcccaggcgccccaggccgcaggagaggaggctcagggcctagctgtccagggtcgtcctcactgctcgcgtccgcttcctaaagaaccaccgcgctggagcccgcagccgaaacctcggggaggcggccttgctccccgacccacgccccatctgcaccccaaacctcaaagcaggacacccatccctgcctccgactggagcgctcaaggcccgggcctagcagggagccgccactctcccgcgtccaaagcctggtttcacagattgcaactacggcccagggaggccggggagactgcccgaccccgcactaggcgggggctctgccaggtccgacgccgggctccggggccccagccctagacccctctcaggacagccacgggagtatccaggaggaagcgaggcccatcccctccttgtccctgagtttgcagccctttccccagcccgcaaccggaggagcgatcatcgcttcaagccagaactggcgctctcagccccggctccagcaaggtcacccggagccccgcgcgtcgctgccgcgagggaagcgaaaacaagcagagtggggacatggggacacgctcagagaccccgagccgtggaggtagtgggccgacgctggggacaccagggaggcggaaacttggggacacagcgcacagcccgacagaagatgctggggccgagtccccaggactccagggtcccgccaccgcccgcgtccacactcccgcctgggggaacgggagggccgcgctcccgcccccaggggccctgaccgagggagggagggagggagggagggaccaaacgaaaagttgggaaaagtggagtgcggacccctggaccccagctcggctcacctggcgccgcagcgccgcgcgggtccgggtcccagtccgcgcgcggaggctccagagccgcccgggtctccacggcccggccccagccccgccccggccccgcctccagcccccgggaccgtccgacccgcgccgggcccggccccaccgccgctgaaaggcggcagctcaggtcaaaggatcgcaggtaggcgccctgtgcgcgcctggtgactccgggcacccgtggcccgagttctgccatccccactctcccacccccagcttacatcggtcgcaaaggcccacaaaggcgaccccttcctacatggggaaactgagacccgggacccaggagccccgacacccgcacgtccttccccgcttcccagagcccctcatcccaggcgcccggggagcttccaggaggaggcggcccgagtccctgctctgccccggtcccgcagcccttgctgtcgctgaacctcgcggacttcatctgtgcaatgggcaccaaggcttcagcctcgcaagatgccgagaggcaagagccagacgccaagggccagcccggggcgactccgcaaagccctcagcgaaagcagcgcccggggaggggcgggccttgtagctgaaaggaccggacggggtgcggatgtgccgccggg

SEQ ID NO: 2229 - DNA, 4001 bp, Homo sapiens
tgtcacagcactctcctcctcggaggaaggctcaacctcttgctaggttggtctggcttctgaatcgtgacagtggccaatttatgacctccaggtgaaacccagtgctctatgaggacatcttaaagcatcctgggaaaggctggcccttctcggcccaatcaacagcaagggtctcaatgccacaccgtgacctgctggtgtcgtcaggggcgtgaaaggacttccaggcaccctcctagttcccctggcaccagctagcccaatatctctccaaggccccagactcttgtttccaggagatggagagctgtggccagcagggcaggaaggggagacagcatccctgaggacagctgcagtgtgtggcacagtgagccacccagtccaagtccagcctcaataaacacaacggaggtgctgtgtggctggcagactatcccctcccccaggctctcatccttgaggcaacaccccccatcctgggttagctgagaggcggcttcgtccaggaagaacaccgggtgctggaccagctcagctggcaacatgctctgggaatgtgagcaaatcacctgaggtctctggacctcggtcccctgggtataaaaccaccggcttggacaagctggtcctgcagatgctcaacttccaggaatccagcagaaaccgacatggagagacttgggttgtcagggacctctgggctggggtcactcaatccccagctaccctcctcagtcacatctggcccatcctccagacacagctgatgtccctcccatgccttcctcctctgggaagcctctgtgactcaaccacctgtacttctttttccccgtttcccccctggaggagagaagcagcaccggtatgtgttaaggaagaacaaacagaccagccagacgatcagggttcaaaccccagctctgccacttgctgctgagtgggcaagtcccttctcccctttttcctaagggtgtgagctcattgcatcccttgccgaagctgcaaacccatccactctttctaggatgttctcacaaccccactttcccccctgccctctggaaaggtggatcaagtggagaaacagtaagctacctgcgaggctctgctgaagcaacaggccactaagcttttatgcctggcgatggaggccgatgaaagaggccggatctgaacccgggggcccgcatggcccgtgagccgggcagggaggagggtggccccggcccgtcttgaactgtttggaggcatctcaggccttgcccacctctgggaggcagcccagcctcggggtctgccctgcagattccatcggctcaaaccatgattcctctcattaacagcaagttactgagcctccctgtccctcagctgctctagcgtaagcaggggctgtggctctgaaacgcgcggatgcgaggcgtgtagaaaaacgcccgggacgtcacatgccgagcagcaaccgccagccgcgatcgccagcatcgccgtgcaccggggcccagcacggggctgagggcaggggcggcccgtgcgcaccggctccagccccccgcggctcccggaggaagtttgtggcccccgcgcggcgctctcgcccgcgccccacgttcccggagtccccgccgctccactcgactccgcagccgcttcccgactgcagtctcaacccggtctcggggggcggcggcgcgcgccgggggtctccgcgcgcccgcgggcagcccgggtcccggccgaggggggcagcgggccggggcggcgcgggggcgggcctggcgggcggcgcagagggccgcgtggggccgaaccatgcactcacctccgcgcgatccggtagagcaacacgccggccgcggcgcacgccgtgacccccaggccgccggccaggccggccgtggggcagcgggccagcagcgcgctcactccctccatggctctccgcgtggaaggacggcaggccggcaggggggtaggcgggtaggcgggtaggcgggtaggcgggcaggcgggcaggcgggcaggcgggcaggaggcggtgacgccgggggcgcgggccgcaggcgggacgcggggcggcgacgcgcgcctcctcgcgccgtgaccttcgccgctttgtagcgggcgcgggcccgccccctgactcggcgcgctcccgtcgcgcagccaatcgggacgaggggtgagcccgggtgggcggggcggcggcggaagcgacagagccggccggggagcgcccccgcgcggccggaggtggaaggcggcgcggggagggcggggcacggagccctgtaggaaagccccgccttctgcctcccgcgccagccgccaggcccggaggtctggctgcagacagtccaccgagcttctgctaaggggagcatctccagagtacgcaactgcttgtaattagtctttttccccctcgctaatcctgtctagtcaaacccagcctatgcgcccagtgctgtttagcagctccttgagccgctctaatggttgaaaaactagctttttagaaacacgatcatccacggatagggacatggttgaataaatcataggacagccatagttcggaacataatgcaaccattagaaagaatgccagatccaggcagggcgcggtggctcacgcctgtaatcccagcactttgagaggccgaggcgggcggatcacgaggtcaggagatcgagaccatcctggctaacacggtgaaaccccctctctactaaaaatacaaaaaattagccgggcgtggtggcgggcgcctgtagtcccagctactcgggaggctgaggcaggagaatggcgtgaacccgggaggcgaagcttgcagtgagccgagatcgcgccactgcactccagcctgggcgacaaaagcgagactccttctcaaaaaagaaaggaaaggcaaggaaagagagagagagagaaagaaggaaggaaggaagaaaggaaagaaggaaggaaagaaggaaagaaagaaaggaagaaaagaaaagaaagccagatctggagttattggcatagatggatgatacattgtttttaaaaagcaacatgcaggcagggcgcggtggctcacacctgtaattccagcactttgggaggccgaggcgggcggatcacctgaggtcagaagttcaagaccagcctgggcaacatggtgaaaccccatctctactgaaaatacaaaaattagccgggcgtggtggtgcacacctgtaatcccagctactcgggaagctgaggcacaagaatcgcttgaacctgggaggcggaggttgcaacgagtcaagattgtgccgctgcattccagcctggtgacaggagactccttctgaaaaaacaaaaacgacaacaaaaaagcaacatgcaggccgggcacatggtggctcacgcctgtaattccagcattttgggaggccgaggcaggcggatcacaaggtcaggagctggagaccatcctgaccaacatggtgaaacctggtctccactaaaaatacaaaaattagctgggtgtggtggtgggcgcctgtagtcccagctacatgggaggctaaggcaggagaattgcttgaacccaggaggcggaggttgcagcgagctgaggttgcgtcactgcactccagcctggcaacagagtgagactccatctcaaaaaaaaaaaaaaaaagaaaaagaaaaagaaaaagcaacatgcagattgatttttaaataatatccaaagcttaaataaagccttatgtgcttgtgggaagtggagaatagttaacactgaactgcaaactgattacctggtggtgggaggagattcaaggggaagagtcactgtgtttcattattgatttcagctaaattactagttttaaaaaagtaaacagaaaatatttgtatctaattacacactatgttccagtgttctgatcacttttttttttttgaggttaacattgtaaactctttgtgggtagtgatggattgaggg

SEQ ID NO: 2230 - DNA, 4001 bp, Homo sapiens
atcttcatctttcagacaaagaaactgaggctcagaaagttatgtgactcaataaaagtcacacaaacagcaagaggcacagccaggcacgaacgtgggctttctgacttttatccactgtgctccacaccctataaacctaaaaactttcagacacatctcattccccaggattcccccactgtttagggtacagaatctaggggtcatggaatccacagcactggttaaaatccctcagactcctttcagacaaaggaaacagatggaataaaggggatgggaggagaaatatagaaatctgtccaaggccagattccagccaagatcctacactaaaaaatggcaagccttaggcaaatctcatctgccttcaagttggcttctccctccactgtagggctaagccacctgctttatatagtccacaaagcccttctgtgaatcagtcttttacaaagggagatatgtacagcagtaactattgactaagacagaaggcagcaagttcattatgagaaggacagacagaaatgcagacgggtctggaaagcggacccctatggaacacatggaacttgaggtagcccttgacttctgggggcattttacccaatggagcttggcggagcgttgatgaaggaatggagtgagcacacgcacagaggcaggagcacattttaaaactgagtttccactgtgccagaccctaggtgggttaggaggtggcaaaggtaatgggagacatggctgctgtgctgttcagagctttgggagcctgctgagaagtctggactgttctgggcagacgaagggcagcgtcaggtctgagaaaaaaggaatgctccgaggtgaaggcagggcctcaaggcaaatctggagagtataagagactaaagggagcgatggtaacacagtatcgcactcagaggttacagcaaacacagggacacaaactggaggaggaccgacctggaactgcctgactttggccaatgaggcggcacgatggaggggcacagaagaggacggttgccaaagatgaccaaggtttgggggccgagaagtggaggcggaggaggagagcagtttcactaatacagctggagaagtgaggaggcagggcttgcttgaaggaagcgctggacgcacagcctgcagcgcaggacagagaagagacaaagaactggaaagtgataaagtcgtgggaggaggtgagactggagggagagacgaagaggagcgagaactagcagagtccatgaaggcactttttcaaagttaggtggtcaccaaaaaacaggtaatcaatcctgtcaccagccgcggggacagcgaggccttgggcttggagggggaggatgccgacgatgccgaccgcgcatcagatctcgccgggaggagggcgcgggcgctccacttgttgcaaagaacgccgggttcctctgggccattgggctgccgctccggcggggagcgcggaaggctgggcctcaggtagcttcaatcattcacctgctggttacgggtcgcggcgccggggaccctactccggacctcggccatgcaacccgcagcatacggagaacgctgggcgcccgctccgctgccccgcttccttcctgcccctgggccgctcctctgcaccccgggagccctcccctgacgcacccgtcggtccctcggaagagccctctgccgcgcagccccgacaccccccgccccgcatccgcccaggcccccgggaccctgctcctccgcctcaaacttcccttccgtctctcacaacctcgtacctcctggtaggatgtggagcgctcctgccggatcatggcactgaccagagcttcggcacacctgagaccgccccagcccgcggcgcacggacgcagcactgcggccgctgcacctggacctaccggctccgcgaggcgaaaccggtccggaggggcgtcccagagaccaggcgtggcgatactcggcgcatgcgcctggccgctgccgcccaggagtcgcgaaagtgttgatgggaaatgtagttctgggcgggggcgcccctcacaccagctctcacccctgtggcggaggcctgcatgtgaccctgggccagctaagctggtccttagacgcgtgcctctgcgtctctcacttcctctctttgttggagggggagggacggagaagaggagtggaaagtggaacaaagtcagatgagtaggagcccctaatctataattgcaagaggaagcttggcctggcggtttaaaacggtaataaatgtctggagagcactttgtatgttagttacaaagcgctctcactcacattatgccgttgattctgcaaggaaccctgtaagaaggacatttttctccctaatttacaaatgaggaaactgaggtactttgtttcagaaaggatgcgggtggagcggtaatcaaatgaagattatttcatccaggggtagactgcggagcccatgttctctccattattccaggggcaggagtacccctaggttcttgtcctggctctgaccctcccctttaggtcttgcaatgctctgagccctcctctcctcgccttagaatgcaactgctaaaccctgccctgcctgacaaggcctatgaaagcagaaaggaaggatcgtgcagagaaagcctaaagccgctgttcagccacagaagaagcctcaagcgctagatgtggcgtcaaatctggtgttggccctgtggcagggtggacctgaagaccacatcttcctctcctcccactgcctgaaacagctgttgtgtgagggccctcggctcctcagtggtgaagcagatagaggctgcttgttgtgccttggtgaatgctgctctgtgtcccttgcagctgcagcttggtaacccctccactcaggccactgggagcctcttctctcctcagtgataagcagaatagtgccagccacatcaaagaaccctggacctcctggagcattagcaatgggaggtccccatcacctctcctgaccactcacccctatcctaggccctctgctcttaaatctgttatatgggacaatatatatagtgcctaacacattgtaggcactcgacaaatgtttgttaaatttatgaatggaacactgattccagccatttcatttaacagttgcttaccaaaacaaattaacaatagcagaccactaattaaattccttactgtgttaatacaatggtacttgatagaacaagttcacaccatcatagaatattagagctggaaggaaccagagaattctattccaaccctgtcattcctctctagtctttgttggtgtgaccaaactggaaaattatgggctcccacatttgaaggagatactggctaataaaatataaaatatggcttaacaaatacaatgtgctgggcactgggatacagaaatggataagatacccttgggtcctggctttcgtggctctttcatgcaactgtggagagacagatcataaacatgtaaataatgttctgtccttgcagcccccaagtcctctctcccattccttcatgagcacacaccagtcaggctttactcccctccactccactggaacagtgcttgtcaaggtcacaagtgacctcagtgttgtcacatcagatggccattttcccatcctcctctttcttgatttatcagccacagtggacttggctgatcctccctcctccttgatacgcgttcctccctggcttccaggacaccacacactcccggcttgctcctacctcactttgaagccatcctcacagggttaacacgaattctgcacagaaatagagttataattaagcattaatcaggctgtaatttgacccacttccttgtagccaaaagtcatgtagcactagatactgaccatttgcatctccactgctcctacaggtaggatttctgacattggaatcataaggcttttgcttaagaattgtttaaggccaggcccagtggc

SEQ ID NO: 2231 - DNA, 4001 bp, Homo sapiens
ccctgggaggtagggacttttattatcttcatctttcagacaaagaaactgaggctcagaaagttatgtgactcaataaaagtcacacaaacagcaagaggcacagccaggcacgaacgtgggctttctgacttttatccactgtgctccacaccctataaacctaaaaactttcagacacatctcattccccaggattcccccactgtttagggtacagaatctaggggtcatggaatccacagcactggttaaaatccctcagactcctttcagacaaaggaaacagatggaataaaggggatgggaggagaaatatagaaatctgtccaaggccagattccagccaagatcctacactaaaaaatggcaagccttaggcaaatctcatctgccttcaagttggcttctccctccactgtagggctaagccacctgctttatatagtccacaaagcccttctgtgaatcagtcttttacaaagggagatatgtacagcagtaactattgactaagacagaaggcagcaagttcattatgagaaggacagacagaaatgcagacgggtctggaaagcggacccctatggaacacatggaacttgaggtagcccttgacttctgggggcattttacccaatggagcttggcggagcgttgatgaaggaatggagtgagcacacgcacagaggcaggagcacattttaaaactgagtttccactgtgccagaccctaggtgggttaggaggtggcaaaggtaatgggagacatggctgctgtgctgttcagagctttgggagcctgctgagaagtctggactgttctgggcagacgaagggcagcgtcaggtctgagaaaaaaggaatgctccgaggtgaaggcagggcctcaaggcaaatctggagagtataagagactaaagggagcgatggtaacacagtatcgcactcagaggttacagcaaacacagggacacaaactggaggaggaccgacctggaactgcctgactttggccaatgaggcggcacgatggaggggcacagaagaggacggttgccaaagatgaccaaggtttgggggccgagaagtggaggcggaggaggagagcagtttcactaatacagctggagaagtgaggaggcagggcttgcttgaaggaagcgctggacgcacagcctgcagcgcaggacagagaagagacaaagaactggaaagtgataaagtcgtgggaggaggtgagactggagggagagacgaagaggagcgagaactagcagagtccatgaaggcactttttcaaagttaggtggtcaccaaaaaacaggtaatcaatcctgtcaccagccgcggggacagcgaggccttgggcttggagggggaggatgccgacgatgccgaccgcgcatcagatctcgccgggaggagggcgcgggcgctccacttgttgcaaagaacgccgggttcctctgggccattgggctgccgctccggcggggagcgcggaaggctgggcctcaggtagcttcaatcattcacctgctggttacgggtcgcggcgccggggaccctactccggacctcggccatgcaacccgcagcatacggagaacgctgggcgcccgctccgctgccccgcttccttcctgcccctgggccgctcctctgcaccccgggagccctcccctgacgcacccgtcggtccctcggaagagccctctgccgcgcagccccgacaccccccgccccgcatccgcccaggcccccgggaccctgctcctccgcctcaaacttcccttccgtctctcacaacctcgtacctcctggtaggatgtggagcgctcctgccggatcatggcactgaccagagcttcggcacacctgagaccgccccagcccgcggcgcacggacgcagcactgcggccgctgcacctggacctaccggctccgcgaggcgaaaccggtccggaggggcgtcccagagaccaggcgtggcgatactcggcgcatgcgcctggccgctgccgcccaggagtcgcgaaagtgttgatgggaaatgtagttctgggcgggggcgcccctcacaccagctctcacccctgtggcggaggcctgcatgtgaccctgggccagctaagctggtccttagacgcgtgcctctgcgtctctcacttcctctctttgttggagggggagggacggagaagaggagtggaaagtggaacaaagtcagatgagtaggagcccctaatctataattgcaagaggaagcttggcctggcggtttaaaacggtaataaatgtctggagagcactttgtatgttagttacaaagcgctctcactcacattatgccgttgattctgcaaggaaccctgtaagaaggacatttttctccctaatttacaaatgaggaaactgaggtactttgtttcagaaaggatgcgggtggagcggtaatcaaatgaagattatttcatccaggggtagactgcggagcccatgttctctccattattccaggggcaggagtacccctaggttcttgtcctggctctgaccctcccctttaggtcttgcaatgctctgagccctcctctcctcgccttagaatgcaactgctaaaccctgccctgcctgacaaggcctatgaaagcagaaaggaaggatcgtgcagagaaagcctaaagccgctgttcagccacagaagaagcctcaagcgctagatgtggcgtcaaatctggtgttggccctgtggcagggtggacctgaagaccacatcttcctctcctcccactgcctgaaacagctgttgtgtgagggccctcggctcctcagtggtgaagcagatagaggctgcttgttgtgccttggtgaatgctgctctgtgtcccttgcagctgcagcttggtaacccctccactcaggccactgggagcctcttctctcctcagtgataagcagaatagtgccagccacatcaaagaaccctggacctcctggagcattagcaatgggaggtccccatcacctctcctgaccactcacccctatcctaggccctctgctcttaaatctgttatatgggacaatatatatagtgcctaacacattgtaggcactcgacaaatgtttgttaaatttatgaatggaacactgattccagccatttcatttaacagttgcttaccaaaacaaattaacaatagcagaccactaattaaattccttactgtgttaatacaatggtacttgatagaacaagttcacaccatcatagaatattagagctggaaggaaccagagaattctattccaaccctgtcattcctctctagtctttgttggtgtgaccaaactggaaaattatgggctcccacatttgaaggagatactggctaataaaatataaaatatggcttaacaaatacaatgtgctgggcactgggatacagaaatggataagatacccttgggtcctggctttcgtggctctttcatgcaactgtggagagacagatcataaacatgtaaataatgttctgtccttgcagcccccaagtcctctctcccattccttcatgagcacacaccagtcaggctttactcccctccactccactggaacagtgcttgtcaaggtcacaagtgacctcagtgttgtcacatcagatggccattttcccatcctcctctttcttgatttatcagccacagtggacttggctgatcctccctcctccttgatacgcgttcctccctggcttccaggacaccacacactcccggcttgctcctacctcactttgaagccatcctcacagggttaacacgaattctgcacagaaatagagttataattaagcattaatcaggctgtaatttgacccacttccttgtagccaaaagtcatgtagcactagatactgaccatttgcatctccactgctcctacaggtaggatttctgacattggaatcataaggcttttgcttaagaa

SEQ ID NO: 2232 - DNA, 4001 bp, Homo sapiens
ccatgttggtcaggcttgtcttgaactcctgacctcaggtgattcgcccgcctgggcctcccaaagtgctgggattacaggcctgagccaccacgcccggcccctgttattttcacactaatattttattttcttcacagcactcatcactatcaggtgctcttttattagcttacttgtttactgtctatctccttccactatgacttaaactctcaaaagtctaaagaccatatctcctttattcatcactgtatattcgcatcacctagaactatctgggaacacaggggtcacttagcacatgtgttagaagaacactgaatgaattaatgtgcacattttcctaagattttatttcactatttattttgagacggagtttcactgtgttgcccatgctgaagtgcagtggtgcaatctcggctcactgcaaactccacttcccgggttgaggcgattctcctgcctcagcttccagagtagctgggattacaggcacgtgccactatgcccagctaatttttgtatttttagtagagacgggtttcgccacgatggccaggttggtctcgaactacctaccgatccaccctccactgcctcccagagtgctgggattacaggcatgagccaccgcgcctgtcccaatattttatttttaaagaacagatttggatgctcttatatgcataagtacttgaaaacacaaaataattcaagtattttaacataattcaaaaactacgatctttttagaatcagcaacacctaaggccccaaatgatcccttctccacatcaccactggctgttattgatagcggaacaagctatcccatcaggtgagagtggataagatgtagtgcaaagagcaagttagatcagaagactgagctcttcatgcctttgcttattggggtgcgaacctgatcaagacacttaatgctacaagcagctcagcttcaccatctgagaagataacctaccttagaaaatggatgtttaattctgataaaatgggtgtttaagagcttggcaaactatccagcacggtgaggaggggttacgtttatcagctgtcaaggttgaagcaggagggcaaaccacctctccccatatgagagctcctcccaaaaggcgccaagtagtaccagagcacctgcttctcccctgacaaaggctgatgttacagaaagaactttggtctgggaggcagacaacctgggatctaaacccagtttgcaactgagatggcacgtgagacaaagggttggactctcagatctctgggggcccttccaatgttgacatcccaggatctcgtgtggtcccaaccaaactcccactcttgctcccagacccagcagtatgtctggaatatggtaagcgaccagtaagcatttgctcaatgagagaataaaccagtgaattaataaaaatgtctcctcagatccgataaggggctccctcttctacacactcacagctcgagtctcccagccacttgccctttcctgctggcctacaactctctccctggctacaccaggtgtattgagagcagggagcgtgtcccagccgtgtgcacaaactggcactacatggatggcggggttctggtgactgggcgaggcgtgcgggccagacccgaggaaaaggcttgctgcgcgttggggccggaggctagcccggcccgactccggctctccctgggccctcctcgtccccaggcggatgccggaagagactcacgtgagcaccgggatgggcgtccacaccacgcagtaggggaagcgactccgttccacatccatggcgacgccgccggagccttgatattgcttcatgtccgtctcggccgccgtcggcgcctccacttccgccatcctgggcgggggtggcggcggcggcaacaagagcagagaactcccttccgcttccgccatgcggcgcgcgccccgctccgactggccccggctctggtgccgctcgtccccatggcgtcacttcccggagatggggtccgccccgcttggccttcccccgggaatccgagccgcgttcctctgggcccggccagccccgccccactccctatgcgcctgccagccccgagtctttgccgcttatgccccgcggctgcagaagggatgctctcaggcagttcgcagtctagcgccggagacttatagagaactctaattcagtacgctgagggctcctaggaggtgtggtacagtcgctatttattgagcacttcttaggtgccaagcacttgacatgaattgtttctaatccccataaactaattagacatccaaattaggtattccctcctgttacaggtgagaaactgaggttcaaaaggtgagagaccacgatgcaaacccaagtctttttttttttttttttttctgaggcggaattttttctcttgttgcccaggctggagggcaatggcacaatctcggctcactgcaacctccacctcccaggttcaggcgatcctgcctcggcctcccgagtagctgggataacaggcgcgtgccaccacgcccggctaatttttgtatttttagtagaggtggcgtttcaccatgttagccaggatggtctcaaactcctgaccctgtgatccgcccgccttggcctcccaaagtgctgggattacaggcgtgagccaccgcgcctggcccaaacccaagtcttatacctcccttgcccttttcattctgtggccctctcacgaggtagtggtagcataaaggaagacacacacagttgtgtgtgcgcacgtgtgtgtgtgtgtgtgttttattgtatatacagggaagacttgctggaagataggatattattgagttgagtcttgatgtttgccatgtggcacaggagtggaagtatgagtgcagcggtacaaagaaaggaaggccgtgcagagcagtgtgtgcaagagtgtgaatacttactggagtaaatcataagccttagatgtgatccaatcccttcattgtacaaatgggaaaacgggctcagggaagttaattgtttgagatcacacacaaccataattagagagaagccaggctcaaatgttggagacttttggctttttaaaggatgtcaagacaaagaaaatgaagtctactggggtctactggggtggggaggggaagttggggacagcccaaagtcagaaggaaggctgccactaaaaatcagccttaaagaaaaaaaaaaaagaataaaaagagtaatcaggtaaaggaaggtatggacaaatgcactcaggaagttaggagcttcccatttggggaaggtccttcttccactgaattaccctccctcaatgctgatctatggagagcttgctgtcctgtttgtagcacctaatattttcatgtttttttgtgggggatgtctgtctctgctatagaactctaaggtccttgacttcagtagctggcacagttcctggtgcaaagcatatgcccactagatgtttactgatttattaggtgattgaataaatggatgttttataaagacctcagagattcgcaggcatgataatgattacagtgggttagaaaatgattctaacccactccaaattctttgagcacgtttgtacctctccttgacccctgtgcagtgtgtgatccttgaagggcaacaaccagcatccagcacagggtttggaatagattaggtgtgtagtttacagttgttgagaataaattacatgacttcttgattcaatcactgtagttatctaatctcttctggaccacaggctgtgaggaaggtctgtgccttagacatctccctaccatgactgtcagcccataattctagcacagggttgctgggtaccctttaaacatttattgtaggtattgatgaataaacaaccaaagtaagtctctcagggcctgccacaagtttggtagtactaatacacgtaccacatttaatctgccaaacttcaatggcttc

SEQ ID NO: 2233 - DNA, 4001 bp, Homo sapiens
accaccacacccaactaattttgttatttttagtagagacggggtttcagcatgttggccagactggtctcgaactcctgacctcaaatgatctgccctccttggcctcccaaagtgctgggattacaggcgtgagtcaccatgcccagtcgagcataaacttttaatatatggcttcaaatccttctgcactgacatcctgtgggacttgagaggtgaaattgcacaaagttttgcaacttcattttctaagataatcatatctgctttacagagtcatgattggaattaaataatgtgtaagactagtgcagtatctgacgtagtagagggcagtcacaaatgtcaagagaaaggaaatttatgtatatggagctctgactgtgtgccaggcactctcctagatgtttcccattcattaaatttaatcctcacaatgctatgaagccaactatataaaaccaaggctcaaatgggtgacttgctcatggtcaggtaggtagcacacagtggaagcaagaatgtgaaagccagcacttggcacagcaaaatgaaccttccttcttcctccgctggtcacacatgactgccaggcttcaaaccaactccagtgcctagcaacatactcataaccagcacactgtgcccctcttgttcagagaagaggatagtaagagggaactagagctagtcagccctctctcactgatgggaatgaggtgtttcaagctccaccccgccccccccaatcactcttccaggtggcctcaaacactaagcagaacagttccaagccaggacccacctgtcgatgccaaggtgaggtaatagagaagggatccacactggttgaggagaaagggcatcaggtactggaaagaggagaaacctgcagtcagtgtgatggcctgactgagcagcactgccttctttgagctcctagcgaatgtctttccttggagggaggcagggttataaggacccagagaacactaatccctctaaggaggatccttccagggcaaagagggaaacagactgaagtctgtgcctttgctcaaactaccctctccctcacctctgctagttcccatcctgcaaggccttgaagccaatgtcagcccctccaggaagccttccccaagtcctccagctccagccttcctcctctgaactcctcccctgcagggccaatttgagccccaagccctccctctggaaaggctcacaaatgttgccttatgtaactgaaggaatcacaataaaatgtgaataatggcagccatagattgagcacttactatgttctaggcctaatgctaagtgctctacgtatctcacctaattcctgcaactgacctatcagatggttattattataatcgccatttacagatgatgaaactgaggctcaaggacaactgacttttccgagaatttctagtgagtaagtggtggggctgacccagacctgtttgactccaaagaccaaattcttggcggcaactccaccgagagaggggcctttcacagagacgcacctcagtattcaagaagagggtcttcatctcctgtagcaactgctgggcccaggtcggctcatgaacccgctgcaggccggcggaggcccgcttcagcagcggctgcgtgccaccccacagagcggccaccagcaccagagccaacacctgccctgaatgcagacgagtgagtcaccctgacccccaccccaaacggccgcccaccccgccctctcctggccttctagccccagctagccgcccccacttccctccttcgctctcttcgcctcggctgcgactggcggctaaggcaggcccagggaagctagggagatgaatccaggagtccggcctctggggttgtagcaggggtcggggttagagggtggatgtggagcaggaaatgaattcgaggcgagggtcgggaaatccatggaagggcggggccggctacctacccagagacgccgccatggcaacgccgctgtcttctacttccgggaacgaaggggcggagacccataatccggaagtgacctcgaaaccttttccggtcttactcacgttgcggccttcctcgcgtcacagccgggatggtgagtttcagagttaggggtattgcagtgggggtcctgggctgaggctggggcccaattccgagcactgacgttactgtcttgtccccacagaagccgatcctactgcagggccatgagcggtccattacgcagattaagtataaccgcgaaggagacctcctctttactgtggccaaggaccctgtgagtgttggctggagggggtccgggaggggcgggatccttctgccaggacgatgggtggacacgccagttttgccgttagcggggaaccaaagagcagcccattgtgagaagtagggagaggccatgccgggggtaggttggcgaaagtattctaccgggaaaggtggggaagaactctattggccgagtgcggtggctcacgcctgtaatcccagcactttgagaggccgaggtgggagggtcgcttgagcccaggagttggagaccagcctgagcaacgtagtaagacccatctctacacacaaaaaaattagcctgacatggtggcctcgcgcctgtggtctcagctacttcggagtctgaaacgagaggatcgcttgagcgcggtgagctgagatcgtgccactgcactccaagaaaagcaagagaccactgtggaaaggggataaagatgagggtcagcttgcccagagaacgggatgcgacctttagggataatctaatctttctaccaggataggtgcaggctgtgttattcagacacagggaacttaatgagggtgtctctagtctcattttaagtcaatcccatcctgctactcaatgccaaacaatccctcatgatactgccttttgaggcacctggccattttattttattttttcttgagacggagtctcgctctgtcgcctaggctggagtgcagtggcgcgatctcgactcactgcaacctctgcctcccaggttcaagcgattctcctgcctcaacctccctagtagctgggactacaggctcgtgccaccatgcccagctaattttttgtatctttagtagagatggggtttcaccatgttggacaggcttgtcttgaactcctgacctcaggtgatccgcctgcctcggcctcccaaagtgctaggattacaggcatgagtcaccacacccggcctggccattttcaagatgagaaaactgaagttcagaggagagaagcactgtatttgagatcatatagtgagacagtggcagagcaggcaccagaacccagacttccttactaccagctgctcccacttggataagacatcagagatactgtttttctggactggagctcaacttggccttttattctttggagccgttgggagtcccaggagagctggagctaacaaatgaggatgcctttacaagccgcctgactcctctgttgcttcccttcaggaagggaggagaatccaggagttggtctttttaccagctccctgctgtttcccaagaaataaacagaagagggcagaatcagccttgctacaggctgctgagggttcctggggcaaaataggaagccattgctcttactgggatgtgtactatcctgtggtttgacttttccagatcgtcaatgtatggtactctgtgaatggtgagaggctgggcacctacatgggccataccggagctgtgtggtgtgtggacgctgactgtatccttattttgggtctgagtccgtgttgctagggtctgtcagcgatggagaggctgagttgggagttgggagttgggggtgctgttgagggcctagagaacgatacctcctactccctggtctcttcactgactgaggaaacattcaggacaaattccagttctggataaggaggtaagaggggtagaaaggctctttgggg

SEQ ID NO: 2234 - DNA, 4001 bp, Homo sapiens
tggacacggcatgagccgccctacatgccctgtgcaaatactctaaggcgcctctgcctgccccgcggagccctcagtgtgctgccacaggcggatgcacacggccccagcccacgtgcgtggaggccgcacctttctgatgctctggagctcgggtctgggcccagcctccgggaggcagtggagccgacctcaggcctttgctcagcagtcggacctgccagccagggacacggggctctctggtagcatgtggccaccccacaagctcttaccccctaccctgtgcccagcacacgtgagggtcacagacaccccgatctctgccttctctaacacccgtgttcttcatcgacacgcctgctgcacccataggcatgtcacacgcttagcaacacatgcagctgtcctgaacacacatgccccacacccacacgtatgcacagagacccccggagcaggaggcagcagagatgacgaacacgggttctgggctggtgccccctttgtccttcactagctgtgtgaccttggaaaagcctgtcctctaaatcctccgtccacttcctcatctgttcagcagggttaacagcggccactgcgtgagggtgtcctgaggggtggaagtgcatgcgtgcgtgcgcgggggctgtgtgtacgcacatgtatatgcacagacgccacacacatgcgcgtctcatgagaagatgtttatttcgtacatggacgtacaaacatgcatggccaagaggatcccatcgctacacgtgcacagagggggtcacacggtgggtgcggggggtctgggcgctcccctcaatctgaatgaccttgaggaagctccacctccccgctgcccccccagcccatccctcagctcctctccagcccgggggtggtgcccagtgcccctcaaggcaggcccttcccgccttgacctgcattcccctgcccagggactcagtgcagggcccagccctgtgccagcaggcgcttcctgccccagccctgatgaggctggcttgggtctccactgtggacatcacactgggctgcggctttccggcctccaggctggaccaggaggccccgtgacccattccgccatcaccctggaggcctctaggaacggcgtcctaaagccatgcgcccccaggagacccccgcccaccttgagacagctcctccccctgcgcacctggcagccctcaagggtggaaggcggctcgcggcctgcgtggggctggttcccccgcgccccgagtgggccccgccacacatgtgcgctcacgcgtgtcgagccggcgccggttgtggactcaccggccacagttgcagtggcagacgcggtcctcgccccgcaggtgcgggaggatgtagttgtggaatcggtccagcagcgcgttcatgtccatcaagcacgcgatggcctggaagagctcatgaccggtcagcgccaaggagcgggcgggacgaagcggggctgggggtggggagcgcaggccggggtcggggcagcgcaagcggggagcgagagcgcaggccggggtgaggggagcgtaggccttggtagggggagcgcagcgggtatggggatcgcaggctggggaggggagcgcaggccggggtggggggagcgcaggcccgggaggggaccgcgggccggggagggggaagcgcaggccggggtggggggagcgtaggccggagagaggagcgtagggagtgtggggatcgcaggttggggaggggagcggaggccggggtgggggagcgcaggccggggaggggagcgcaggccggggaggggagcgcaggccggggaggggagcgcaggccgcacgggcggtaaacaaggcgcgggaggtgggccaggcggcgcgcgcgggcggggagcagggggcgcgcgcgggaagcccctccgctcaccatcacgaccgacgcccccagaatcatgaagatcatggtgttcgcgctcatggacatcgggcggggccgggccgggccggagcgccgccccccggccccggcgcccccccggccccggcccgatgctgagcccccgccgcctccgcagaggtcagcgcttccctggatcgtccgccgccgctcgctgcaaccccggcaccggccggggggaggaggcgcgggggggggggcgccggggagggacgcggggcctttctggggtctctcggcccggcccgccgcgctccgctccgccctcgggtcctccctgcgatgcgctcggctcggctcgactcggctccgctcggctccggccccctccctgcctcctcctccctcctcccccctccctccccgccgccttcctccgcctctcgggagggaccgcgcagaccgcaggccgccccgtgccagcgccgggaggagaccgccatcccccggacgccggccgggacccctccccgggagcctcggcttcgcgtcccgccccagtctggtcagacccagccccggtggcctgtccggtgaccctggacgccagtcctccggtcctggaggggcgccgaggcccttcccgccccactgctccgccctacgtcctggactcccaggtcgccgggtgcgggactgccccagtccgctcggcacgcacgtgcctccagggtggggtccgcaaggtcgcgacagccccacggccgtgggggccacaggtcagggacgggatgacccctggaatcctcaacggagggatgtggcacaggagccgagggcagggccgccccgcacaggcttcccttagggcggggacgagggggtcagcccaggcccatgggtcgggacgccggccattcagaggcccagtggccaccactccgctgtggctgtccctggctcggggtcctgaggccaaactctcatccacgaccggtgaccatgtctcaggcccgggagccgacccccggcctcagcaggaagtcagcgggaagctatgcctgggacccagcctgggtcgtggcgccatccaggctcactgcagcctccactcctgggctcaggcgatcctcccggctcagcctcccccgtagctggccttgggggatccccgcccgggggggttccacatggagaggggacgccgctccaccacaggcagcagttgtggcaggagcaggcggcttccgcttcaggcagcacaggcacgggtaggcccagaccctgtcagcaccaccaggtctgagctactcctcccaagcagtggtcggaggtcactgagggcggcagggctaggcctctgccacctcctcaggggcgagggtcgggccaggaattcaggaccaggcacaatgacagcagcatctgtttattgacaattccaggtcattcctaacacgccgcagcagggctctgtacagtccggcccggtggggaggagggagggaaggcaggcacacgaagacacaggtatgtcgggaagtgcacacaaaccgttgtctttcctttttggttaaagaagaaaaactttgtaatcaatatcctgctcataagtaaaagtggaaaagaagaaacttgattgctttcatctggcgttttggcatctcctctcccatttcatatgcacagtttatttgggtaatgctaccgtcaccagcagaacacctgtaagtaaaaacaaatgtcaggaaggaaaaagtatgaacaacaggaagctccagaggcggctccatgcgggcgctgggctcagtagaagcagacggtgtgcagaaaggtgcggccactcttctcctcgaactcctgcagcagctcgtcgatctcgttctccatgtcttccgtgtgctggatctgcaaggacaggaccgtggtgagggccttgcccactcctgcctgtctgctccccctaacacctggatcgccagggaaacgccaggcctgagccagcagaaaccagcgcagcaggcaggccctcaccccaccgctgctgcctcacaaggacggccggaggctgcagggggagagcgtcccgggcagcccccacc

SEQ ID NO: 2235 - DNA, 4001 bp, Homo sapiens
aaggataacagcaatgataccagctgccagtcacctagtatctcactttatcatttaatcctcactgagacctatgatctggccccttcttacatcttcagcttcatcccctatcattctctacctcacacccaccctctaccacccgccccatgctctaaacatcttgatctttctttcctcagcaagccaagctcattgctacctctagcacttataatatcctatctggaaagcctttcccggactgccatttctgaagttttgaagtaactccccatcactctctctccaatttctattctttttttccaccagaattcactctctgaaattatcttactcatttgttaatatgcttattgcttgtctgtcctattacaatgaaaggtcaatgaggtcagttaccttatctttttcactgctatatcccctacctcagtgcccagcaagtatatgttgatgagtgaatgaacccagcaaggtaggtttttcacacattaggaaactcagcttacactatgtcacagtatcgtggctgggtcgtgtgctctcaactctggtacacattgggccccattcagacataagtttctggaggcctataactctgggtaactttgggacagctttttcatccagggccccatgattcagctcaaagggcattctgggatctcatgggcaggacccagggcctaaataaagggtcaaggatatggctgggagaatcctgtggctgtggactgaaaaattggacctactaggctgagcagtctagcccaagctcccacgcaccacttcgcacaaaagttctgcacaaagctcctaagcacctaaaaaagtcacaacctgactgggtgtggtggctcacgactgtaatctcagcaatttgtgaggccgaggcgggaggatcgcttgagaccaggagttggagaccagcctgggcaacatggcgaaacccggtctctattaaaaaatatatatacatacatatacatatttttaaaaagttataacctgttcatacctcttcacagtaacacagcagcctccattcacatacaccccacgccgtagcatctcagctcggaagcgtttcccacacttcggagccaattttgggcttggatgtatgcccaaaattataaacctccacaagtctctaaaaagtacctggcgaagagctctgccctccataaacccccagaccagaagctctgttcatacgctgttatacttggcttagaaaatcccacacaaacacccttagtccagtccagaagctctgcccacacccactctcctctctttagaagctctgcacccacataaagcccctcagcccagaagctccgcctacacacaactgtcagcccagaaaccccgcccacaagccaataaaagccctctcagcccagaagccccactccagaatgggctccctcagtcggaagtctccccgctccaccgcccccagtgtaacccctccaacccagaaacgccgactgcactagcgccccctgcccagaatctccacccttagcgctgaagccacgcccactggtaagtcccgcccccctttctagccccgacgagctggtcctcacgaaagcccaagcccccacagggcttcgtcttagaagccccgcccaccgtccaatgtcccgcccccacaacagaggccccaccccgcaaaacgacaggagggggcgggatcccgtctgcgctcgcatcccctccccctcccgtcaccgggctcctgtccgcgtggagcagcaattagcagcctggccatcctaacccgtgcgcccgctcgttgccaggccgagcctgagccgctctgctcacccatctcctccccccggtgctctccgcttcgccgccgcagctcctgcgggcaatatgtcggaggcgacggcggccgggagaggactaaccgccgcagcccagtcccgggtatcagccgcgcgctcccgccgcgccgctacatttgcatacaaggcgggctggaagctggcgcgcgcttcttaaaggggccgcccggacggaggcggtgcctgcgcgctctttgtctctcggtcccccacgcccttcctgcagctgctggtgaagagactcaagagggaggggaacggaacccacctcctgctcttcccgtgcgtgtcttctctcagcatctcctggaccggggcggcggcgaccggaggagggtgcggagccgcctctccgctcccctaggggtggaccatatccctgaccggtccgcaggcacctccagcccagccccacgttgcgcttcatccttctcttaggcctcactgcgctttagtccaccccagtcaaaatccaggagtcatttcctccctccctcggcccccacatccgatctttgccttagtctttgtgagcctaagtcctaaatatttctcacatttgacgttactcaccgttctcattgtcaacaccgtggttcagatcctgactgccatttcccagccttgcaatcttgtttttttatgctttacgatgaggctgctgatggtcaccgtgtaggtttcggtgagggttaaatgaaatagagcatgcagaactgagtctgttttagtattagccatcacgatgtttggagaagcattgactaaatgagctacatttattgtcattaggattcttccctcacaagacctacaagcagttttagtcatcttgtagctccattgcttagcacagtgcttggcacttaatagcagtattcaattaattgaatgaattagtagatatttcattaatagtcatagagcttacagtcaagtgggaggagatagacatgaacaaaattggtaaattctgtagtatgttagatgggaatggtgtgaaggaaaaacaggaaagggggatggggttgcagttttaaatagggcaggcagagcaggcttcagagttgacttgagtaaacacatgaaggaaatgagtgagtcagtggtgcagatttctggagaaagggggcatttcaggcagagggaatagttagtgcaaggtccctcaggcaggagggtgtatttattttattattttgttttttgaggggatggagtctctgttgcccaggctggagagcagtggctcgatctcggctcactgcaacctccacctgctgggtgcaagcgattctcctgcctcagcctcccaacaagctgaaattacaggcgtgcaccaccatgcccggctaatttttgtttttgttttgttttgtttttttgagactggagtctccctttctgttgcccaggctggagtgcagtggtacgatctcggctcactgcaacctccgcttcccgggttcaagcgattctcctgtctcagcctcccaagtagctgggattacaggcacccgccagcatgcccggctaatttttccatttttaggagaggcggggtttcaccatgttggccaggctggtctcaaactcctgacctcaaatcatccacccacctcgacctcccaaaatgctgggattacaggtgtgcaccaccacgcctggtctaatttttgtttttttgtttgtttgtttttttgagacggagtctcactctgtccccaggctggagtgcagtggtgtgatctcgggtcactgcaacctccacctcccggtttcaagtgattctcctgcgtcagcctcccaagtagctgggactacaggtgtgtgccaccacactttgctaattttttgtatttttagtagagatggggtttcaccatgttagccagaatggtctcaatctcctgacctcatgatccgcctgccttggcctcccaaagtgctgggattacaggcacgtgccaccaccaccggctaatttttgtactttttagtagagacggggttttaccttgttggccaagctgatcttgaactcctgacctcaagtgacctgccagtctcggtctcccaaagtgctgggattacaggcgtgagacaccacgcccagccaagagg

SEQ ID NO: 2236 - DNA, 4001 bp, Homo sapiens
taactttggaaagtaatatctggattcatttagtatcttttttaatgtaaaaaatggtttgggggccgggcgtggtggttcatgcccgtaatcctaccaatttgggaggctgaggtgggtgggtcacctgaggtcaggagtttgagaccagcctggccaacatggcaaaccccatctctactaaaaatacaaaaattagccgggggtggtggcgcatgtctgtaatcgcagctacttgggaggctgaggcaggagaatcgcttgaacctgggagtcgaaagttgcagtgagccgagatcgtgccactgcactccagcctgggcgacagagcaagactctgtctcaaaaataataataaataaatagaaataaatggtttggatatatttaagcagtattaacaaaggtgggtctccaaatattgaaaaaattttaactactggttgacctcctcctgaaaatctgtcacatcctattatttctaagtaggtattaaattagtttaggtggtacttttaataccaagtatatgattactaatccacaggagctcttttgtatcattttgattccaaacttattaaatgaatttgatatttacagtccaggagcactaacattagtagagagacaagtgataaactttggctctgagtggaattacagattcaaatgaaaaatatttctctaatttacatattttatcacagaacgtgtgtttcttcacacctaaatcaagaaattaaacactgcactgcagttcttacctctacccacatcatttcctttcacttcattcattatttttctttctgcaagcctgccttttggtgtcatttctatataaagaacatccactttaatatccctatctctgatcctaacgggtgtttccagccaaaagcaagcacagaatcgtggttaatagtaattcagattacaaaaatccaactgctatttaaatatagccgacccaagctgtctttacaaattatataaaacattcctgtaagccgagcagtagagacctgagatacagccatgttatctctatttcagagtatgaaaaagcctgaaatacatataacttgcgaataacaacacccaaactcctacagcgaacttgacttccttaagatactttgtagccagcaattatggttgtccaaaaatatgacaccctacaatagagcaacgtctcccatttttaacttctcttttaaaaattaaatattaaaatatatgattacagccaatgctaagatgcctttgggacaagttcaatttaggaaattcactcatttgattcttccccgggaagaactgcaattcaataagtgttattttcggttcatcccaatggccccaccccgaatccatttttctttgcacgacgactggtacgctcaagccagaccccgccctccaaactctgggacttttaggtctcgagggacgccgctggaagatgggggagccacctttagccggggcacccctcgctgagggagctggccgggtcacgctcctttctcggggcttcggcttgtccagctgtgaagtgggggatcgggggattttccagggatcctggggtgtcccgggggagggcgcggtcccctctccgtcttggcggggtctggacgccgtcgccttctcctggcgccgccggacccaggagaggagaggtccgcggcggctcagcccgggtctgcggcttccgggagggtggcggcaacgagcctgtgctgtgggcaccagcccgtcagacggccccggctccgaggcctctccagcctgcggccgctactctcttacccccactccccgcccgacacttacgtccagccccgtcgtgcagtggttccggagcccggtgtcgcgccgcgccggcccgcctcactcccccgattttagccaagaaaacaaaacggccacagcctccagacacccggatgcagcagtaccatccacccggctcagtcgcgcatgcggacacggggcggagggcggggcgccgggtccggagggagccacgcccaccacaacaacgcgtctgcgcatgcccgggcgctgggttcaggggctttccgccgctctgggttcacagctggacgtcgggagtgctagtttggagtacgccatttgagagtaggcgtgagaagttgctctgtgtgctgagcgttctaaaggaaggcgtccgttggccttcgtacccgtcttgagtgaggtgacgagtgttttctagtactggggtcggccgcgcagccctctcaggggtgggtggcaggaagagtgccgggtcccgcgtggtgcaaaaggtgggttcaggtttgcggccacacagcgctactcaggactttttagtcttgtttattttctccgtgcctgttcccgccccccgcagctccacctctgggagaggggcgggttcagctccaggaggcggggacttcccggcttggcgtggctggggtgtcccgtggaccccagtctcggcgcggtgacccacttatgggacttggcctttctttgttgtttgtttaaggcagggtttctcagcctgggcactactgaggttttgggccggctaattctgtctgggttggggagggtgctgtcccgtgcttcgcaggttgtgtagctgcatcccccgcctctacccagtggatgcaagtagcagccccagtgaaccaaaaatgcccccagactttgccaaatatcccctcccggggaagatcgcctcgcttgagaaccactgttggaggagagcctgggttttcgggaggtaaccgtttacaaaggggagaacggtaagaagccggaagcaacgatgacttagctacgtgaaagacttgcggccgggctcgcccctcttctagaagccgtcagtttgggtctcgcgtctggaatcaccgtcaaggagtcagatccagccccggagagggagcagggtcgaggtctccttgcagaaggcgccaccgcaggaagcacaggcgcaacgtgcggtctccctagcggaggcgctcgcgatcctgcagccgccggtccgggaggtgctcggtagccctccttggtgcctgtccggtagctggtcactctcgggggaaggtcgtgtgcagaagggcacatgcgatcacacagagacggcgttgctgcggctttgacccgatggtgcacccgaaagaacacagagggtgaagggagagatccaggaagtggtcgcggagcagaaccccccttcacttcagttaaaaaggtgggtcaattgtcgttaagagatacgcacaggttcatctgattgacatgtacggcggcagtatatgagtgggatgggaaccaaggtgactgttgtttcctttgatggatgaaactttcatccctttgggtttttttgtttgtttttggcggtgcattagccgattagtagataaaactgcatgacaatctatagcctgtttttaaatggacacgttcttaccactcaggaggtttatcgtgattgtttaatgtctcagggtggaggaatctagtgcaggcagttcttaatgaaaccttttaaattcccgttagtgacttaacattagtttaccagctctgagcagctttaaacaaacatcctcttttaatagctaatgagtgcgggagaaaagatactaactcctttctctttgcgttttttgcccctacccttttttctcttttctggccttaacatgattgtcaaatatttataaatatgagtgagcatctttatattactcttactaataagatacatgcttaatttgtcattctttacctttttgggacttaatgaatgtttgtcttttgtagataaaatggagctgctagaaatagcaaaagccagccacccatattaacccctccattttccctataattaatggctttcattattgtggtatatttgttacaattactggactaatatgatacattattattaactgacatccacattttattcagatttcttt

SEQ ID NO: 2237 - DNA, 4001 bp, Homo sapiens
ccggaccttccattccctttacttttccacaccctccactgcctgagcaccttccccagcccagcacaccccaggcactctcctgtcgctgtgcctttgcctgtgctgttcgatctgcccagacacccttcctcccctgttccctggggggactccagttccctgatgaatattctaatactcttttcttagcaggacctcctgagttatttcctttcttctgttctcgtctaagccctgtgacataacttactatagaatacttcatgtgctaggcataaataccccacctcgcccttggagatcatcatcccattttacagatgaagaagctgaggctcagagaggtcaggtcacacagccagcaagtggtgtggcctgactgtatcgccaattctgcaacacttttcatgagtatccctgactccctcactaggctgggggctccctgaggcttctgggctctgggtcactggggcaggccccagacaccccatcagagagctgtcagctccgaagccgtgaggagcaggttcaccactagcctcctctctctttctttggccttttctcccagtctgggggtacctctcaattggtggagtgagatatttggaggggcaggggctctgtcccaataggtcaggatcctcttgtgacaggtttccggggtgtgaaagctgttcacggtcccagggccaacagttccctagacaagctgttctccgggtaacccattcaaaaggaaagccagaagccggccggtcctagaggggaaagccttccacccgctgacttacctcccggttcgggtccctgccccgcccacctcgtccccgcccaccccactccggcagcgcccgggttcccagcagccagacctcccctgctgttgggaaggacccgcagtcccatgcaccgtcacaggcacctcggagcgctgcgcaggacaccccacgggctgctccctggggaaaccgtgggggaggggccaggtctctcgcccccaccgctggttgggaaagagaccattatcctgtaatgcagaccaggcgcgccgggccaagcgcctcccgtttgtgcgctgatttgagatctgatttgtactctgctctcccctaggcccggtaacgtaacttaccgctgagtgcttgctgggtgctgggcatgaatgccccgccgcaccctgggacgttgtcatgtcagtttcacagatgaagaaaccgacgcgctcagggaaggactcgagtttcaatccactttgctcatgcccgattctttacccccgtgtttgcttgtagagcgacacacacacatacacacacacgaatctaaatccctaaaaggccccgacttccatacagtaagggatgcgcgagcaaagcgccaaggtggtttcctgggacctactgggaagttctgctcctaaccacgcgctgaaagcgcttctggcgaagccaagggttcgaagcccgccgggcggatagcacctgttcccgccaacagggggcccccaaggccagctgccttccccagccgaggccagctggccaggcgcggtgcccgggaggcgggagcgtcccgcgccggcggggcgcggccgcagagggtgcggggtgcggagtcctcccggtggtcgaccccaggcgggaagcgctcggcggacagacggacggacaggagacccaaacgggcctcggcccccttacacggccctgtggggaaccgacagcgcgccgcgggaagcagcgggcgcaaggcgcggcggctgagactcacccgggaggcggcgggtccggctccgtctcggctgggcggtccgggactgcgggcttcgcgacccccgcgccccacccgggcggcctcctcggtgggcgccgcgatcgcggggctggggttcgggggattcttagccgagggaacgcagtggtggagagggcgcactgccctctcagggaccgggttggggacgcaggaagcgcggcctgggagcgccggcgtgcgggagggagggaccgcgggaggcggagggcggtgccggccaggagcggcctccagcccggagaagcaccgcccaccggccgaccctccctcccggccctcggcaccacccccgggcccgaggcgagggatcgcagctgagcgaggcgggcacccactccccagcgtatgccgctggagcgcgctgagcgtgtgccgggggctgggcctaagttctccccaacccttgccagccgagttggataagagggggtcgggagaaaatagagccctgatcccccctcctccctagggcccagagaatcggtgtgcatgcgtgtgtgcgcgcacgcgcgtgtgtgtgacgggtggtggtcggggaatgtctcaagctagaagtcccaggttttaggggtttaagtggagctgggagacccgctttcctcccacaccaggcgcagacgccgaggcacagctccgccagccgccccgcctttacctggcgggatactcacctctcctccttcctggggaggccaccgcctccctctcccccttctgccctgggctggttcccagcgaggtgagtgaccggcacaagtagggaaggaggaagcgagtttttaaaaactgagtcagctcacgccctcggccagggtccccacccgatgcgtggtccccagggcgccctcgggatcgcacgcccgagtcccggcccaggtggggcccattccgggttcttgcgcgcgggcaatggatgggggcgcgctgcaccgggagcctgccctgctgagggctcatccccagctttgccgagaactttcccggcgaggcaccggctggcgttttcccagcctgcgagtggcaggcgggcagccagtctctgctcggatccacggaggcccggagccgccacggagttctggctccggggagtgcaaacccgaagtcggcgcggaagcctctcacccgcggctctgcctccgccccttggagatctgccctcggaactgcgttgctctggcgcccgaactagggtgggctggtttcagccagaccgccaaaaaacgtggatgctaaacacagagggaagagccagctcccattccctctctgagccttagatttttttgaattccgagagaggtcaggccggggtccccttcttgggtgagcgtccagccctttgaagttcaaacactgagaagccgataggcagctggctggcgtcacaggatcgagccgaggactgaaggcgcctcctaccgggaatccaccgcctccagacgaaaataggctgcaatcaagttcacttccaaaggcggaattcatgggtacatatggtgtccacgtgtgtacacctgcagagttgtaacatgcgggcatttctcccctcagcccgccattctggcttcttaacttgcaccctaacagctcgacagaaccttggcgtccacaaaaaggcaagtttgggtctgccttatgatttgggggtgggaaggcatttggggaaacagtctccatgtctatgacagcaactgctattcctcacatccttgctatgaaccaggggcggggttaccacccacatcccctgaaccatctcatttaatcctcataacctaggaggcggttatttgttatgcccactttatagaagagaaggctgaggcttaaggaggtgaggtcattttgcccagtgaaaacacagctgggaagtatcaggatctagacccaagatgatccactccagagcttctgctctccctcccatagcataattcctcctgtctgcacatactctccaccctgagagaatgttcaccttgcctggccacctgcaaatgcggaataaacatttgttggatgaatgaaagccctaaataataacccatgattttagtgaatagggaggaccctttgtgtaggcaggtacctataataatatgctcccatttaagagctgtgcgtattcatcccaaagtttagacaatgcatgtggggaccttcccaggctccaa

SEQ ID NO: 2238 - DNA, 4001 bp, Homo sapiens
gtcagtttcacagatgaagaaaccgacgcgctcagggaaggactcgagtttcaatccactttgctcatgcccgattctttacccccgtgtttgcttgtagagcgacacacacacatacacacacacgaatctaaatccctaaaaggccccgacttccatacagtaagggatgcgcgagcaaagcgccaaggtggtttcctgggacctactgggaagttctgctcctaaccacgcgctgaaagcgcttctggcgaagccaagggttcgaagcccgccgggcggatagcacctgttcccgccaacagggggcccccaaggccagctgccttccccagccgaggccagctggccaggcgcggtgcccgggaggcgggagcgtcccgcgccggcggggcgcggccgcagagggtgcggggtgcggagtcctcccggtggtcgaccccaggcgggaagcgctcggcggacagacggacggacaggagacccaaacgggcctcggcccccttacacggccctgtggggaaccgacagcgcgccgcgggaagcagcgggcgcaaggcgcggcggctgagactcacccgggaggcggcgggtccggctccgtctcggctgggcggtccgggactgcgggcttcgcgacccccgcgccccacccgggcggcctcctcggtgggcgccgcgatcgcggggctggggttcgggggattcttagccgagggaacgcagtggtggagagggcgcactgccctctcagggaccgggttggggacgcaggaagcgcggcctgggagcgccggcgtgcgggagggagggaccgcgggaggcggagggcggtgccggccaggagcggcctccagcccggagaagcaccgcccaccggccgaccctccctcccggccctcggcaccacccccgggcccgaggcgagggatcgcagctgagcgaggcgggcacccactccccagcgtatgccgctggagcgcgctgagcgtgtgccgggggctgggcctaagttctccccaacccttgccagccgagttggataagagggggtcgggagaaaatagagccctgatcccccctcctccctagggcccagagaatcggtgtgcatgcgtgtgtgcgcgcacgcgcgtgtgtgtgacgggtggtggtcggggaatgtctcaagctagaagtcccaggttttaggggtttaagtggagctgggagacccgctttcctcccacaccaggcgcagacgccgaggcacagctccgccagccgccccgcctttacctggcgggatactcacctctcctccttcctggggaggccaccgcctccctctcccccttctgccctgggctggttcccagcgaggtgagtgaccggcacaagtagggaaggaggaagcgagtttttaaaaactgagtcagctcacgccctcggccagggtccccacccgatgcgtggtccccagggcgccctcgggatcgcacgcccgagtcccggcccaggtggggcccattccgggttcttgcgcgcgggcaatggatgggggcgcgctgcaccgggagcctgccctgctgagggctcatccccagctttgccgagaactttcccggcgaggcaccggctggcgttttcccagcctgcgagtggcaggcgggcagccagtctctgctcggatccacggaggcccggagccgccacggagttctggctccggggagtgcaaacccgaagtcggcgcggaagcctctcacccgcggctctgcctccgccccttggagatctgccctcggaactgcgttgctctggcgcccgaactagggtgggctggtttcagccagaccgccaaaaaacgtggatgctaaacacagagggaagagccagctcccattccctctctgagccttagatttttttgaattccgagagaggtcaggccggggtccccttcttgggtgagcgtccagccctttgaagttcaaacactgagaagccgataggcagctggctggcgtcacaggatcgagccgaggactgaaggcgcctcctaccgggaatccaccgcctccagacgaaaataggctgcaatcaagttcacttccaaaggcggaattcatgggtacatatggtgtccacgtgtgtacacctgcagagttgtaacatgcgggcatttctcccctcagcccgccattctggcttcttaacttgcaccctaacagctcgacagaaccttggcgtccacaaaaaggcaagtttgggtctgccttatgatttgggggtgggaaggcatttggggaaacagtctccatgtctatgacagcaactgctattcctcacatccttgctatgaaccaggggcggggttaccacccacatcccctgaaccatctcatttaatcctcataacctaggaggcggttatttgttatgcccactttatagaagagaaggctgaggcttaaggaggtgaggtcattttgcccagtgaaaacacagctgggaagtatcaggatctagacccaagatgatccactccagagcttctgctctccctcccatagcataattcctcctgtctgcacatactctccaccctgagagaatgttcaccttgcctggccacctgcaaatgcggaataaacatttgttggatgaatgaaagccctaaataataacccatgattttagtgaatagggaggaccctttgtgtaggcaggtacctataataatatgctcccatttaagagctgtgcgtattcatcccaaagtttagacaatgcatgtggggaccttcccaggctccaaaggagtgacaggaaacagtcacgtagctctcagataagaccaggaatctggttttcatttgactctgcaagatggactttggagaggcctggggtgggggcggggggtgatcatgtcagaacagctgtcccagctcctaatctgaagacaaagagctgctgtacttttccatgccagggtcatcccagacccgccccactctgctgcagactcaactgggcaggtcttgtttatcacaggatatcatcttcagagtgttccatttaagcaggctcaccctggctgatctggggagagactgacgaaattctcaggcaaagctgaggcccaggcaaaactgaagaagctaccaaaggaagcatgcctctccttatcctcctctcctccacagccctctccctctacatggttagtttctctgaatcttccctaccatttattgaaccctgtgtttcacgtgcactgcatacattgtgttctttggttttcaaaacagccctagaaggaagattctattattctagtttttcagatgaggctgttaagactcagagaagttaggtacctggatctgctagcaagtgacaaagtatttgaatctggggtctttgcagggcccttgctctaaatcactaagctaggaacccccttctgtgataggcagaataatggctgcccaaagatgttcacaacctgatccccagaactggttactttacgtggcaaaagggactttgcagatgggatcaagttaaagatgttgggacggggaggttatccttgattttcctggtgggtccaatgttgtcaaaagggttcctacaagagggaagcgggagggtcagagttagagagggagatgtggtgatagaagtagagatcagaatgatacagttgctggacaagggtcagtagccaaggaatgtgggcagcctctaggagctagaaaaggaaaggaatggagtgtcagccagagcatccagaaggagctcttggcatccacaaaaaggcaagtttgggtctgccttatgatttgaaggtgggaaggcatttgcagatccgttttggacatctgacctccagaactgtaagaagatagttcactgtgttgttctaagccatgaagtttgggtcaatttgtcacagcagcgggaggaaactaatacatcctgcaaactcagtcacctaggcagatgttcac

SEQ ID NO: 2239 - DNA, 4001 bp, Homo sapiens
gtgtgcctcactgtcccagcctgggttggggggcaacaggcaaaggcgtggggctggagaaggaaaagagttttcctggcccagtcacagaaacagccccagtcatttctgccacgacacctgacaccacccattgcccagctcagggctaggaatgccagcctgaaacctggactgggtacaggccggggaccacacgctcgcccttcctgcttgcactgggggttggctgcccaagggttcctcccagagccctggagtcccagagtccttcccacataggcagagaccacttaaatacaaactttattctctctccaagaagatgcagacgtcacaggtggccctgagctcccacccgaggcttaggcccaaggggcctcttccaggctgagggcctgctggggctgggccaggggctgaggctgaaagcagcagcctgcctagtgggtgacgccaggggccggtgtaacatggcaccgaggttggggccacagcaatgtgtgggacggtggggtgggctggggcccttggctccaagcattagttctccaagctctggtccgttctcctacctccttcaaggggcaccagggctacaaggtggtagttgagtattggggcccgactcctggggcactggagtggtctctaggcccgaggccccaaggagagggctgggtttctgggagagtgctggtccttcctctctgggcttggccatcttgacagcttcatcgtaggagggtggaggctccggggtgtacaggctgtaggcaggaggagccatggagtccaggtccagctccccaaagggcaggggcaaccgcatgcccagtgggtactgcacggagctgtaggctgcagggaaccagagtgggttcgtggaggcgggcttggcatttacccccgccatctccaccctcaactggcgggcccctaggcactcacaggtcacagtgctgtgtacagggctgtcactgtccatagggatgactgccacgtcgcagggctgccgtgctggtggcagatgtggctgggcctgtgcctgcttccggaggcagcagaaccggacacaaccagctgtgacaccacacagcagaagcaggaggaccgccagcaggatgagcctaggagagcaaggctctaccactggactgaccctcggccaccgggcacctgcaccctggggaatgtcgtggcacaaccaccgaagacaggttaacaggataaaaagcagacaatgtctctccatgtcggagaccgccgtggccagagcctggcctcgggctgctgggcctgccctggctatctctcctgggctggccaggggtggccttgggctcactcccaggactcgctgtcctcagcgagtgccccactgctgagcgggatcgtaggggactcccgcggaggccaggcgggagaggtgggagggaaggtcctgcttgctccaggtcagttcccgccagcggccgggactgggcgacagcggaggcggcctggtgaggtaagggcctggcgggcctggccccggtgacccccgccccagaaccgtcggacgcacggctccgccgcggcctccacttaccccacgtgccacaggctgctccagcgggcctggggcgggcacctgtggggacggcggcacctggagcaggcggggcatgggacggccgacctcgccacccgtgcctccccatagggcggggccaggccccggctccctcccccccgacttactggtccgaggggtcgcagctgccgtccgcgaagcccagcgccacctgtggggacaagggtgagcccgggaggggcgtggtccgagcagggacccgccccgcggtggccgaaccgagagagaacgccgcccgacccacctgcggcagcggcaggagcggcaggagcggcaggagcggcagcagcagccgcagtccgcgggcggccagcggcccccgggccatgctctgaggaggttggagcaaagcccggcggcgcggctttatggggccccgcccaccacaggacacacccaccacatgacacgcccacagaacgcccgctcagagtaaaccccgcccaccgggccccgctggccgcaggccccgcccacaggcgcacacgcctactggacgccccacgcagggtaaaccccgccctccgggcaccgcccagagcaaaccgcgttcgtcgcaggcctcgcccacaggacgcctcacgcagcataaaccccgcccactgggccccgcccagtgcaagccttgttcgccgcaggccccgcccacaggagccctcgcccacgagacgcccccattcgctgggcctccactcaatgcaaaccccgcccactggccccatgcccaacgtaagcctcgcccaccataccccgctcagcgcaatcccctcccactgggccacgcccaacgtgttcagagggcttgtccgccacaagccctaccccgcagctccacctggcccagactcgtgaggcgacggtgggtctcgtcctcagcccgggcacggcgccttaacctcggccgagcgtggcctgctctgctgctggtctgggcgtggcccggggaccctcgggagctggcctggaaagtcgtggctgccttgggtgtggtccctcgggtccagtctcgcaggcgggctccaggtggactgtagggtaacgccaccaagatgctgggcatcccgaacttggtgtttggacacttgattgtggacctgcgctgcaggcgctgtctgggggctggcccagggggctggagcctggccctggctctgggctgttgaggcgctgggtgcagaccactttcccaaagcacttggccttgggggccatgccccacctggggaatgtgacctccattcccgagggccacagggagcccagtgcccttccctcagcctgcaatgtctgctgctccctgtgcaggggcaggcctggggccatttcttccagggggaccccagacccttatccctctgccaccaggccaggggccctgttaggctcttggtgccctctgctccccgtgggaccaacagcacaccgtctctctggtggtcaggctaagggaggtggtcagcacagcaaggggcagggtccatcttactgcaggaggggcatgcaccccttgctcagaactgttccacatgtgggcgctgctcagtgtcccccacccctaccacaagggcagtgaccctggagggcagggcctcctctgcgtggctcttctgcccatacctgccccttcactgcatcactccttccactgttgggctctgcctgaagttgcctttcacctcccaaggcctgtgccacggtcctcaagggcccttcctgcctgcccagctcccccagcccctggcccttcttcctgccacattgactgcactggtcgtggaggcccagcacgggagtgggaatgggagtgcatgtgcacagcacagcctgaggccacagccccgagttccggaaggtgtgggcacggcccccacgcaggagctgggcgggcctcgccactcagtaccagaggcctgccagcaggagagtcgggtcagggtttagaagagaggggcctattcaggaaacattgccatccagtagcacctcctcctgcggccggggcctggcctggacctggcggaacctgccttcccctcccatctggtgtggcgcaagcttgagccatggtgggtcggccgcaggaagggcagcaagggacccattggacagaaatcctgcaaaacgccactgcggggtcaatgtcactggcttgaagtttggggcaatggcaagttcctaggcactgtgggccctggggggctgggggtgagggcaggcagctcaagaccggcgtccctgaggcctgtgcccaggaaagctcccagaagcaccatctgctcccccgacccggccagggaaggctgcgtacagtctgctggtggctgctggttggggtggcacagtgggtgtgctgcactgacaggag

SEQ ID NO: 2240 - DNA, 4001 bp, Homo sapiens
tctgctagcaatggaatgcactcatgccaacagagggaggcaggacaaaacagtctctgagatttcttccaattctaagacccagcctcctggagcagcaaagggagccatgggatccgccactgcactccggcctgggcgacaggggagactccatctcttaaaaaaaaaaaaagaaaggggggctgagggggaaccacaggggagcaatgcaatggcagcacctgcactgtgccagggacacacatccaaacgctacctcgtaaccctcgcaatcccacgaggaggtaggcactagtactcttcccatttcacagtggaggaatctcaggctcagggaggttcaatagcttgccaaagacatataacttgtaagacatggagctgaaatgtgaaccaggaccacgaggctgccctcctggccgtgcagaaggcagctccaaccctttgcagccgaagactctccaaaggaaataatattaactgacttcatggcttgctgacgccaaaacgtgtccaaagtatttttacatctataaacccaaaagcgctaagccagcagatccagttctagggaaaaacagctggtctggggccatctgttctgcgggagtctaagggctgccctctcctagactccaaccaaagaacatgagatgctacgggagggatctgggaaggctctccttaaggaggtaagttttatggagagcagagtataagatcaaacctttgcattagaaagatcactgtggtagcagtttaagaggctgggctgcaggcagtgagacaggaggcgtgaaggcgatgctggactaatgcaagtgagggacacgctggcctcaggctgatcatacttcaaggcccttctgccagaattcccagagagaccaaactttccactctctggaccccgatctactcacactgtcatggatgcgggcctgctgtcaatcctaattttgtggagaatcctacatgtctttctttaatgtaaggagagaaacaatgctgatcgtaaatgccaattactgaactcactccatgccaggccctttacacaatctccagatggccccaacagccctatgaggaaggttactatccttatcccggttttgcagaggaggaaactgaagttcagagaaggtagcttaccaaaggtaatccagctcctaaaggaaggagtcaggatttcagtcgagttctacccgacggcagagactgcactgttaaccactgccgagaagagtggagagggacggctaagggttctgagtcccgggcttctgcgaggatcggtgaccccgcgagcctccccctccacgccttcgggaaaataataagtgataggctagatgtgggaagcccaatcccaaacaaaggaatcaggagggatccagctttcggcagccttcagctatgagaagtgattaaagggcatggacctgagcaccccggacaggaaagacagaaaaagaggtcccaagcgagcagctgactcgggcagaggcggggctcgccagggaggaacactctggggcgggacttacgaggggcggggctctctgagcctctctaagtctaggacctgccagaccctatgagggggcggcccgagggagggcggggccgcatgaggggcggggctacagctgcgctcgcaacccacaggttcatgaggtcacctccccgcgcctggacccaaccctcattccatactctggctccagcagggctgatccgggatctcgatggtgtagtccagctctgccgaggccatggtgaaggcgccggcccagagcacgggtctccagccggaactcccgcttgcgcacccgtgcctcacccgggcgcctcctgggcgccgcccaatcaccacacacctcccccaacacggcccaatccctgcgccgcgctctgtgacctcccgccttagcaaccaccgagtctcttccagagcctctcgcctcaccccactagctcggccctagcaaccatgccccgcccctattactgacccgcagccattggctaattcgcttgatctggatcaggtattggtcagccggggcgccggtcaggaagagtccccaccctctcatgtaggtgagaggcggctgaagagttgctgtattctgggaatgggcagggtcactcgtccgaacagagtcctatcctacgcggcggaagagtgtgccctttgacttgcatcgtctacctacctctgccatcctctaccagccgcaactgcgagggctggaggtataaaaccgtacaaaacggcctagggggcgcgtgccgacccaacctccacccagtggggttgaggcatattctggatggatggatggatggatggatggatgggtggatgggaagcagtcttcagttgatgactttagagaatgccctgttgatagggcccaccgaggagctgggagtgcaactttcttgcatttatctatatttacatactatgtgccagcatatttacatactatgtgccagagactgggtgggctaaataaggttccttaggccctagtgagaatcaagcttttggccctccctctcccatgtcttaacgggagagggagagaaaccatgcatgaagcaactctgattctgcgtgtgagataaatactacagaagagtaaggatttgaggagctcagaatcagagaaggggcatttatggcagtggggttggctcttgagctgggccttgaaagacttttagagatagggagggggaaagactctttgcatgccaggcgcggtggctcaaactcgtaatcccagcactttggaaggccaagacgggagaatggcttgaaggagttcaagaccagcctgggcaacatagtgagaccttcatctctacaaaattaaaattttaaaaattagccaggcatggtagcgcatgcctgaagtcccagctacttggaaagctgaggtgggaggatcacttgagtcaggaggtcaaagctgcagtaagccatgattgtgccactgcactccagcctgggtgacagagtgagaccctgtctcaaaaaacaaaacaaagagcccagtgtggtgtctcacccctgtaatcccagcactttgggaggctgaggcgggcgtatcacttcaggtcaggagttcgagaccagcctggccaacatggcgaaaccccatctctactaaaaatacaaaaattagccgggcatggtggtgcacacctgtaatcccagctacttgggaggctgaggcaggagaatggcttgaacctgggaggtagaggtggcagtgagccgagattgctccactgcactccagcctgggtgacagagcgcgactctgtctcaaaaaaaaagaaacattagtgcaggaactggattgaggattgggagaaggagggagaccagttaggaggttgtttcagtagtggggaaggattatggtggcacaaagcatggagtggcagctgaaatggaaagggcaggatgaattccttagacacttatagctagaaaaaaatggacttggttactaattgggtgtgggggaagtaagggaaatgaaggatgacttctagattcctggtttgggcaaacaggaaggagaggaagcaggggtttttaggagagggtcagttctgggcacggtgagcttggggtgccaatggaacatccaagtggaggtatccagaaggccattggatatgcctaactggagttcgccagataagtctaactggaagttgcagtgtgggagtctatggggccttatagatgccagccacaccaatagatttgttgagcttgcccagggagtaagtgtagagtcagaagagacctaggacagagccctgagaaacacccaagtttgagggtctggcaaaggaggacgaacctgcaaaggtaatcaagatgaagtgtccaaaatggtaagaagatcagtagtagtatgtggtgtttcagaagccaaggaaggaaagtgttgaaggcttatgac

SEQ ID NO: 2241 - DNA, 4001 bp, Homo sapiens
cggtttggtcatatttaatatacggtagctctgcagctgaaaaaaaaaaaaaaaaagaaaaaaagaggctgggcacagtggtcatgcctctaatcccagcactttgggagggcaaggtgggagaatcacttaaagccaggagttcaagaccagcctgatgaacatagcaagatcccatctctaccaaaaagataaaaataaaaaattaggcaggcatggtggtgcatgcctctagtcccagttattcaggaggctgaggcagaaggatcttctgagcccaggaagtggaggccacagtgagctataatcgtgccattgcactccagcctgggctacagagccagagaccccgtctaaaaaaaatgaaatctctacactggacgctctgggacatctgtctgaagctgtgccaagagacagtccccagggagcaggaagggatggggctattcagtcacagacttgctgtgtgaccatgcaccagcccctcccctctgggccccaagttccacatctataaaatggggaggcattggtccagccagtgtctgagacccctggagactgcaggaccctctggagctgaaccaggtctagcagaagcagagggcagacgatgggctggacaggcaccatgagactggaatagcattgtgaagatggactgccagccaagcaggaaggggcatggcagcttcagcgcaggagcctgacccacctcaccccctccacccacctacctgggagctcggtgtctaccttccagctgagggctggactcaataacaacagcatcccaggaccaagactttggtcaaagaggaggcacggtgccagcatggggctgtgcctggagcactggactgagcctggagcagtccttgactttttaaattaaattgattgagacagggtcttactctgtagcccaggctggagtgcactggcctgatcgtggctcactgaaacctctgcctcctgggctcaggtgatccttccacctcagcctcctgagtagccgggctaaatttttttttctttatttaaattttttgtagagacggatttcactatgttggccaggctagtctctcctggactcaagcgatccgcctgcctcggcctcccagagtgctgcctcccagatgaagcccagctggcttcatttgtcttaccactgtgggagcgcatagcagcgcagccggcaaggtgctaagcgctttactcttagaagctgccctcatcctcatagtagtcctaggaggtgggaactactgtccccctcttacagacaaagaaactgaggctcacaaggtctctcggctagacagcggggatgccccaggactctgctgcccacaagcagcatcaccgtgcccaggcagtggaaggagggggcacattagtcccgctcccccgctgctgatcctttttgcccacggctttccttcctggcctcgggagagtggagagtatgtaagtgggagccccttgtaagggtggggaagctgaggcctggccccggggtcccttctgggtaagatggggctgctctctccagcgtctcctctgccgcccacccgggggtccccgagggcagtcgtgcgcctccgcaggaaaggcaagagagggcgagggtaagagacgctacagccacatcgagaagacacccgcagcgctcctcccctccatttcactgctggggaaactgaggcccagagaggaaagtgacccgaccccggcctcgtagtaagttagaggcagagcaggtggcctggccccctgggggctcgggttccgggctcagtgctccgctcctgtgggagggttggggtggttcggggcctcccgcgcgcccccagtcgctcaccgaggcgcagacacatgtcggctccgcgctggtcccgcccccggcttcagcgcggctcccgaggctgcgggccgccgggggaccctgctcccatcccgctggcccgtcgcccgcgcgccccgcaccgtcgcgctcgcccacttcccgcccggagcccggggctgggcggcgccggaccggcctcccttcccgtcaccccccgggccgcccggccccgcagcgcccccgcggctcgtgcccctcccggccggtcggaccggctgagcagcccatggcccgcccgctgagtcaggcgccgccccgcccggcccgcccggcgccgagccgccctccctcagcccaccggcggcggcgggcccgctctagaaagggaaactgaggctctgaggagccgccccgcgcgggcccgcggcaagttgggggttgccggcgtagctgtggttaccgtgacttgggtgtggctcttgggcggaaagcccccgggcccaaggctgggacggagaggggcagcaggggcagtgaaagagctgctggggattggggtctgcccctgcctgctgtgtgacctcaggcaaatcgcctcccctctctgcgcttgcctttagcgcccgcgagtcttgtcttccacgctgaaaaaggcgctttaagtctccttcttagtcgggagggccttcagttccgtccttggaaaatcagggataattcctgtccccgaaggtcgtggtgagacaaaataggatacaaaaattaggtaagaaagcgctttcggccgggcgcggcggctcatgcctgtaatctcagcactttggaaggcctaggcaagcagatcacctgaggtcaggagttcgagacctgcctggccatcatggtgaaacacccccgcacccccccccccgccccgtctctactaaaaatacaaaaattagccggatgtggtggggcaagcctgtaatcccagctactctggaggctgaggcaggagaatcgcttgaacccgggaggcagaggttacagtgagctgagatctcgccactccatctcaaaacaacaaaacaacaacaacacgctttggaaactctccagactgtctgtatggacaaagtgtagacctagcaagagcacatagtaggagctttattagtactgctctgggttgctgagccctttaatgtgtcaggatggaccccagtgaggtcccttgttagtctcagcatccctttggcataggtaccattcctgcacctttgggctcagagaccacagaccactcacccaagaccaccagctggaagtggtggagtaggcaggagcctggaatccccttgggtctctgtgcccaagttctgtagagtggccacaccgtggccacctccctgggctctttcggtccttggaggcacttactatgggaactgggcaacatctgttcacagcttgccccacttaccccactgggcagtgtcccagaggtcaggggctggctggctgtctctgggtgcttggttggagcctgtcctgggggctgtccactgtctgtgtgtctttctgcacacctgtgctgacacctgcggcgctgtgtgtgttgggcagttgggtcagatgtagagcctctggagtttggagaacgcattaacaccatgggaggaagtggagccatttctcctaggaagccccccggggcatcccatctggtaaccccccagcagagctgcttccctgtcacctgctgtctgaagggggataatgtgcagggaattccgggtggggagacatatttgtcaggtggaagggaagatgggggcagtttatgaagacatcgggctggcatcggaatgttgatgtcctcagacaatcttttagtagggcaatttgggtagtacttactcatattataaatgttcagacacttgtggccgggtgcggtggctcatgcctgtaatcccaacactttgggaggccaaggtgggcggatcacgaggtcaggagatcgagaccatcctggctaacacgatgaaaccccgtctctactaaaaatacaaaaaaaaaaaaaaaaaaaaaaaaattagccggcgtgttgacgggcgcctgtagtctcagctactcaggaggctgaggcaggagaatggcgtga

SEQ ID NO: 2242 - DNA, 4001 bp, Homo sapiens
atgaatttacccagtggagatttcagaaaatcaaggaaaagacaggccaactcttgcatctgtactccaggacctattcagaagactccagtgaagacctagcttccctggggtttgcattagtctcagcaccttgagcatgccattcctagttcacctccaagtataaagcattagtagcaaagacccattattctttccaccagggtaaagaaggcttagagtgaaatgaatataaatggaaatctaatactgtaaataaataatgactgattgggcagctgggtcagaggcatccagcctaaacagataaaattcatctcaaggatgaggacagtaaagattcaaactccagagggaggtaatgggacaaaaggagttgcaggcgtagaaaaaaaaagaagcaccctcaaaatattctctgggttatcagatggcacaggaggggcgtggcaaataaactaaaatccatggttcttcacccattctttcatattttctaacacggcgggaatacacttttctaatttcgtttcgcccaatttaaggaaaagataagcaaggataaaaattcctcatatatagcacaattaaaagggagctgggattctctaacttattaccttaatcggctacacaaagatgaagctacatttcaatcgacaccatgcgctggcacgggagtaactcacttaaaacaccacaatccaaggtcaatttttctcaactccatttatgactgcgtaaagattttattaaatcttttttcctatttcacacatcaattcctagggtccacacaaactcttccatcttctccaaactggtatttggattaaacattatccaagatcagtctttaaagtaaatttcataatttcatataaaagtgtgcaccacattaacactcaaatgtgtgtacaattaaaaatatacagaccagcaacagcgactcttaaatgaatttagactcaaagtgttttcacagaggtttttctgccgtcttggaggggtaggaaactgctggcattacgaatcccatttcatggctgggtaaaccgaggcacttaggggttacagaggtaaagatggaaatagaaaccaatttctccctccgactctacgcctggtcccttcccactagacttttcagcactcagtggctaaaaatgggacccacttgagaactgcaagggtaaataagagctacttgtttcagaaggtggcggcgggggagggggacttacccacttgatgcgcccgattgtgtgtgggctctaacaagaaagctctccctggatgcccaaaggtttgcacccacccgctttaagctcagacccgagaggcaccgccaggcagacagggcagccggaatcgtgcagcccgagaaacgcgagaggaatgcggggcgcccgggcggcgcgggggccgcgggccccgggacaccatttgctcccggagcgacgccgtggcccgccgggcggggacgatgctgagccttccgcacacacctgccggagcccgcccgggagccccgggccgcctcccgcgcgccggacgcccacccagcctccaggcgcaggagctctcggccgcgctaggccaggggcgggaagccgcggcacccctctccgcgggctgcgcttggcggctggcgcgggggagccgcggggcgaggcaagcccgccttcctccccaaccccccctccaaacggcgtcacctgtgccgggtcccggggcgagtcgcgcgcgggcggcggctgcgccgagccgggagagggcggcgggtgtctacaggagtctgctcatccgggccggcccgagggctggcgctggccagtgccgcccggtgagatgctcacgggagccagggaagccgcgggttccgggccgcttggaggtgcagtcgcggaggctccagctaccgcggcggccgtcgcgcccgcccggactgcgggctcgggttaccgcagagctgctccttaaaggggccgcggccgctcgggctccggctcccgctccgggcggctccgaccctggccaaagtgggcggggccccgaggcgggccgccgagcagaccttcttgccctggaacttgggtcccggaaagagcccaaaaaccctaacacccgaagtcgcagcggagagatcctggaagctcacaccttgccaagggcagagggtgcaattcccgggttttccaaagcaagtcacaaaacttgccagcgggggaactgtgtgagcccgcccccgcagcggtcagtacctgggctagccacgtaacaaaaaatcttcttaaattatgaatttacattctgccttaaatgctcaaatactggggacttcatggttagatcatcagaaaagagatgaaaaggcaactgctggtttttcttgccacgtctgacacggccacactcgagtcccgccagttcttctttggggctgcaggtgcataccaaactggtagggggcgcgtgtagaagaagcgtgttctctccagcaccacctccagaattcctgaaaaacaccctcatgggtgcaccagcactacacctacacccggaacccctctgttgtcggggtgtggaagttggatttgaatatttggtgctggctgagaattccaagttgcctagtagataaagtttgacattaaatagatgttctgacctgttatatacagccccaaaagcctccaagtgatctgcatcaaccagagataattgtctgaaacaaaacaaaataacaaagaggtatactcatgcattataattcgcagagagcaatcacaaggccttttcttgaaaagaggtaagttctaaataaataatttgtaaacactatcattgataacaggatatttatttctaagaaatgtcaatagagctaacatatttgatctactatatacatgcgcagaaagacacacatatctgccgcagatttagaccagaaaatatatacacaaaagctcatataagctgtccatgtttattttcaagagagggcaatagaatttaaatcagaacctggaattctgtcagtttattagagttgtgtgcctttagctaactgaacctcactgaggctcaatttcttcatctttaaaatggtaataataattcatagtgactctgaagacctggactgatgtggaaaagacaaaatctataccacagaacagggagggacagaaacctgccctgcagtcaagcagagagaaagatctttcaggcccccaaatgcgtgttcccctttttctccccaagactctcaggatgtaccagggctccagtgctctttgaaccacacggtgtcccatcatagtcccttcacaatatgtgcagtacctgacaactttggtttgcgcaatagctaccttgtgcactcacatagctatttcataactctctgtgggcaggatggttatatgtgaacatctgtgaagtcagcccagaaaataccaatttcacagtgtcctctcaagagtctgtatcaacactacctcctacagaaactctcccatgctagtctctggtggctgatagtagctctgttctttcctgataaatgcaccatcattatctttgatatgcataattctctaacaccaacagcagtaaccaaagccaggtaaacccacagaaatccactatactctatgtcccactatattccttcatattaggcctctacaaatgcctcatgaaaactgcaagattgtttttgagattgtacagaacatataagttaatatatcaaggacaaggcctgagctatgagaggaattcagtaaatagtagttgaatgttgcaagttttaagctaattaaaactcagtgaccttaggaggtagaagaatacatcaactgtattttttcctgaaaaattcagggtagcttaatctctttaaaaatatccagttcatggctgggtgcagtggctcacgcctgtaatcccagcactttgggaggctgaggcgggcagatcacctgagg

SEQ ID NO: 2243 - DNA, 4001 bp, Homo sapiens
ggtacaagagatctcactgggccttgcaagttggtgctggatgtcagctgggcatctttctccatgtagactcttatcctcaaagaggctagccagccaggcatggtgtaatcccaaaaccttgggaggccaaggtaggaggatcacttgagcccagaagttaaagaccggcctgggaaacagtgagactccatctctaccaaaaaaaaaaaaaatgcaattagccagatgtgagggcatgcacttttagtcccagctacttgggaggctgaggtgggaggattgcttgagccacagaggttgaggctgcagtgagccatgatggcaccaatgcactccaacctgggtgacagagtgagaccttgtatcagaaaaaagggaggtgcttagcccaagtttcttcacatgatgacaggaactttccaagagactgagagcaaggcttcttaaggtccaggctcaaaattcccatatcattattttttatgcatttttttggtcaaaacaagtcataggccaacccggacacaatgaagtaaaggtctggagtccatctcttaatgagaaaaacagaaaagtcacattgcacagggtcatatataaagggatgggacaagattatgactatttattgcaatctaccacagaagagatatgtggttaaggtaaaaggaaataatttcagtttgggacatgttatagttgaagtctctcctgtggtaaattcatgcaaaggtatccagtatttggataacatatatgtgtctagaacatagaagagaatcctggttggacatacgaatttcggaattgtcaatatgcaggtaataggtttctgaataaacagatcaatactcccaaaaagactgcattacatgaaggtgaaggctaacaaagagatatagtcaatcccttgggacacccaaacatctgagtggactcttcttcacatacagctcaatctccctctctacctgtggtcctatctactttctgcagccagctcaaggtcagtacctctgggggaagtacagcctactctgatacatccagatatgactgcttacagtccgatgacccataacataaaagaaagatactcaatccccactttcaacccaatatgcaaggttagaacagaaacagaattaaccacaataaaaacttccatttgaaaaataaaagaatggaaacctgacacaatcagtagtccttaattgcttgttcgtttgttttctttccaagcagaaatctctccactggccatgaaagaaattccttgattagcctcatctgggcccctgggttcaccctctgggaggttcttccttgtgcattattcttcaggttaaaaattgaagtggatgttggagaatatgttttcctagagactgccttaggatatgaacaatgactggcatttccaagtcagatttgtggtttctttagcaatagaatttcttcaaaaacttagtacaaggccaagtgtggtgactcacacctgtaatcccagcactctgggaggctgaggtgggcagatcacctgaggtcaggagttcaagaccagcctgtccaacatggggaaaccctgtctctactaaaaatacaaaaagtagctgggcatggtggcactcacttgtaatcccagctacttgggaggctgaggcacaagactcacttgaacccaggagacagaagttgccgtgagccaaggtagtgtgtctggaattggtgggttcttggtcttactgacttgaagaatgaagccgcggaccttcgcggtgagtgttacagctcttaaggtggcgcgtctggagtttgttccttctgatgttcggatgtgttcagagtttcttccttctggtaggttcgtggtcttgctggcttcaggagtgaagctgcagaccttcgcggtgagtgttacagctcataaaagcagtgtagacctaaagagtgagcagtagcaagatttattgcaaagaacgaaagaacaaagcttccacagtgtggaaggggacccgagcgggttgccactgctggctcgggcagcctgcttttattctcttatctggcctcacccacatcctgctgattggtagagcccagtggtctgttttgacaaggcgctgattggtgcgtttacaatccctgagctagacacaaaggttctttacgtccttactagattagctagatacagagtgtggacacaaaggttctccaagtccccaccagagtagctagatacagagtgtcgattggtgcattcacaaaccttgagctagacacagggtgctgattggtgtatttacaatccctgagctagacataaaggttctccacctctccactagattaactagatacagagtgtccacacaaaggttctccaaggccttaccagagtagccagatacagagtgtcgattggtgcattcacaaaccctgagctagacacaaggtgctgactggtgtgtttacaaaccttgagctagatacagagtgccgattggtgtatttacaatccctgagctagacataaacgttctccaaggccccaccagagtagctagatacagagtgtccattggtgcattcacagaccctgagctagacacagggtgctaattggtgtatttacaatctctgagctagacataaaggttctccacgtctccactagactcaggagcccagctggcttcacctagtagatcctgcaccgaggctgcaggtggagctgcctgccagtcctgtgccgtgcacctgcactcctcagcccttaggtggtcgataggactaggcgccgtggagcaagaggcggcgctcatccgggaggcacaggccgcacaggagcccacggaggaggtaggaggctcaggcatggcgggctgcaggtcccaagccctgccccgcaggaaggcagctaaggcccggtgagaaatcgagcgcagcgccggcgggctggcactgctaggggacccagtacaccctccgcagccgctggcccaggtgctaagcccttcattgcccggggccggcaggggtccgccaagcctacgcccacccggaactccagctggcccgcaagcgccccgcgcagccccggttcccgctcgcgcctctccctccacacctccctgcaagctgaaagagacggctctggccttggccagcccagaaaaagggtcccacagtgccgtggtaggctgaaaagctcctcaagtgccgccaaagtaggagcccaggcagacgaggcgccgagagcgagcgagggctgtgaggacttccagcatgctgtcaccgttcagtagcgccattgcagtctagcctgggcgacagtgcaagactccatctcaaaaacaaacaaacaaaaatgtagtacagtagtccccccttattggcagaggatatgtctcaagacaatggattcctgaaaccacaatggtactgaaccccattgccatcaatcagaacatgtttagatgtctgccacccacaaatttaatgcctttttcattataacaagacattaatcacacactgtggctgtaacttttgcaatttgaggtgccataacaaaactaacatgaatttttttccttcttcacaatctcatggacagaagattcgttcttactgtagatctttcttaatagtctcagcatacaatttttttcttgccttattaaattgagaaattttgtctttttattaaaaggaagcactttatggcttctctgtgctatctgaatagccagcatcactaatcttgtgctttggggctattattaagtaaaataagtgttacttgaacacaagcactgccataccacaacagtggatcataactgggagggctactaaatgacaaatagttgggtagcatatacaatatggacatgctgtacaaaggcaggattcaccttccaggagggatggctgggatagcataagatttcatcatgctagttataagggtgtacaattaaaaacttatg

SEQ ID NO: 2244 - DNA, 4001 bp, Homo sapiens
tagactgttcagtttactcttctcagccaaactgagtatcccagtttgagatattgaagcccaaacaaatccttaatctgtaggatgtgggactaatttggaaagaagggtggggagagacactgaggtctaaagagtttcttacaaactaaactgcccattttcctctaatacatgcaagaccagctttgagagaggaacatgaacgctgggcctcctttagagcaccaaagaggagagtaaacaggtctgaaaactgttaagacagctgtgcttgactctgaggagccagaaacactctcaaagagaaagagggagaagggcccatcaaacctcaggtacattcccaaacctgcctagaagctgtgccacttcccttttgaaacccagcccctttcccatttctcaattgggaatctagggatcctttacttcctactagttatctggttacagggaggactctccaacacctacaaagccactacttctttctccccagtcttttgcagggaaggctcttaatcagtctaacactcagatttctgatagctccctgctcataagacttcccttggcaatcagatgaatttacccagtggagatttcagaaaatcaaggaaaagacaggccaactcttgcatctgtactccaggacctattcagaagactccagtgaagacctagcttccctggggtttgcattagtctcagcaccttgagcatgccattcctagttcacctccaagtataaagcattagtagcaaagacccattattctttccaccagggtaaagaaggcttagagtgaaatgaatataaatggaaatctaatactgtaaataaataatgactgattgggcagctgggtcagaggcatccagcctaaacagataaaattcatctcaaggatgaggacagtaaagattcaaactccagagggaggtaatgggacaaaaggagttgcaggcgtagaaaaaaaaagaagcaccctcaaaatattctctgggttatcagatggcacaggaggggcgtggcaaataaactaaaatccatggttcttcacccattctttcatattttctaacacggcgggaatacacttttctaatttcgtttcgcccaatttaaggaaaagataagcaaggataaaaattcctcatatatagcacaattaaaagggagctgggattctctaacttattaccttaatcggctacacaaagatgaagctacatttcaatcgacaccatgcgctggcacgggagtaactcacttaaaacaccacaatccaaggtcaatttttctcaactccatttatgactgcgtaaagattttattaaatcttttttcctatttcacacatcaattcctagggtccacacaaactcttccatcttctccaaactggtatttggattaaacattatccaagatcagtctttaaagtaaatttcataatttcatataaaagtgtgcaccacattaacactcaaatgtgtgtacaattaaaaatatacagaccagcaacagcgactcttaaatgaatttagactcaaagtgttttcacagaggtttttctgccgtcttggaggggtaggaaactgctggcattacgaatcccatttcatggctgggtaaaccgaggcacttaggggttacagaggtaaagatggaaatagaaaccaatttctccctccgactctacgcctggtcccttcccactagacttttcagcactcagtggctaaaaatgggacccacttgagaactgcaagggtaaataagagctacttgtttcagaaggtggcggcgggggagggggacttacccacttgatgcgcccgattgtgtgtgggctctaacaagaaagctctccctggatgcccaaaggtttgcacccacccgctttaagctcagacccgagaggcaccgccaggcagacagggcagccggaatcgtgcagcccgagaaacgcgagaggaatgcggggcgcccgggcggcgcgggggccgcgggccccgggacaccatttgctcccggagcgacgccgtggcccgccgggcggggacgatgctgagccttccgcacacacctgccggagcccgcccgggagccccgggccgcctcccgcgcgccggacgcccacccagcctccaggcgcaggagctctcggccgcgctaggccaggggcgggaagccgcggcacccctctccgcgggctgcgcttggcggctggcgcgggggagccgcggggcgaggcaagcccgccttcctccccaaccccccctccaaacggcgtcacctgtgccgggtcccggggcgagtcgcgcgcgggcggcggctgcgccgagccgggagagggcggcgggtgtctacaggagtctgctcatccgggccggcccgagggctggcgctggccagtgccgcccggtgagatgctcacgggagccagggaagccgcgggttccgggccgcttggaggtgcagtcgcggaggctccagctaccgcggcggccgtcgcgcccgcccggactgcgggctcgggttaccgcagagctgctccttaaaggggccgcggccgctcgggctccggctcccgctccgggcggctccgaccctggccaaagtgggcggggccccgaggcgggccgccgagcagaccttcttgccctggaacttgggtcccggaaagagcccaaaaaccctaacacccgaagtcgcagcggagagatcctggaagctcacaccttgccaagggcagagggtgcaattcccgggttttccaaagcaagtcacaaaacttgccagcgggggaactgtgtgagcccgcccccgcagcggtcagtacctgggctagccacgtaacaaaaaatcttcttaaattatgaatttacattctgccttaaatgctcaaatactggggacttcatggttagatcatcagaaaagagatgaaaaggcaactgctggtttttcttgccacgtctgacacggccacactcgagtcccgccagttcttctttggggctgcaggtgcataccaaactggtagggggcgcgtgtagaagaagcgtgttctctccagcaccacctccagaattcctgaaaaacaccctcatgggtgcaccagcactacacctacacccggaacccctctgttgtcggggtgtggaagttggatttgaatatttggtgctggctgagaattccaagttgcctagtagataaagtttgacattaaatagatgttctgacctgttatatacagccccaaaagcctccaagtgatctgcatcaaccagagataattgtctgaaacaaaacaaaataacaaagaggtatactcatgcattataattcgcagagagcaatcacaaggccttttcttgaaaagaggtaagttctaaataaataatttgtaaacactatcattgataacaggatatttatttctaagaaatgtcaatagagctaacatatttgatctactatatacatgcgcagaaagacacacatatctgccgcagatttagaccagaaaatatatacacaaaagctcatataagctgtccatgtttattttcaagagagggcaatagaatttaaatcagaacctggaattctgtcagtttattagagttgtgtgcctttagctaactgaacctcactgaggctcaatttcttcatctttaaaatggtaataataattcatagtgactctgaagacctggactgatgtggaaaagacaaaatctataccacagaacagggagggacagaaacctgccctgcagtcaagcagagagaaagatctttcaggcccccaaatgcgtgttcccctttttctccccaagactctcaggatgtaccagggctccagtgctctttgaaccacacggtgtcccatcatagtcccttcacaatatgtgcagtacctgacaactttggtttgcgcaatagctaccttgtgcactcacatagctatttcataactctc

SEQ ID NO: 2245 - DNA, 4001 bp, Homo sapiens
agcagaaaacacgtaaacaatatgggactctcaatcttcttgctataaatggaggtacatcatcttatgttactgtaaatagcagctattcaaatgccacagttgtgctaagtctaccaactcggtttaatatccctttcctatttttatgttaccattaatgttaagttggtcaaatatttttcaatagccaaaggggaaaaactttctttaattcaagaatgtatagtgtatgtaacgtgaattgaagagacctttcctccatctatgtgtagaaaaaattgtttgctttcacagttcaagttaaaatggtcaagttcgattcatccagcatagattagagtctgttttactcactgctctatcttcactgattagaaatgttcctggcacatagtatatataactgatgaatgaatgaattactcctatgctctatggctcattttataagaatatacccaagaaatttttactttgattccttaatgcttttaaacttgaagaaaatccccagtgtttacatcagtcagctgcttgtggaaagcaatcattccacatctgtaaacaagagcatgtgcaaggtgtacagttatgttaagacaacttgggtgtcatcagctacctcacatatttcttgaaatcccacagctagagaagctaattgtaaaacaccatgaggactcaattaagcctacatccacatgctgagaattcttctttgtaaactaattacttctccaccgaaatctgtatcaaggcaaataccatttacaagtaacattctgagaagaaccagaaaataacagtcgtacacaaatcgacttggggaagctatgatagtaagttgccccatgaacctgttgtctttctctaccggtggactgaattcaatttctatttaaagggacactgcttttcttgcggatgaaaaaaaaaaaaaagagtttggagaaaatccctttttaaaaacgttcaaagcaagctatctgcttggaattgtcaaaacaatatttgctgaaaaactggtcatcagacccttccgaatctggagcagggccacagggcatgatttgggggtatcagcttcagccctgggtgccaagtttgagatcccatatgggaagcagaaggtgaaagaagtgacagcatggccccaggccagtatgctggcagcttgggggaacgaggggccacagtgggctctcaactttgtcagcctcccccacccccccgcgctgtggtccacgcgcctcctggctccggccggcaagcccccaggccaccggggggctcgggggccagcggcggccagtcagaggtcccggaagcggccctcccggcccagcggcatggccgggatgctgaggaacgccgggctggttgggggctctccgcccctccccccggcgggcccggcgcttccaacggcggcgcggcggctccctcagccagcgcccgccgcgccctgcccgcccggccgggccgaccctcgccacgccccgcgcacccggggcggaccccggcgggcgggccagcggctccggggccagcgctccttaggagagcccccggcgcgggcgtgcggcctactcggggttacataacggggccaggcccctcggagctggagggggaccgcagggcccgcgcccgcggagtgggggtgcagccgctcacctgccgtaaatgccctcggtgatccggttccgctttagggggcggcggagcttactgcagtcggcgttccgccgcttcatcctcccgctggggggccgggtgcccgcgccgccgccgccgtctctcacctcagctgccgccgccgctggcccgccccgcgtcgggcctggactctacccctgaggccggtcacacagacatggagccagcacccggggggagggggtagcacggggagggggggctcggagcctcctccgccttcggaaacaaagaaatgacaattccggggcccgcccgcccagcaccagccagccgcctgccccgcctcctcggctccgacggacggcccgggaggccaatagaagccaccggtaaaccgctgtcggccaatcccagggcccgctgaggcaaaactgactctagaacccgcccctttgaaggacggaagaatgcgccaatcattatagtgtctgggtccccggctgagcctatcagaaaagatttaaatagaggcttataaataggccctataaatataacatcctatattacgccttgttgcgaaggtatgctttattattattgggttgcgtttcattgtattgtaatccctactagagcataccgtacggcatggcattgtaggctctcgtctagcaatgtatgaaatcggaaggcccgggtttgcggcatgtgcggtgtctgcgctgacgtgcgcttcagccagtcgcgtcattatgtaagggagcatcccaggaacagcgccggggacccttctgcggatgctggagagctcggccaggccgaccgcgtcagcgcgcaccgggggtacgaatgacaaagcaaaccccacacgcacacagacacacaccctgccagcttcccgcgacgtggtgacagcgcgccggccaatcggaggtggcggccccgccccgggttacgccacggggcggagccgtgggggcgcgcgacgtagcgcagagatgcccggggcgtgtgcggcggtgcggcccgggctccacgtccacaggctgggcagcgctgtgggccccgcgggcgccgagtccgcaggacccgcgagggcactaccgcgaagcatcggcctccgggccgggccgggccggaccgggagcctgctcggcgggtccgggctcctgcaaggcggggacgcggggccggcgacccttcacgcttcgtactcattgagcgccgattttatgccaggcaccgtgctgggtaatttgcgtgtatttgctcatttactccttataactcccctgccacgtacgtatggcaaagtaacacttagaaaagtccgcatggtgtttttttttaagagaaataaaaagaatgtttatcattagagaaaactggggaaaatgtaggaaagtggccgaaaaggaaaaaacaccaatgagtctcatcacattaacacaaatacagttgacattttattgtatttgcttgttttccaattttcccctatggatgataatgttactattgctattaaatagaatagtggtcatactagaatagtagtcatactagaatagtagtcatactgtttttaacataagcatttttacatgttttaatgcagcttttataaatatttctgaaaatattgcagaatgtcctatccagtagctttatcagtgtaatccctcaacgacaatggggcagttagtcttccagtgcatttttaaaacttcccaggaagggctgggcgcggtggctcacgcctgtaatcccagcactttgggaggccgaggcgggtagatcacgaggtcaggagatcggagaccatcctggataacatggtgaaaccccatctctactaaaaatacaaaaaattagctgggcatggtggcgggcacctgtagtcccagctactcgagaggctgaggcaggagagcgagactttgtctcaaaaaaaaaaaaaaaaaaaaaacttcccaggaagtagatgccattttgttttgtcctgggtttcacagaactctctctggcctgtaatcacccctcccttaatcaacatctaccccagggagaaactttacaccaaatgcgttgtcctcaatcatgactctgtgttactttcttctgctcacaaaccttcaaagatctcccagtgcctggaagagaaaacccattctgtttcgaagggcatccagagctggtcacagtggggacccaccctccttttccaggctacgccaggcaagcaaaccgtttttctcactatccttaaatccactgcaaccgatctttcccccttcctgcctctgccccaacacagtatctctgtcagtgcc

SEQ ID NO: 2246 - DNA, 4001 bp, Homo sapiens
aagctttaataaataagtaaaaatagtttatagatataacaccaattgttagaaaatagtggacattattaaagtacctacaacttccaggaaggtatcctttcaaattatttgattattttcccaacattctggtttataccacaaaattgccgagaaaatcccaaaaaaggaaacaaaccctagaacaatagaaagtaagtctcaacccaattccaggccaaatcaatattaatgagcttcttcatacaatcctcttaatgatgagaagtttacaagaggtggagaaaaataacgtggttagaagcagtattcattgatttaagtctgaagttaaaacttctcacttctttctcgattgttacataaatctctggaaaaatttagtacagtcccttctcccacacttttttttgaaaattgataatctccatgcagtttaaaatccagccgtaacaaaatctgagaagtgccggcacttagaacttttcatttcaaagacctgaaaatactcgccaatatggaacatcctaagcttcactggaactgtctccgtagccactccagttttagagagcaaggaggtccagccacaatggttaagcaaatagcatagaggagatgaaggaaaaacgaagaggaaaccaccagcaacatcaacaaaagctctcataaaacaacgtgggggagggcatatactcaaatcatacatgggaaaggtgtggtgggaatcatcaagcaatttagaatgttgagtaaacagagttcttaggctgaaaaaccaacgtgaagagggttaggtatgtaattaaaagaaaggggggaagcatagagaggagggccattcctctctgtaagctgcgaaccccctcctgtccacagtctcatttcttcacccactccacgaattccccgttttctgcactgagtggtcagtttctggtaggcagacacctaattgcctcttctctaacccagtccctcttggcagcgtcttggacacagtaactcaacataggcagacagcattcctgagcgtctcgctactccctgagctgccttcgtgacgctttttataccacagtggaatcgtctacttgtctgactccccgaagactgcgctcctggccccgagaggcgcttagtaaacaagggttatcaatcaatcatttgtggactcgcgtatctgcgcctccctttctacaatccccccttacgctcccttaggtgaggaccccgcattaatcatccatatcctcccctatcctcctccgagtgctcgactcccctgcagcccggcaagctcccagaggaaagggatcgcgtctttctcatctttgtgtcccccagcctatcacagggtagtgcaggacaaacttccggtaatgacagcagaaatggggtgcaggcaggattagggaggaaaacaggagctacacagatgggagacagcgattgaagggccgatttaacagccaggttgccagagccgacatacgtgtggggagccgagaaatgggctgcaagggaagggtcgcagcccgctccggacgggccctaccttagggtaggtgtgcaaggggtaggtcaactgacaggcccggtggcaagacgccgtatcacccaagaccgagtcaaatgcttcagccgaagcggtccccgaacctccggccaaggccatggtcagcagcagcagcggcgggagccccagttgggtcctcacccagaggctccccttcggcgccgccatcttgttcccctctgtcacagcagctcagcttgttgctgttttctcggaagggtttcctcctcctcctggggccagcccccttctccgccccaccgaccgttgcttccgcctccgctgtcacttcagctccgccctcacccgccagaaactgccgcctcctgcctcacctctgggactacgaacttcttctcctaggctggcgtgaggaggggaattcaaccatcgcaagcgttagcgcgaagcggggcctcctgacttcttcccttcgcggggcaggctggggcatgtagttctccgtaggcgggaggcgcacggtgctgtcgggaaagttggtctcggaaaactacagccgccctcagcgcgccttccgcccgcatttcttcgcagtgcattctggggaatgtggttcgctgtggcccagaggcgcgagggccggcggagtttcttcagaggaactaccgccctgggaggaagcgtctgtttagtttcaacacagacgactgggcttgggagcctacgaggttgcagtctggagggcgccaacagcagctaccagggctgcttttcctggtgggtctcacgtcagaccgttgttgggtgcccctacccgggctcctgagtgctgggaacgaggaggatggggtttctccttgttcggggatccagagattacagccgtgggtagggtcctctgaccaccgagcagtttgttctaggggatgctgcgtattgtgagaccctctgctgagttctggaggtggttgtcggttgctgattaccagggcaacccttgggattatggctgtggtgaggtggttgttaagagggcgtcactgagcctaatgtaatcctaaccctttcacagcccaatcttatttggaagagggcttaggtgcacgctctagcggggattccaatattgggccaattcccccaatgttggaatcctcgctagagcgtgcacttctggaagctaggaacctcctaactcaggacgtagactgatgattgattacagtttcaattcttcggaagatctttcttttaaagagaaaatcttacttcctgtcaattccactcgaggccccataattcatgaattcttccagagaactcaattgtgttactttggggaaaaaatatcatggcagtctttagtggggttttagaatctgccctctttcttgaccagaacacgctgcaagcacgtcaaggtagtcggagtcccctaacaatggataaattcgtcattcgaacgcctagaatccagaatagccctcagaagaaagattctggaggaaaggtttacaagcaggccacgattgaatctctgaaggtgagaggggatctggggctagaggaaatgtgcaaaggactgatagcaaggtggtgctagaggttctgttgtggaaagacctatgaattatttcttgttatgcctcctcctcaaagtgtacctgaccactcctcctttgtttcgcccatagctgtacagacttacatttataaatttctgcacacccctgctacacccttgtaattactccggtttacaccatgtgtgctagctcgtaggacaagtccccttcgttgttattcttttgcaaaatgtagtctgttaggaatgttaaagtaccaaatatgattctatatacctaccctgtacaaacttattaaggggtgggctttgatgctgttctctcacatctgtcacactgcccagaactgtatcaaacagctttacagcttcagctgagactgggaaagaggctgtttttttgttgtcgttgttgttgtttttgtttttcagacagggtctcactctgtcacccagactgcagtacagtggcacgatcttgactcactgcaacctccacctcccggcttcatatgatcctcctgcctcagcctcccaagtagctgggattacagatgcctggctattttttgtttttagtagagatggggtttcaccatgttggccaggctggtcttgaactcctgacctcaaaatgatccacccgcctcttgtctcccaaagtgctgagattacaggcatgagccactgtgcccagctggaaagaggctgttttaatgagctcttgctacattgaagtcagtctgatgtctgcaagcaagatgcaaagagtagatacaatgtatcaatcaacatagttacccaataaatgctaaagtaattattttactaaaacaaaacaaaacaacttgtacttagtcccctttgtcatcc

SEQ ID NO: 2247 - DNA, 4001 bp, Homo sapiens
caggtctagtctgagtcaaatccctgtctgtgtgtacagctaggtctatcagtattttttaatatagaaagttgagaccacgctgcaaatagatgtacttgtctttggcacgggcagctctcactctttagaatgcatggccctccttcccagcttaactcctcccgggcctcagactagcccctgcaactgccctttgcgtgttctcacatggggtcggggtcattttctgtgtgggtctcgctccttccatgtggatcccccacagcaggcagggcacatgctaacctgccatcctgggggacggttggggtggagaaggtcaatgtccactggatgaagggcagcctgttccattgtgcagtggttgttttccttattattataggtcagggatgtcactatcagcaggctgttctcacccaaactcctttcacctggaccctctactagacctgtgctccttccacctggagcgccctctgcttacatccaggactctcattgcaccccttcccagaaggctgtctacagaagctgcccccacctccctccagccagaggagggttttccgggaatcagatgcatccattgatcaccccctctgactacagtggtcattccctgttagctctgtgaccacccagcatctctgagttcaaatccctgcctgcaaggggaaagcaggtaatgaaaatgagatggcaagacggcaggctgtaagtgaggcacagggacacaaggctggaccgaggatgcaccctgctctgacactggcaggatccagcttctccacgccttagtgtcctccctgtaaatgggcacaataataccatattgcttctcagaatgagaatatattaaaataaaatttattcttattatgattatttttatttccacagcagtgctcagcacctgtccctgcccttcatcttgccctatctgctcactggtggcagggccagcctgaatctatcatctgccccctggcaagggggcagcatcttcagtaaaagtctagtagaaaggccctgctcctgtcaggagagtccggaggacagagcctccctcctgcacccactcctgcacaaagccaggatggaacgccatgccattctccgtgccctactccataccaataagggcatttttgttttgttttgttttgtttgagattccatcttgctctgttgcccaggctggagggcagtcctgcgatctcggctcattgcaccctctgcctcctgagttcaagtgattctcctgcctcagcttcctaagcagctaggattacaagcgcccgccaccatgcccggctaatttttgtatttttagtagagacagggtttcatcatgttgcccaggctggtctcgaactcctgacctcaagttatcagcccgcctcggcctcccaaagtgctgggattacaggcgtgagccaccgcaccaggccccaataagggcactttagatgccgctttctgtaaagacgaaactgtccgaacaagaatttgttcttgttccccaattgaggccctgagtgccatggcctcaagccacccagcaagataaaacccaggcagagccccgggtgtccacactgcccaccaagccacggtgaccgaggttaggggaaggggtcggggcaaggtcgacgacagaaggggctgagtgcccgtaaaggagggagaaggccgtttccacccacctggggcagggccatcgggaggcgggcagcaggcgctgtccaggcgcgcagggagccgggcgcaggtgaaggtgtggtggtggaggacgccagggctgagcgaccctaccagcggcgaccctcgggtctgcaggaggcgcgggtgttaggggcggaggggcctggccgctgcccccgagccctgctccccagcccgcaaaaccgaggtctggctcctgggccctcccagggctcaccagccgcgccctctccgccgcccgcacccggtgcgcagggaccgagccaggcctcaccccggcgcccgccccgagggctgcgcgctccccgcggggctctgaggctgccgtggggcgcccaggggagcgcgggacccgggcctcgccctccactccggtggtgacgcccgccccacctctcctccgcgtcctcgggcagctccaggtgtccagcgctgtcgcccagcccgccccgcccgtccttaaagcgccagcacgattgggctggcggggactggggcttgccagcgcggcggggcccgaggagccgcggggctgctgctgaccggaacgccttggcgcggatcggaaccttgggtcctgggggccgtcacgcccccgcgagcgctccagggcgggcttggaaatggagacaaactcctccgagccgttaaggctcagccggacagggcttaggagtcccgagcccagtcctgttcacccccattttatagaaagggaaactgaggcccagacaggggaaagtcacttgccgaggtgtttgctgcagactgcgttgaccgaacctgctttttcacagcagtcagacagcaagccctcccgtccctccaggaccctagttcctggggaggaaggcgttctcagcgataatgaccagcattaaagtgctccccgttaccggcgtcactgccccagccagtggaggccccggagagggactgaagatgtgtcacctaacttctctgaaccttcctccctcaaggagaactgataatccctaactcacagttctgtgaggattgaatgccttaagcatgcaggttaagtggctactgaaggcagtttttgtggacaggtgatttgggagcctggaggaagggttacgtgcgcgcgcgtgtgtgcgtgtgtgtgtgcgtgtgtgtaagaatctttccgtgagaggacatctgaggtgccttaggagagtaggagtggacaacagcatccaggcagaaggagcagcatgtaggtgaagtcacaggctggtgagatcctgacaagttcatgtgggccaagggaagccatttccagaaccagctggggtctgggttttgttcttgccctttcctgctactccagcaagccgggggactggggccagcttgccactggcatggcctagattccccagtgagctgggggtgactaactctcttcccagcccaaggatagaaggtggagcagcctggccggcagggatctgaagcccagagagaggaagccactggctccaagtcacagagcaggtcagcggcagggccctgggcccccaaactctgtctctgaagaaatatcccaccaggaaactaaggctcagagaagggcacaggcctgtgtgtgcaaggctacagagccgagacaaggaccaggcagacttcctttgactttcagtctgtaggtgggaccaaggccgctggcagccctctttgcacccttgtaggcacaggggagatatgaatgggaagctggaggccacagagcttttggctccactcatttccacagggcaggcatctgtgtgtgttgtgggcccctcactggtcaaaatggaccctcccagccctgcctgtgtagtcccagaagtgagtcacaggttgctgatgttggggtccaggcctggacaggctgatgttgctagcacacccctcgggccctgcttcaacctgaatccctgggccaggctggaagctcaggccctggaactggacaagtcacggttccttcctgccttagccactttcagaccagaagactggccacatctttatctgtaaaatagagacaatggcacctccttcctagaatagctattggggtttagtaagaccttagcctgaggagctggccagggtatgtcctcacatgacacaatggctctatttgtgaatctcccctagtttatggggacctcctgagtgcagggaccaggtgtcacttggctcaggacccagccggatgcagtacagctgggaccagaaggggctgggcctgggtgctaattgaaatccaggaa

SEQ ID NO: 2248 - DNA, 4001 bp, Homo sapiens
cccatgtgcaggcaagcgtctgattgtggccagtgggagagggctaaatccaacagctggtctaaatttgccaaagtaaactacctatgctaatccactgccagtctccattggcagcaaggactggcctggtggtcaacttgacaagctctagaaataccagcagaatgttgcaggaagtatatggatattgttcgttcttgcaagaaggcccgtacaaattcagggtaattttatcatcaccaaatctttcaatcctgtgatgacaatagcgaaactacaagcagctccaggccttctgcctcaggagctaactctggtctttcagatgcagaataaggttgcaaagtaaagtacaaacttctccttatggcaacaccaaacaggacccagtaacctggacaactgtttacctcctaccctggagcacaaaggaaatgacacagcccctggctgaaaccagaggcagtgtggctcagggattatgtgagcaggctctggagttagggtctcagcaccacgcagttcagacaagcagcctaaccactctgtgccttggcttccttcgccaggaaatgcgagtgatgactttctctcacggagctgttgggaggcacagatcccaaacaacacctgtaaagcacttagcccaggacccggccctagcaagcaattagaagctgtctgcctttattttaagtcgcccctccagctaatgggaaacacaagggcaggatcccacctgacgtcttctctgttagagcccaacgaacagctaggagagacctttgcccccacactaaacaaaggagaggggcgtgtgaagggaaaaggagcctcggcttccgttcatatcccccttgaaggcacagcagacttgaggatgacctgagaggtgtcaagggagggtcagtgggtccgccacgctgtccacccctgcccttgaagaggacaccacctgcctggggctgaatgaccaaggcccctccagggcctcaggtagctagtcttatcaggtgctggaacctttgcggatttggtttcttagcagagctcgcctcaccctttccgcccccgcccttccccccagtccccgagtccccagcctccctcctcaggactccgccaaggctgcaggaagtggtcacccaggaacagcccgaggggtggcctctgccttcctggcgtcaggagagtcggacgcttggccctttcccagcccggcctcgtatagggtccgaggagcccatagctgcactcctagttaggtgggaggtcggactccgccgacaaatcccaaagagaggggtggggaagaaggagataccagccctgaaagcgaaaagccggagaggaaagtcctgaaaagccgccaggaattcccaaggagcgcagggctggaatggaggcgctgcccggaccctctcctcccacccaatcccgcgtcgtcaccccctgcttggggtcgggggctctggggtctgcgtaggctgggagccgttccggaaccggacacctggcgcgcacgtcccgggaaaggcggagggtgcattgcccctcctcacgccccctgtcccctgtacctgcggcggcggcgtgtctggcgggacccagcagcgcggggcgtgttccgaccacttaaaagttacaaagtgaaactccggcgcctcctgcacatgcgcagagctgcggccacccctttcccaatttggagtcttggcccgcggcggcgcaagcctgtacgcagctgactgcgcctcccgcggtggccctcggcggtcctctgccccggcctggcctcctggtcgccgctcagccccgcagctcctcccggaggtctgcaagccccggaccggccagctcacgtccaggctccaagaagggatccgccggggcgcaccctcttccgtcccccggcacgagcccagtctctggacgcctccgggagaactgggccaagcacagggtggtcgcggcgcagggagagcatctgcaaacgttggtccctgtagtgctttgaatttccccgaagagctcttagacccgccccgggagagtggggttgcgggggtggtagcatggggagctcagcaggattcagcccgcacctcggctccgggtagtcgggaaccgcgcggagcgccctgcaagaggccacggctcccccgccgctgtagaaggccggaccgtgaaagcccggagggtctccgttcgggcaaaaatgtgggggcgggtcgcagcatttccaacgccccctggggctagtccattactgctcgagccagggccgccaagggcacctactccagcccaggtccgagagcgcggcatgcctcccggccgggagccaaatgtttccagggagccggtggcctccacaaccggaccgcaagctcgcgagggcagggccggcccgccgcgccagggactgctgggcgctgcgcgggaagcgaggctgggttcggggaggaccgcgcgccctgggaatcaaggagcaaaccaacccgtccgcaggcccctgtttccctatctgtgaaatgagtggttggaccaaagcttcctctcaggtcccttccagcacccctctctgagctctgagcagtcctcaccccacatgcatgcctttgcaggttctccgacctcccttccatttctgagctttcatctttttctgtaacggcataaaaatatcctccttatggccgggcgcggtggctcatgcctgtaataccagcactttgggaggccgaggtgggcggatcaccttaggtctggagttcgagaccagcctgacccgcatggagaaaccccgtctctactaaaaatacaaaattagccgggtgtggtggcacatgcctgtaatcccagctactagggagtctgaggcaggagaatcgcttgaacctgggaggcggaggttgcggtgagctgagatttcaccattgaactccagcctgggcaacaagagcgaaactctgtctcaaaaaaaaaaaaaaaaaaaaaaaaattcctccttacctccctgtccctgattctagcgccagtctgtggctgtccaggagtggggtggggagggtctcttcctgcctctctcagttcttttctgtcccatctgtctttccccttctctccccaaagctctagccactagttattttccagggtttttcctctatgccccccgccagtatcatctctgcccttgtccctccatagctgcgcctggccatcccccctccctgctctcttacctccacatctgacggtctgcagagtcctgggtgtggcccctggactccccgttggctccttagactgtccctgtccaatctttcttccactccccactcccgcacctgcctgtcctccttccttcctcaatgaatggtgcccccacctgtctggtctgtgccatgggtccaggcaagtgcaaggttccggtcttggtaattagaatgctggagccactgacaaagatttcagagagagaaaggatttctaaatttgttcttgagtaggttaaggttatttcaaaatcaagagaaggccttgatggatcgatatgtgagttgagatagccacagcctttgttatgtcagttgtgtgaagtgcttgtaaaatcactattttattttttaatttttaattaattatttacttattgagacacagtctcactctgtcgcccaggctgtagtacagtggtgtgatctcagctcactgcaacctccacctcctggcttcaagcgattctcctgcctcagcctcccaagtagctgggattataggcatgtgccaccacacccggctaattttgtacttttagtagagacggggtttctctatgttggtcaggctggtctcaaactcccaacctcaggtgatcctcaggattatagacgtgagccaccgcgcccagctgcacagctcttacagctataaattccagatcctctgaagctttattttcttctctaagtatagatgataattttgatcac

SEQ ID NO: 2249 - DNA, 4001 bp, Homo sapiens
actgagagagaatagcctgttggagtgcagactttggtgtcaaacttggttggaatcctggctccactacttattagctgtgtgtctttgaacaaattatttaatcttgttatggtgcagttcattcacctttgaaatatggatactaattcatagggttgatgtaacatttttttttttggatacagggtctcgctctgtcacccaatctggactgcagtggcgtgctctccgctgtctgcagccttgacctcccgggatcgagggatcttaccacctcagccctctaaggagctgggactacaggccacgccaccatgcccagccaatttttttttgagacggagtcttgctctgtcgcccagggtggagtgcagtggtgccatctcagctcactgcaagcttcgcctcccaggttcatgccattctcctgcctcagcctcctgagtagctgggactacaggcatatgccaccacgcccagctcattttttgtatttttagtagagacggagtttcaccatgttaggatggtctcgatctcctgacctcgtgatccgcctgctttggcctcccaaagtgctgggattacaggcattaggcaccgtgcctggccccaatttttgtattttttgtatagaaggggttttgccatattgctcaggctggtcttgaactcctgagctcaagcaatccacctgcctcggcctcccaaagtgctgggattgcaggtgtgtgccacttagcctgatataacacttaataagttactacatgtaaatagctgagaaccgtccctgacacaaagcactttacacaggagggactgattaaaaactctaatgtaagcagccagtaaaaacaggtgaatgataatatggatctagatctgacaatttcattcttaaccaagagaatgggatgtctaaaaaaacctacagttgctgcttaattttaaaaaatcgattgggcagggcgcagtgactcgctcctgtaagcccagcagtttgggaggccgaggtgggtggatcacgaggtcaggagttcgagaccagcctggccaacgtagtgaacctcccccccgtctctactaaaaatacaaaaaattagctgggcgtggtggcaggcgcctgtaatcccagctactcgggaggctgaggcaggagaattgcttgaacctgggaggcggaggttgcagtgagccgagatcgcgccattgcactccagcccacgagacagtgcgaagctccgtctcaaaaaaaaaaaaaaaaaatcgattgaactaatttattgatcacagatcttagggctgggtcaagaaatcctgtataccagttaatgtcttcatactatacttaaggaagcaagtagggaggtaagtaatcctgggcctccgagtagaatttagatcacacccacacccacccacctgagccccagaccaaaatgcccgcagagcgtacccatcacttttgttcaaaatcactttcttcttaaggactttccagaccactccatttaaaatctcaaccatccccccatctttggaaactccctttcctctgtggcacgtgctttccaactagtgggtattaaaaagtgataacctaaaaagtccagggacggcaggtgatgcgggattaaggactgagactcaaagcttaatcctcctaatataaatgaaaaagctcaatattcccattgccctggtgggaagactgcaaactgccagcttcaaactgacctctgagaaaggaaggcggggtttagacgccagtgtcttcgggaaaccctgcccgagagtgcccgcgtctccaatttactaccaacccttggtgccctcccatcccaacgtcgcaaatttactaccaacccttggtgcctcccatcccaacctgcacctgtggcgactttgagacttgccagcgttgcacggagagaaggaaaacaaccgcaacaacagcccaggtccactggaaaggcacttccggcaagtggattcagagaggcccctacttcctgagggctgaaaaaaaatgagtccgggtagggacttgacctgcgctaattggttcctaggcccggctttctgtttgggggccattcttaatttctagttgaatccagatgttgaacggtccttgaagttctattccagggctcccaggcagcagaatctgcccacagagttcgggtaagtagagtgcaagtactgaaacaatctcagaatgatggtggtgaaggaaggtaagagacgggattttaggcccagtgtgacctgaattgcttgccatctgtgggacttatgttttactttgcaaaacagggtttataaggcctatggggacacatctcactgcattagggccctttactatcatttagagggggaaaaaagcccagttcttacatccattttctttgctgggacctataaacttcattaagggttaaagagcacaagagcaggattttcacttccatgaaaggtgtggtgataagggccctaggcttgggggtggttcggaaagtcagatcatttctcctactgccctcggctttatttctcggctatgtgaccttgggcaagtcccttctcttatctagacttgtttcacaggaaatggcaccaggcaattttagtgcccttccgtgtctatggataaaactgaagacatgtagtaggagatctcaggggcccacgccggccagtccctccaatcctccggattctaggtagtctagcttcctggttgccagccattacacggtttagctttccgtgccggatggagccacagcgaagtcttccttaatagtaagcgcttttagtcgagctaggccttcagttttattgccttctctgtcatggcagcgccgccccttccagtagtgcgatacccaatgagacttcaggtaggagaaacggcactgtcgcaagcgcaggctctcgccggaatcccgcccttcgcttgggcgggggagtgacgcctgcgctccaggggaactactactcccagcgggtagcgcggccgacgcagccgcgcagcctccggggccaggccgtgtggcccgctggggactggagtctcaacgacgcgcacacgagaagtaaggagcggaaggtgggaaagggccggaaaacacacgttcctccgaaaccggtttgcaagtccttgtagaggtagtttcgggacgcgcactggccaaggggcgggctgtgggagggtgaagaaaaaagggatacacacatgcatacccacccactcattcatacgcgcccaggccctggaagtgggcaagggggttagaaggggcgtactaaactaggcttgtccgtgcctcaggcggcacgaggaaaggcagaggattcaattctgtagggggcagaggtgaccatgcgccgcctcaagcggcgaagaagggagccgggggcggggcagggcataaccgccgttctggaggccgaacgttggcagcgtagggaactggcgtccgggagggtcgccggagcagtcccttgcgcatgcgcttcttcaggtgggcgtgtgtaaggcggggtcggacgggggatgggagggccgtgctgctggtcgctcctcctcctccacccgctctgcccctcctggaccttgtgggccgggcagccattttgggaagagctttgttatggttgtggactagccgcctctgccgggtcgacaagctggggacgcgtcctcagacgcagcgtctagtccctggccatagctccgccgctgcccggtgagtgggagtttgggaaacggggcagtaggagatcctggagtcgttctggcgcggggctccgcccggtgcctaaccaacgggctgttaaaactagttgaaagaagctctcacacaggtggttgggtataggtccgacccgagaggggcgagcggagcccacgggtcaagtggttcggatgcggcacccccgcctcccccgtgcatggagctttgcacgcgagcgtcgccggggct

SEQ ID NO: 2250 - DNA, 4001 bp, Homo sapiens
cagcccgtacaccaggatccctgggtggagttgggaaacagggtagggtcagaaaaggcaggggaagggcacaagaggcagtaagctgggggcagattcactgtgggcagtgcatgggctctacacagtggggtggaggtggtcctgggaggagatgggcatgcagactggcagggggtgggagaccctgaggggcccaggtcaagtgaagggaaatcctcctgctccccacaccagccaggccctgccctcctcaagtccacttcccgatgccccctttcttctcacaggctcacccagcacaatggggaaggtggcaaagaccccgcagcgcagtgtgtagatcaggcgggaactcatggtgggcagccgtgggacatcaaacggcaggaaggcatatgccccgtatagtaggcaagggaagagaatgagtgcggctcccacggaggccacagcccttagccactcacggtctccacagctcccgcagcccccacaggaacagccaggcggcctcaccactgcctcagcccacttgcgctcagtggggtcggggtgggtgacccgggggggcatgaaggttcggcactcgccctcgcctgcctcacagcgcacgataaggtcttcttggggctgccgctcaatgcactgtaggtcaataggcacgaaggcacgggccgctttctcaggcagcaggttggcatcgtcttcgggcagctcctctagcttggtaagtggttctgactcagggggctctggttcaatgtcccgccagccagggggatccgggaacggagcactgggctgagggccagtcccccagggcaaggtggcagcctcacttactgtgctgtctagaccatcctcagccccctctatggctgtgggagatccagctgaagaccccactctgagggactcagctcccggggattcggccccaccttccccttctggctgccggccattgggaaccaaggcctggggtgagctcttctctggggaatcagacctcttcacttccagtagggccagggtctcctgttctgtcatcctggggcctcagttctgggatctaccacaaggtcatgtcatcctgcagggaacagaggaaagctctgtcagaaacccctgtcttctagttattaggacaggttgacagaactcatactctccagggcaactggcttcatgggttttggccccttctggagccttagggagaacgtggtacagaggaagacactgaaacagagggaggagggaaggaagtgagcagctgaaatggaggcaccctttcgacatcaaatgccgtccaacaggagagggtgagtcaagggacacaggccctggcagctgtgaactcagtcagcctccacccacgccttctatgcccctccaccaaaacccctggagtcatggccactctaatgcaggaataggaggcagaagaggtgtctagaactttgccaagtttctttcccactgaggatcttgctgtagacagagaagcttcctctccactgtcccatccctacacatccctgcttggaaccctcctgcattccaagtgagaccagtgatttgccaactgatctgacccaaagagctggcagttccaggcaccctcttccttcactggtacttggtcagttcccaaactcctcactagcccacctcatccatctctgcagggcctgggtctgctattctgatatttaggtctgatcatggctgttttctatgccttctctcctgtctttctctcctccctgctgccctccatctcattgcttctggatgggactgattcccttcctttatctcaagggcactccaaaccttgcagtttggacccatgacatcctcttactttccatatggagtggagggtccccagcgtctgtccatccgtccgtccgggaaggagctgcccagctacctgctggctctgcaagtatttctctctgtctccctccctttacctgtgtctcaaaacctgtctgaccagagcaggtggggcccagcttaaaggggcaggccccgccctgctgaatctgccgacaaaaaaaagcatcagaggaggatgtcatcctttctgaaagttgggatgcagctgggcaaaggggtaagttcacattctaggcacctggaatgcgtaagaactcccagctcaggaaagcagagggagaaaagtggatttgtgcaacaaagggtgctcggagtaggctgggatacccagaaatggaatttgtacacttattcattcagtaaatacttactggacaccaattattagctaggcagacacagaagagaacaagatgacagttgaggtctctgcccttgagaagcttatgttctattggggtaacataatgaagaagcctagcaactaaatcaattagacaattttaataggaaagacctctttggtaaggtaatatttgagctgaaacctgatgggaaatcaggagtatgagtgttacagacagaggaacagcaagtgaaagaccaatggatgggaaagacttaggctgtttcaggaacagaaagaaggtgggtggctgcagccaggagcatagtggtagaagggcaatttatgttctcattacaattcatacacaggcaaaaacaacaacaacaaaacaaaccacccttgctttttaacttaggttttaagctaaaacaagacaaagcagtcacgctcctagctgtaagcccacctgccctgatttccaatgtgaggattaggagatagaaacgttagggactagcttctcatttctatgagtccttatccctaaaatcatttgagctttgggagggcagggatagtgtctagcttgctcacctctgtgtgtctagaatcttgcactgtggctggaagatggcagttcaataaatgttactggctcgtaagagatagatatgcaagctggaaatctttgggaggggagctgaagggccgagacgcttgtacaagtcatttcttccggggctttactcctatgtgatgctcggccctttccaaggaaactttcacatgcactttttgtttgtttaaattatgggggaaaagggaaagctggagtcactctaaccagtaatctgaaagaggcttggctcaaacggggaggcgggaaaggggcagaaggatggaccaaatgaccattgtaggacaaagcagtcacgctcctagctgtaagctcacctgccctgatccagttaagctttggccgcctcagtgggtacactgtccgttctctgatagctttgccaataaagtttttcgcaagggtttggagaagccggaaagacgccatgctgcccagagttagttctggcaacttcccgggagggaaaacgagtttcgcgagatttggtagcagcaggccactggtccgcaactgtgcggctgccatcgcgagatttggcaggcggaggaggagctgtcgcgggcagccgcctcacagcgatggcggccgagcagggccggtggcggcggcggctgcggctacggccggagacggcagtgttggcggtagtggtgggtggcaggggcctgtgaccgggagctgcccccggacccgggcaccatgagccaaggcccccccacaggggagagcagcgagcccgaagcaaaagtcctccacactaagcggctttaccggtgagaggggccagggcgtgagagcagccaccgagggaagtggggagacggcgaggggcggggcctcccgggcgggcggggcccgggtgtcggggtgaggtgcgggtgaggaaggagggtgcaattttggaggcggggcggggtcccgtagtaactcgggatggaactgaaaggaggaattgggtaggtgggaggtttggagggaagcacgtggaggaatcccctctgcagtgagctttcttggggcgggcactaagcttggtggagttggggtaatagggtgggaattgaaggctggaagggttgggtaggtgaaggtggggtcaca

SEQ ID NO: 2251 - DNA, 4001 bp, Homo sapiens
ggtcatccagatgattctaacacacatctagagaatcgctggtctttggtttctgctacctcctgtagtcagagaaaagtgagaggaagaaatgttgtaattctctcagtagaattagctcagctggtggccaagagtctttccctgatggttccacaagccaattatctcagacacggtccgaatggcctcggagtcttaagactggatttcctatggaggaatcaaagtactaatcctcctttgggggccttggctgctgtaagaaaccaatacttgaccctcccaggaatagaagcttcagggcactgaaagagctaaaaggactggagtggaggcaagccaaggtgctgtctgaatggtaagaggaaacctaccaggtgaaggatctagtgttttgccaagaaattcaatttaataccaaacaggggatttacctgggcagaacaggcaatttgttaatatttagtgactgttacacacctgagttggatgtcattactaacaacccctgccataggcttatgcactgcaccccctgcccccaaaagcagacaattggtttaatgtctattctaagaaacctgaggaaaatgaagccagactgattatgggacaatttaaataaatacaagaaactgaagagcagaaaaaggtctccatacagctactgtgaattacttttattgaaaaaaaatgttcactaaaaaggctgaatacatccctctacatgaatacacagctcagaagaggggaaatggaggtggggaggcatccaagtcataaagggtagaaaatgaatgcaagcttcttagaactcttcccaggaacacaggcaatgcttgcagtttcctgggtacccaatgggcagggaagatcaggaagagatccatgggacataaggaagttaggttactgcgcatagctcccaggagattgtcccctccatttctcccactcattcttttggctgtgggagtgttccctctaagctgatccactaccagcagctggaacactcccctaaaaagctagcttggcttcctgggcagccagttcttcaggagcaaggctgttaagttcttgaagctgtcactgctgcaggcccccccttagcgcacagaggacaatcctcaccaacacgccaccaaccactccaatggcaattcctattcccaaggctgacgccaccttctttttccactttgggtggtgaggcttggagtagctgtccagattaacttccaatccctcatctattaacttctgatcctcagtaagtgactgatggaaattcagattcaccaagttaggaggaaggaccctcaacccaaaatagagcctcttgacgagtctcaagttttttaccagctgcacatcacagcgatatgtcccagagtcatactcctgagcatatttaaacttcacaaagtgggagttggcttgaaagggtttgaagacctcatcgtcagtggagatgacacctcgagcaagtctccaggtgaaccggaaagcttcctgtccaaactccaagatgtctgaactcagacagctaagctcaaattccttgccaatgagaatggtgaaatggagcatcccacagatccagttggtcagacattctaagcgccgagtctgacatttccttctcactccatcagggcccacctcacagacggtctcctccttatagccaaggccacaggtgacagtacaggttgtggcattgatgataactttccccacagcttcttgcagcttctcagggatggccagtgttttaggtgtagtcaccaccaaaggcaggtagaaggccaaccccaggctcccaaggacaaaactagtggctaaaaccttcatgtctcggtaggcgttttgccaccctcagccagcacccacaaggtattccagctgaatcctctataaatcataacttgattcctttgacatgagatatccttcaaagtcaaaagatatgatgcatgtattgtcaataaaacaacacaacttaataaataaaagtccagtccttataaacaggtgaggccacaaggcaggaaaaaaatcacaatggtgttgctttactaactatcgttgttaataaaataaccaccttacctactagtcttcacgctttttttttttttttttttttttgaggcagggcctcactgtcaacccaggctggagtgcagtaacatgatcacagctcactgcagcctcaacctcctaggctcaagtgatcctgccacctcagcctcctaggtagctgggactacaggtgcaggctatcacacctggctaatttttctattttttgtagatacggggtttcaccatgttgtcgaggcttgtctccaactcctgggttcaagcaattcacccacctcagccccccaaagtgctgggattacaggcatgagccaccgcgctggccgttttcgtgttctcttaatgactttaaatccacctcttgggaagacaaagaagaaaagacttcagaaactgaagtaaatttccagattacctcaaatgcatagtgaagttacactcttcctcacccttccccttcccctctataaactaggatctaaattaagggtttcaaaagccccagttaaatgtcaccaaataaaacaaatactaaagtctaaaaaaaggaagattaacttgaattattttaatgttcctaaacttcctataaaaaggattaagaactctggactaggaggcaagtaacttacccttcctgaatttctgtttcctcctttgtaacttaagacctccttgcctatctgaggaaggtcacttagagcactgaatgatatactgtatgtgagaacactttgtaaagtgtgaaacactgttcaatgtgtaaggaattttaaatagaaatggaaattcataaagacaagggccaagatgaccttttcaaatcagaatgtttaaggttgtgttaaaggcagctcctctcccccttttaggcactcttccttcccaaggatactgaagatatattttgagtgagaggatgcatgatgctccctgactcttggcctactccctttatcctacagaatagagctcattattcacgtaggtcaaggttgctatgaaacagctatgatgtcaaagatggagttctcaatcacataagattaataagtagaccctcaaatttgacattaaaatcaaagacttacatagactttgtgaaacatcttatctttaggagacaacgagcatttaataaattttaaagctgcttcattcaaaaaaaaaaaaaggctaataagaattcaaccgtacttacttagacttgaagaaaggtccttggaagacaggaacttcctagcatgcatttttgtaacctccagaatgcctagccctacggcctcttcagagtaattgcaaaactatattgagttaaataattggaagacagatcattcctagatgatctttttgatcaacaacttttccacttgcatcatttatttacaatctcatctagaggcagaaatctagactacctgtccactccctaccccttccagatctatctttccacactgaaagatctagtatcaacacaggaaatcacactttcctttgtactaaagcaaagtggccagagagttccagaagtgagcagtgtttacaaataaacatctacacctgttctttaataaacatccgattttatttacaaagcattaaagcttcagcaagaagtacccaaggctaagtctcatcttgtacaaaactacagatttttttttttttttttttttgagatggagtcttgctctgtcacccaggctggagtgcagtggcgcaatctcagctcactgcaacctctgcctcctggattcaagcaattctcctgcctcagcctcccgagtagctaggattacaggtgcccgccaccacgcccagctaatttttgtatttttagtagagacggggtttcaccatgttgaccaggctggtctcaaaca

SEQ ID NO: 2252 - DNA, 4001 bp, Homo sapiens
gatgagggccacagctgccaggtcacccacggcaaaggctatggccagggcacggcccagcagctgggggaggccatgtgcatgggccagcaggcccaggcacaccccacagtagcgctggctgctgtgcagctcgtagaggcggcagacgtggcggtggaggcgccgggcacccaggcccagcagcgtggccagcccgaggctcagcagcaggttcagcgtgcggtgaggggcgccctcctgcaggaagctcaggccacaggtcagcccgcagcccagcgagtactggcacagcaggtagagctgcagcctctcggcggcaccctgggagccctgcggggagtgccgaagaggggccgagatgtgggggctgcctcaccacaggtgctgcccaccacaggaagccggagcctgaagggaccttggggatggttcccgaaggggccacatcggcttcagatgaagccctaggggatcatctctctcaccttaatttcaatcatatgggttttgttttgtttttttttttagacagagtcttgctctgtcacccaggctggagtacagtggctcgatctccgctcactgcaacctccgcctcctgggttcaagcaattctcctgcctcagcctcccaagaagctgggattacaggcacccgccaccatgcccagctaatttttttgtttgtttgtttttgtttttagagatggggtttctccatgttggccaggctggtctcgaaatcctaacctcaggtgatccgcctgcctcggcctcccaaagtgctgggattacaggcgtgagccaccacgcccagccttcaatcatgtcttagtacttggggcccatctgttagctgaagggtggtggttcagagtctcagagacctgggtccaaagcctgactctatctgttgaccatagacaagccacatactctctgagccttagtttccccatctgtgaaatggggaatcagagcaaacctttacccctgtggctgtgaggattacgtgatgcacacggtgcactcggcgcagggcctggcatttggggggccggatctacagaaactgtcgctcttgtcttcttgggactgggactgtgtccactgtgagtgtggccgcttccgcaaccaaacccaaaggtgcaacctgcagcctctgttctcagtcttacggaaaatacggcgaagaggctgggatgctggacctgggccctgctgcccacattccgggggtgagcccgggccctgggctggggagtgatccacccactgccttcccggaggcctcaccttgcccagggacagcagcgtggacacggcccggagggagaactcgagcaccacgagggcagccacccgggaccccacgaccgtcagaaacagggccagccctgccaggtgcaccgtttccagggaggcccactgggcccgaagccgctccttttcgggtcgccgctgcgggtcactttggggacagaatgggtgtgggcaggggtgcagaactgccaccttcgacccctggtgggggtccccgtgcccccagccacattccctggggggatgaggtgggcactcacttggcacagcccacgaagaagtaaactttcaggaggctgttcaggaccaagactccaagggccccgatcaggcctgagggggcgggagggaggcagcgaggcagcgtgcaggggtgttaggagggcaggcttcattggtagggtcagagggggcggccaaggggcaggggtgtcgggagaccaggtgggtggggtccaccctgcactgcaaagagctggaagggggcggggccaaggcaggaatggggcgaggtgctcaccttgcaggagggagtcaaggaggctagagccccactcgagggaggggaggccggggagccaggaggggagggatggaagagagaacatggcagccccggaaggagccccagcctccggccaggtctgcgtaaggacagaccaacgtcactgggcaaaggtgtcggtggagggaaggagagaggctgggaggggtcaaaggcccaggggaggggaggggaggagagccaggggtgttaacccttcgaggcccagaagggcaaggtcccagctccaggcacacggggtgcctggagccagctgctgcccgggctccccatttgggcagtgtggggtgaagggacaggtgtctctgggctggtctctggtctctgtccctgctaaagtctggcatccactttacttgaaatcttccttgagggaggacaggcgcagtggcttacacttgtaatcccagcactttgggaggccaaggtgggcagatcacaaggtcaggagttcgagaccagcctgaccaatatggtaaaactctgtctctactaaaaatacaaaaaattagccgggcgtggtggcaggcacctgtaatcccagctactcgggaggctgaggcaggagaatggcttgaacccaggaggcggaggttgcagtgagctgagatcacaccattgcactccagcctgggcaacagagcaacactctgtctaaaaaaaaaaaaaaaaaaaaaaaatagcaatcttccttgagggcttgaaccacccaatgccccttcgaagtcccaggctccatctgtcctgccccgccttaggtgtgggtcctgtcctcttgcagcctgaagtgtgggctctgacccttcagcccagggtctgagagtagggactctatccccccatagccagagatcagctgtgccctctcagcctgaggtctggggctctcttcccccacagccaggaggtcagctctgcctgctttttgtaaggtctggttccagcttcccaaagcctccggctctgactcggtgtggaatctcctgcagcccgagcctgcctgagccttctcctcccacaggccggggccgcccttcctgatgctcctccctgggtccactaggtggcaggcctcacctgggtccagcagggcggagctgaacaggtggaccacggctcccatcctgctttcacaaacagaaagggcagagggagcagaaggtgggggtcagggatgggggagactgagattcaccacagaggagggtcgttgaagtaaacaaaatataaaactttattggtttggagtgtgcagtagcaggtgttcctgggagcggcccttacagacttggggtgtggctgggagggcaggtggggctgctcggcagcagtcctgcccctgccagggagttggcatccatctctgcagtgtgaaggtcggtgcggcgctgagagcacacccacggggaatggtgctcagtctagagaaaggcccagggtctgctgctggccctgccacgtcgcttccctttcccgggcctcagtcccgggaacaatgggcacctggactgaacaatgggcacccggagcttctttcaggcttgtcaggatatgtgcaaatgcccacagggcgggcagctgggaggccctccgtgagagcccttagatgatgttggctgaggccaggcgcggtggctcacgcctgtaatcccagcattttgggaggccgaggcgggcggcaaggtcaggcattcaagaccagcctggccaacacagcgaaagcctgtctctactaaaaatacaaaattagctgggcatggtggcgcacacctatagtcccagcaactcgggaggctgaggcaggagaatcacttgaacctgggaggtggaggttgtggtgagccgagattgcaccaccgcactccagcctgggcaacaaagcgagactccatctcaaaaaaaaagatgatgttggctgaactgcggcccctgcagaagtgcatgttgaagtcctaccccctagtagctcaggatgtgactgtatatggagataggctcttgacagagataattaagttaaaattgggccaagtgaggtggctcatgcctgtaatcccagcactttgggaggccaaggccagtggatcacttgaggtcaggagttcgagacc

SEQ ID NO: 2253 - DNA, 4001 bp, Homo sapiens
cctcccctcttcccctcccctcccctctcttcccctcccctcccctctcttcccctcccctcccctctcttcccctcccctcccctcttcccctcccctcccctcccctctctccccctcccctcccctctcttcccctcccctcccctctcttcccctcccctgccctccgtggcgggggcggggctgcgggcgggggaggccggggtcgtaagccgggagcgctgcgcgcccagccaggaaggggcagcgggggcgaccctcagttttccgggccgggccacgcgatggggtcgcgcgcgagctcggaggcctcccggggtttcgcagcggccgccgggtcacacccaggcgcagagttgctcgtcctcgtcggggcgccccggggggcggcggggtccgggggtcccagcgggcggaggcagcagcgggcggaggcgccgggctaggcgggcgcggacggccgaggcgagcaccagcagcggcggcagcgagagaagcccgaacacgatgagcgccgcggagccgcggtctgagaacagcgcgcggcaccggggacccggagcggggtggacctgggggccgggcgggccgtcagtggggggcggggcggggtaatggagggctgggggcagggcagggtgatggaggggagggggctgggcagggtgatggaggggaaggggaggggtggagaggggagcgggcgggatgatggagggaagggggagaagaggggagcagggcagggtgatggaggggaaggggcagggcagggtgatggaggggaaggggaggcgcggaggagagggtgtgggtgggtcagggtgatgaaggggcggtgagggccggacggtgagggatggatgggcgggagcagggtggagcggggaggggagagagagcggggtggaggaaaggatgcagggccacggcaaagggagacggaggggtgcagggcgggagagaggagtgggcgatagagatgaaagagcggggcggggcggtagaggggccgtggcgggctgagcagggcgggaagagggaggggggagatggagggatgaaggattagggcctgggcgaaggagaggcagggcggggagaggggagggggcgggccgctgtgggccaggcagtgctgaggggtgaacaggagatccgggacgcagcaggtaaagggctgagcagggtcccttgaggggaggctcagaaaaagcgcccactgccgcgttctgcccgcttctgccctcctgcgccctctcatcaccagctggcgccagcccccgtgccagcagaaaggggcccggggcccagagcaggccacagcccactctgcaggtggggaagccccacgctggcaggagggcctgggaggggccttgtgtgtttggggaggggctgggggctgtgggttagtgaaacttcaacgacattttcatcttcttttcctggaaccccgttctctccccacccccacccagctgtccaggccctggtggcccctggtacaaggctgggaggcctcagggaagggacagagctgtcccttgggtgaaaaacaaaagctcttctttggctgtggctggtgggggtgcttgggagaaggggctgccagggaggggcacacgtgtctctgaggacaaggggcaattctggaagggggcacagtgccttcagacccagggcacgcccactccccaggaccccagctagtcccccgcccacggggcacaggctcaccctcgagtggcacaggaatcccaggtagacgacggcggccgcgggcaggagcaccagcaggaaggctgcggcgggcagcaggaggtgcagcaggagcccggccagcagccggccgggcagcagcgggggccccgaccaccctgggcacgtcagggctgaggcctggtggtcgggaggtccccggggcagcatgggcgctgtgtcggaagcaccacctcccccctcctcctcctccgtctccctcccctgctcactcatgctcctgccactgcaggcctgtggcccgggcggtgctcaatgcagagtggtgctctccagggctgccctggaagacctttaaccccgccccacgttgcagccagtccacatcccccagccagaccgtggaccctggctagggaggtcctgccctgatgtctgtcccagagccacacccccacctcagtttcccctctgccaggcagctgcagctccagcagcgccagtctccagccccagccagctcctggtgctctgggcaggccttgcagggcccttcccaccggggccgcctccctccctgtgccgggcggggctgcagctcccccacacaaagacctcatttcaaagggcttgactccggtagctgccccatcagtagctgccacctggaggccagccccccaccccctgtcccagccccagccccgctgctccctcatctgaacaccttgtcggtgtcctccgcctgcgtctcagagtggatgagaggggacctgggatgcgcgtgagccgcagggtgtggggcccgtacacggcaggcactcagcaggctgccagggaccacaggcaccctcgcgtctgaacccagccatcccgagcagaggaaaggcagattttccaggacaagaacctgtgttccatcattttttttttttttttggagacagtctcactctgtcaccagggctggagtgcagtggcacgatctcggctcactgcaacctctgcatacctggttcaagtgattgtcctgcctcaacttccctagtagctaggactacaggcgctcaccaccgcgaccagcaaatttttgtatttttttttaagtagagacggggtttcactgtgttagccaggatggtctcgatctcttgaccttgtgatccgcccaccttggcctcccaaagtgctgggattgcaggcgtgagccacggcgcccagcccatcatttctagtcaggggcaaaacttttcccatccaaaaccccaagcattttctctgaacgttactcccgactctgacttttttttgagacagggtctcactctgtcacgcaggccgcagtacagtggttcaatcacggctacggcagccttgacctcctggactcgatcagtcctcccacttcagcctcctaaatagctgggactacaggcacctaaccaccgcgcccggctagttttggtattttttgtagagatgggatcttgtcacgttgcccacactggtctggaactcctggtgtcaagtgatctgcctgcctgggcctcccacagtgctgggatgacaggcatcagcccccgcgcccagcacagtccctgacgtctgtccgtctcccagggctttattgcacgtcagcagttccagctccattttcttttctttcttttttttttgtcgaggaggaattttttgctcttgtttcccaggctggagtgcaatggcacgatctcggctcactgcaacctccattttccaggttcaggcaatcctcctgcctcagcctcccgagtagctgggattacaggcgcacactaccacgcccggctaatttttgtatttttagtagaggtggggtttcaccgtgttagccaggatggtctcaaactcctaacctcaggtgatctgcccgcctcggcctcccaaagtgctgggattacagacgtgagccactatgcccagcctccagctccgtgttcataattaattgacaggagtaggtgtctgtgagctgagccgttccctgtgaggccttctagtgggctccatcccttccaacaccttccaggcctctccagctcacctacttccttcagacttgtgaacaagaaggagagtggtaccatgtggcgtgtgacatctagcagggcagcagaggcctccctgcagtgtccctacagcgctgggcacggtggctcacacctgtaatcccagcattttgggaggctgaggcgggtggatcacttgaggtcaggagcttgagaccagcctggcca

SEQ ID NO: 2254 - DNA, 4001 bp, Homo sapiens
ggaaagaaaaatcttggtggtgatagcagtctttggctctctgaggggatgtcatgtggaagagaaatgagttgcccagagaaatttcttgctatcagtgagggtgttcacacattttttttttggatgagcacttgctgaagctatttcagagggagattaaatatcagatgaaaagtttgatgaatgactctgagttcccttttaactctgagatcctgtgaatctggctatgtgaccttgacttggtcactgaacttcttggaaccttagttcttcatctttaaaataataggtagactaaggattctttagtgctgaacacaatctactgaattgcttcccagagaagctaggtggtgttacatattcccaatcttcagctgtgactcctgcagttaaggtgctttggtcttaagcaacagaaactgaccgtttaaggaaaaaaaaagagtttgttggaaagaagtgggaaattcatataatctatgaaacgactgaagaacaagacttgaagaaggcagaaaccagagcttcctcccctggcatgccatgggggtgcattggctgtgatggatttttcccttattctcaggtcactattcagcattcaaagtccagatgacagaatcagtcccttggacctaagttggcctcaagcctgctccttggcaggaaggtcaggacaccttgattatcagcccaatgtcatcccccaagatgaaatcaaaagctattactagaacaagagccaaataacatgtaccctacaacctccacccttttctcttccatttatgacagcacatcagactcaagagagtgagcagcattataatggaaataatcttcaatctatttcaatttacctttaaaagtgaaaaatgcactcatctggatgctcagtttttaccagtagtagcccacatgacatgtcataactgggtgctgaaatgctgacaagtctgagaacacgactcccctaggagacagacacgctgacgggcttgagcattcacaaacagatatcggatgtctgctatgtgtcaagccctgtggtagacaccgagactcattaagtcagtgcaaaaaatggaaaggttaaatatttgccccgggtaaacgcaaagggcaagtgtattgcatcagggttgaacagggtggcgccggccaaagagggattcctttcaggcccgggcctcgcagtccaaacgtggcccgccctagccccaccccctagtgaccgcacactccagccgtccaatcccgtcaccaccccgtccagtctccaccccgggaggctccactccgggtccaggccgcctggggcgtttgcagtcctctgtgggaggtggcgtcccgcagaatgagaacatttctgtgccgggccagcaggtgttacctgagtaagattgagattctctcaccaggcgacaaggcttgttgtgcccgagacaggcacagctcagattccctccccgtggtaattaacccggggagaaatgtaaccaatccccgagactcgggcctccagccagccgcccgctcgctccgtccttccccacccgggagccgagcctggaaggattgcggggggcggtgcggcaggtggaggtgggagagtttgaaatggatcctggctgggaggacttcccaggccccctgccggacggcgggctaaaagcgtgaggcgaaggtcgtggaaagcccgctgggacccaccgcgggggtgcactggccgctgggtcccaggcgccgcggcgatttaccgcgcctggaggtcaccgctccgcgtcccagggaggggcaggaggctgggtccttctgatcccagaagacatagcagcacggagacactaatccgctgtttttacacataaacacttcacacgagagagattacgtacctcacattgcagtcatagagggatctgtgggtgttagaggctttcagctcctgctctcgggtgcattgtgggacagagcctagcagggagggagcagaggccgcggcagcctctcgggttctaatctcccacctgccgctcgccctagatcatgacgtcaccctggacctcagttttctcacctgcgcagtgggttaagctaaaacctgcgcctctctgccttttgaggataaaactgagactccgaagagtgttcggaaagaacacgtcaggagtgtgcaagggtttctttgaattgtggatctcacatccctgtctggcctgcacgtttactcaccaaggaatgccaatttcattgttttttgtttgtttgtttgtttttttaatggtgataattgacttgaaggaaaccaagctaattacttggctggatgagtgtagagaggcaggggatgaccaggtggaagagggctgctgctttgcaaagattctctcagggaaagaaggaatggaactaaggcctggagtgtgattttttttttttttttttttttttttttggtaaagattcctgtattcagaaccgctcttaagtctgccgagtagagtaggagactaggaatcattttgaaccaaacctctcatttaacaaataatgaaaccgaggcccagataggagaaagtgacttacccaagggcacgcagctgttggccagttggctctgggatttctttgaggctgattgaaactaccttccttgacctggactttaatttcatctcgcctaggctccactccatgtgaaaccaggttttaggatttgggcttttcccccaaagaattcatggagttgtttcctgcttccaaggcattttgaattcctctggttaaaggtgtactctctgtcactatgtctctcaaacgaggcaaggcaggaggtttcgggggttaaggagtaagtactcactggtgtggaatttagcagaggtgagattttcatgggcactgtgtactttatcagtttacaacttgctgttaatagaggccattaatcacagccaactgcagctggcttagcctgggacagggacagtccagccatggttaggaggggcaggcgcagcaggagtaaccagggaaggacctcctacagttacccttgaggcccgaaaatcagtcctaggaagaagacagtggaataagtgctcccaacatgaagacactggcacatataaatggtctcacggtctccggctgagtccttccaaatgacccaacctgtgttaaatgcctaacacagtgtctgacacacattaggtgcttaatgaatactctggagtttgaaagtccttgccccaaacatcaagatatcattttattcccactttacaagcatggaaacagaggaatagaaaggttaaattatttcacccaagttatagagcaaggaaggggcagagctgggattcaaacccagaccctctggctccagagtccatcctctgagccacccagcagggatgggcctgggaagaacttactaacagtctagttgtcagcctcagactccgtccacccaaaatatccttcctccctccagctgggtgtgtgcagctcttgctggagaaggggtgatcaagatgacctctggaggcccttgaagatttacaatcctccaatccccccctggagaattcccccctctcagacttcacttgcttctctttctgtactgtccaacaggccggcctgggcctcctgactgagttcagctgtcattgtgggacagaagaggagtgtgcaaaccctgcaggattaggggtgctgatgaggcagccatcagaagacatcacttgacagggcctctctatttcatgagtcacaagggctgagcatggagccctcttcctgctcctccagaagccctggcctccccgtgacccagcccttcttgtttccacctgatgcttctctcacagctgccatgatttcataatcttttgtcataaccttccacatcatccctccatcatccggtctcagctcacacagagggctaggaggtgaaaaagtccacttcctgcttctctgct

SEQ ID NO: 2255 - DNA, 4001 bp, Homo sapiens
tcccagaacttaggtgggtcacccttaataatggaaacttcaaactgtataggactttacacttacagggcatttttacattgtcatgtaatttgattctccctaagcagagtaatagatacaactgctactacaggtggtagtactagcacccctaaaacaaaaattcgaaatgctcccaatctaaaacttgttaagcacagacatgaccacaaagatgatgttaacattgcagaaaagcacctacagacatggtaacaatgagtgacgggcttcttgaaagactatagcagagcgcattcataacagaacaagaaatcgtgtcagtctataaaatcaaagagacttctaagacaaaagcttgttaatgaatcaggtgactggcaaaaacatttttaaaagccatctggcagaatgcctcctcatctctagaggacccactttctggtccctctactgcttcagatactacttctcacctaaaaaaatactgtgcacagtaacctttaatcaaaacacagcatcacagcaggagacagaaagccttatgttgctgtgtctaacagctgatacaggtattctggtgatgctactgtgcttagttaccctgaacacatcatttattttcactgtgttaatagtacatcatatttttttaccgttaagaacttatgtgtaacgtaagaaaatatttatcggtagcatataaattcattgtcaggaatggtggtgatgccaaccaaccagactatccacatgggtgcctgagatagtgacgcctttgctttctgatggttcagtgtagataaactttgtttcatgcacacaattattgaaaatattgtataaaattaccttcgggctatgtatatacagcatatatgaaacataaacgaacttcaggtttagacttaggtcccctccccaagatagctcattttttatgtgcaaatactcccaaatccaaaaatatctgaaacaaaacatactttggtccaaagcaaaggaaggtatggagaacttagataacttctccaaacttccttgctggaagtccaccactgatctgtctgatcagagtgagccagtgctctgtgccccacccttcctcactcctcacccgcactatccttagggaggccagcagccttgaacctgaaggaagaccactaaaagaagtatggcccataggtgagtgagaggcaggcttaaggagcagctggctacctctgagtcagccctgtagacagggtggccgtgcactgtggtcgtgaccaggtgctgcaggctcacctccctcaccttgttggcttcagctgggggcaccagcaaacacccgaccacagccaccaaagataagagcttcatgcttatcaggcttgctgggccagcaaagccggacacctggaaaaagagatacggagtcggagaaggggaaggtggccacaccgcagccagcacgctaggcccttaaccatccggccaagtgggaatggggttgggggctgggctccaggattccaaggcctgctaaacctggtcgccaaaccctgcttccctcccgcccaactctccggctctccgccagccacctggtgagcccggcagaggggtcctcgaggggacaccgctgccaggggcctccagttccttctcaaggcccggctctgacccgcgcatcacgtcccaccgccctccgccatctccgcctctgcccgccccgcagctcctccccgctcgggcccgacgggaacttttgggtgcgagtctgggacccctgctccgacggcgaaggccggtgcccaccacgcccagaggtcttaagccggactgggacccccaatagccccgcgacccccgtcccctcccccaatgccgcgtccacgaacctacaagcccgctgcagccgcaaaagacccagttgtccccgccctctcctagcttctattggttgccagagcagccccttaacccgaccgcgctgtcgccatggcaacaagacccgccttcacctgggcggggagactcttgcgcaagggagaggcgggcatttctcaaacccgaccaaaccagaaaagggaacgtcagccttccaaactcctggggaagggtcttgcctttgtgtggcctgagaactcccactgcggtgcttctcccttccttgtattataaaactcagcttgtttcatcttgctgttttagaaagaaagcgctttatacactgtaagctagtaacgtcaacaaaaacgatacgagattgaagggctttgtcctcattcaaaatctggaaatgttatttagggatccacgtctttgctgcagaagactttctgcgcggcaacgtctctacccctacacacacctctgagaaggagaaatctagggttggcgatgggtggtgtgggctgggcctgtgaagagtgtgcacaacagcgtcctcagcctgatccccctaccccatgctggtgctgggcctggcaaaatggggcaaagtgtgcatggccaggatgcaggggtgagggtccctggctgctatgtggcagatgtgaacttcttgccagctgtgaaggaaaggggagtcatatgaattcagggcaccagacccggagtgaggacaccggggctttggccctggcgctccccctaagcagctgtgttagcctggaaaagatacctcccttctctgggcctcagcttcccttacttcccttatctgtaaaatgattcggttggattctaagatccccttcagctttgatatgttgggattccttaggggtgggtgggaggggtatcaatatggcccaaacttgaggttggtggctggattagcataggggctgggtccaggtggaatcaagcccctcgcaggccctgtgaactgaggtgggcacttatctggaggccactgagtttgtgttcctctctcctatgcttatgtcttattcctctttatatccttgccacctggcagagtgacctgtgtttggtaggtgctcaggaagtgtttgctaaactgaattctatagaattaaattaaatctagttggcagggggcaggggcaggaggcctgcagtgtgatgcaaaggtcaggggctttggagctagagtgaccagggcaggaatcctggttcctcccttcctagttgtgtgaatttgggtggtttcctttaggacaccgcctttggatctttggaagtctttggaatcctttcagaagtctcggtttccatgcccataaaatgggattaatattaccaaattttcaaggtggttgtagggatataatgagtttacatatgcaaagcacctagaacagcatctgacacaaagagggaggctctataaatggcaatgttagctcattgtggaggtcagaatggctgctttggtgagcaagctcaggcagagacagaatgcctacctcgtgggggcagaagggatagttcaagtactggaaaaagacacttcttccccccatatacgttccatatgaaggtgggactttcatggggacaaaagcatggggctgagtctgtcacctccaatggatgaccctctgacacacaacactaaagatacccaatgctgagctcaccatcttcctcatcaaacagaagggaggccttccactgtcattctgcatttctgcaggtcctagattgtggcatcaaactatctttgactcctctctcatatttccacatcttgtctatccaggtgtccccaggaggtagctatcatcaccctgcctgtatctttcctcggctagcattctgctccctgaaatgcactcccttcctgtgtgctcctaggtccatcctgtcttcctccaattctgttttcagcacatcgctcattgctcaatccctggtagcaagcaccctgttgcatccaattcagacccctccacttggcaaccaagccaagtggttaccatttctgcacttccccaccccatctcatcactggttactccccccaccggctgtccctatat

SEQ ID NO: 2256 - DNA, 4001 bp, Homo sapiens
cctccacactctgaacccaaattaacttttcaatcttttttctcaactgggacagccaccccaccctgtgattcaataacatcatatgtgtctccaggtctttgcttgtgccatttcttttctatgagatggtcttttcttgtgggcaacgtggacaaatcttagctattcttcagatacgccatttcctctgtgaaatttcttctgaccccaccacttcttcccctatgttccacatccatatcattttgtacataacccttagaacagcacttcagtatttcaatacagttatgtgtctgtttcctcaaccataataggaggtcaagaattataccttatctttgacccctagaacctgttggtagagttcagtaagagttttaaaactgttgtctgtgtggttaaattaaacaaataaccatagaaataaaatgttaatcattattggtcatgtacacctgcatttgtgtccatcagatttcctgaacaaaaatcaaaatgtgtggtctgaaaatgtgacagatgatttggaagtggaaaatgtcctagaaaatttgtgtcatgcttgtcccatacttgtgtcccataaacatcccaccaacatttcaggactaaaattgccaatattccctccctctacctaaacccactgccatgtttcaaatgaaagtaatccattgtgaatccaagaaaataaattgcctctatattgctgtttacttctctgcctggatcaggaggccatacacctttctgttcctcttgataggctggaagactaaaaccaagattagctttgaattactctgctttctttggtttgcttttagttctcaatcaatcaagtactttagaaaagcccaatacaagtagatgcttagccttgtgctggtagctattgccaaaaagatacattgattagtctcttactatgtaccaggtactgggttaagaactttagatagattatcttttgaaattctcacaacagccttttataaattattattataatgtcaatattgtggatgagaaaactaaggcttaaagagagtaagcagcgtactcaaagtcctacacagctagtaagtaagcaaaactaactttaaacccaatactgaggctgggcacagtggcatgtgcctgtagttccagctactcaggtggctgaggcaggaggatcgatttagcccaggaggttgaggccacgatgagccatgattagcaccactgtactacagccagggcaaaacagtgagatcctgtctcaaaaataaataaataaataaataaataaacccagtactgaagtctgtgctcttaacaacaagcagcttactgtctatctggggagataagacattcacatatgaaataattggaaaacagtattccttgaaatgtcaggatgtggctccttaagttctccaaggccagattgagatttgtttttctgaaccttgagggacattcgggagaaacgagcctgagttttatataacaaaataaaagtttacaagagccctgagttatatacaataaattcagtgatcgaaggtgtagggtaggtagacaagagaattcatgggaaaatgcctccagagctaataacttgtatgtgtcaaacactttccagttcacagagcattttcacgtatattatgtcacatcatcttcacaaccctgtggaatacaaattatctctattttacacgctaggacaaagcattgattaagtagcttgccccatatcatgaataaatgttccaaagtggtcagtatgcagactcagaccccaacctctgcctcccagcagctatattttctgctatgactcactgtgactcaggactcaagcagcccagtgtccagtctggctgctcttcccaggagctttcccacctggcctccttctgctcaatgggtcctgctggagacccttccattggtccaactggtggtctctaccaactgccacagaagcttccaacagccacattccacccatccaacccttctgccattagagaaccaggaattccctgttttggggggtagagaattggacatactcataaagccttaagctcctaaaactcatgactatctttttactcctgcctcaagttttacacataaatcaatgaaaatctggtcattgtgtggctttccaagccatttggacattgtgaaacttgaaatgagagaaacattgaaatttctggaactctacttctgagtaccttattgccttttcccattccctaaccttccctgtgatagtcttaacattcctgctgtcaataaatatttatcaagcacctgttaggtgccagaaactattctaagttgggagtataggcctagcttggtggcttatgcctatattcctatttgggaggctgaggtaggaggatcacctaagccccagagattgaagatgctgtcagccatgatggcaccaccactgcactccatcctgggcaacagagtgagaccccaactcttttttttttttttttttgagacggagtctcactctgttgcccaggctagagtgcagtggcacgatctcggctcactgcaagctccacctcccgggttcacaccattctcctgcctcagcctcccaagtagctgggaccacaggcgcccaccaccacacccggctaattttttgtatttttagtagagatggggtttcaccgagtcagccaggatggtctcgatctcctgaccttgtgatccatccgcctcggcctcccaaagtgctaggattacaggcgtgagccaccacacccggcctgtgagaccccaactcttaaaaaaaaaaagttacttaggtgaatgcatcactgatcaccccagaaaaagccccccatgcttgctatcatgaaacttgcattacagtcaggacagactaactaaataattaacatgccaaatggtgatggacattgtgatgaaaaataaacttaggaaattaactggtggaatggggtctatgttggaaagaagttggtcagggaaggcagatttaataagacacctaaatgcagtaagggaagaagcgaagccaattggccctcaagagaagggttttccaggcacagagaacataatgcaaaggccctaagcttcactcatacttaggttattcacagaatgggaaggaggccagtgtggctggagcagaatgaacaaagggggggagtgtggtagaagatgaggtcagagtgagcaagtgagggacctgattttgtaatgcctcataggcccatagaagattgttgtttttcaggcattcaacctcgttcaaacaaaccaagcaattattttaggccagaattgttgggtgctgatgatacagagatgaataagacaaaggcgttactgtcaagaagctgagtctgatgaagaacagagacaagtaagcagacagctatatcacagtgtaactggtactgcaagagggttaagccctgattcctgtagtaacatatggagggcacctactgcagatgggatgtcagagaaactgaagtctaaacctgtgccattcagaatggggtgattaaagatgtgaaatgtgactagtatggctggggaaccaaatgtttaatattaattaatttaaatataaaactgaagcagtgtgaagcatttttcctttaaattcaaccttacagttttggtaggactacttctacttttgtcattgcatcccataagatttcatgattgttttgttagtgctcatgtactttttacttctactttcaaaaaatgtggctactacaaaatctacaattaaataaatatgtggctcacattatatttctactggacagcacattatatttctactggacagcactaatctaaactcaaagtggaagagacaaaccagggatgtagaagaaacctcaaggcagagggtctacatgtgccaacgtccagatcacaaagagagcatggcaccttcgaggaggaacaaa

SEQ ID NO: 2257 - DNA, 4001 bp, Homo sapiens
cgggcgtggtggtgggcgcctgtagtcccagctactcggggggctgaggcaggagaatggcgtgaacccgggaggtggagcttgcagtgagccgagactgcaccactgcactccagcctgggcaacagagtgagactccgtctcaaacaaaaagaaaaaaaaaagaactgaagagtgcaagctcgcatttaagtgtcagggcatctgagtccctaggcaactaggagctggaaggtgagagggaaactggagtggggacgagtgagagacagcacagccacttgggttctacgaggcatggatgtcagggtccccatacccttcttctcgcctgtgaagggcaccaagtcatcacgctctttgacttctagtgcctgttgctccaagtactgcaaaagggcctctcggtccagtggccccgttgggctcttctttgtctggtcacgttgtcttagtccagctggcaggagcatgttcttagggatgagttttggggagcaagtcagacctcccctctgacctaggtactgctagggctccctaaaacatcaccggacacctttcccctggccttcttaggaccctaggtcctgtagcaaaccctattctcagccacccagagcccaacacccttcccaaatgcctgggactgcctctggttccctgtgctggagcccctacctcaggatccatctcctgtagttcgcagtccagctgctctagctcctcggggctcaaggtccttaggatctcatcttcatctatgtctctgtatttctccagttccttctgatatgatgacatggtggcccccaccccctccccactgtgtggtactcacagagcctgggcaacatgggacaaaaggatggacaatggtaagatggacagggacacagcagggacacaaagagaccagccaggggggcagaacattggattggatttcttggagattagaagtctagttgaggatgggaagtggggaagattaggttgtttagagttagaactagagtctcctttctgcttccccagcttccagccactctggatggggatcccagacatctaagctgggtttgtcttcccacggtatgacagagaaatcctggcagcacccctcccctataacctcacttgtcagtgccttcgccctaacacagctgctggaagccctgccaacacagctggtcctatgcccagttcctattgaaaggggatgaggggtgggggaatagagagcttcagggaaattcctcctctcctcctcataatccaggctttttcctaaaccggataaaaaaaccaaggacaatgaggtgtaaggggaagagagagtctcttaccccatcctcatttcccttttattgtgggggatcaagatttcactttctgtgtttgctaaaatttgaagtcttaagggaaagcaagggctcggagcagttgggggacttccaggttgggggaagggtagtaaggcctctgtgagtccccataatctgtcccttgctttggacaggaaggtgacaccagaccaatgggtgtaaatagggtaaagtttctttaaaaacagtgggaatattaaactcgcacaattttgtacaatataagatacgcataaggagctatgcatacacaccatgctgaatatgaaagatccagaaagtatgtgagacacatcgacaatgtaaactatacacagttaaggggtaggacggcacagtggcagaaatatacactgagtgacagagacagggacacactccacatcattccccataggagccactcttctcctcccatctcccaccgggctctcatccataagccccctgtcttccccacctaccagtcctggtggtcacctcccttctcacctcccctgtgtcagtaggtctgtctgttctactagagcactgtcccagcagcaggaggagcccggtgccgggggagagggtgggggaacagtgagctcagcattttattattttagctctggccaggtggggggtagtgggagatcacatatacacagcccccataccctgcccagccctgagagcctctagtggtcattaacagccatggcatctcttccacttcccttcatacaagccccagtctgagacatatgagttcgactagaatcagccagttcctccttatttggtgcctgctgtattcaaaacagtgagtgtaaagtgataggaaggtcaatacaaggatgtgttttggtgtgcaattttcagatgtttataatttagttggaggaatgaatacaatttagaaaggacagctcataataaatgctatcgaataaagacccaaatatatgcaggtattcaaatacttcttgctcccaaccctagactggacaccagacaaaagggatctttctattttattagattaaaaaacacaacgaaacctgtaagaactaggggaaaaggaaaaagaaacagattaggcaaagatcagagatgacaaaggggagaagcagggagaagaaacggaacagcaagagccccaatcagggcaggaaagaagtttctgaggactagacatctcttcatttaatgacaattttctggcgcaaggctcggggcccagagccagggaggggctcaggaggtggcgggccggggcccagggctgaggcagtgggcggcagtccatgggcagtaatgtacttcttgtaagcctcacgaatgatcttgaaggctcgagcagtggcatagggtatgtctgtaacagggtcccggtatagggctggacgatgggtcactggacagacctcacgaacagggacttttgggggccgcccttgggggaaccattcctcgaaagttgcatcatcactaaaagtgatgaaggtacgtgagcagcgagcaggggggttgacgggtccagtcccagcatgaggagtcaatgcagacaccgagggagcaggatcaagtctgaggacaaaagacaaggaaaaacacaaagagctgaggagagaagacaacagatacagaaagaaggaaatcaggctgggtgcagtggctcacacctgtaattccagcactttgggaggctgaggcaggcagatgacgaggtcaggagttcgagaccagcctgactaacaaggtgaaaccctgtctctactaaaaatacaaaaattagccgggcgtggtggcggatgcctgtaatcacagctactcaggaggttgaggcaggagaatcacttgaagccaggaggcggaggttgcatggaaccaagatcgtgccattacactccagcctgggtgacagagcagcgagactccatctcaaaaaaaaaaaaaaaagaaaagaaagaaagaaggaaatcagagagatgaggaaagagaaaaaggaggcagggtgttgggaacattctgaggaacgtactaagtgactgatgggaaaagaaagctaggctagaaggaaaaacaggaaagagaagaacagagaagctaaaagaaaaaggaataagaaagaaataagctgggctgggcgcggtggctcacacctgtaatcccagtattttaggaagatgaagcgggacgattactttaacccaggagtctgggcaacacagcgaaaccgtctctacaaaaaatacaaaaattagcatgtgtggctgtactcccagctacttgggaggctaaggtgggaggatcgcctgagcacaggaggtggaggttgcagtgagccgagactgcaccactgcattccagcctaggtgacagagcagcatcatgtctcaaaaaaaaaaaaagaaaaagaaattgagctgaagggagttaggaatctgaaagaaatctccaagtgttaaggagagctgtgtgagaaaagcaagcaaaatggggccaagagaacatgagctgaacacacaatctcttttcctcttgagattcactcacccttctatgtcaacgttctcttccttggggcctggctccccaacaagtggcactgtcactgaatgataggtg

SEQ ID NO: 2258 - DNA, 4001 bp, Homo sapiens
aaatggcttttcccttttctgttgcttctttagtttccatgtcatcatcatctttgtttgtcatcctctccgccccctggggcccctcagtcctctatgccttgctcctgcctgctttttccccttagtgctgtagcaaatcttgactccaaaacagcccacgggagtggcgatagccccggctggaggaatgtgggcacacgggaggctagcctagcacaagttacatctcaaggggaagtaggctgttgctgctgcagtgaagacagggcttacctgacagataattctttttttttttttttttgagacggagtcttgctttgtcacccaggctggagtgcagtggtgtgatctctgttcactgcaacctccacctcccgggttcaagctattctcctgcctcagcttcccaagtagttgggattacaggcacccaccaccacgcccggctaatttttgtatttttagtagagacagcgtttcaccatgttggccagactggtctcgaactcctgacctcatgatctgcccacctcggcctcccaaagtgccgggaatacaggcgtgagccaccacgcccagcctgacagaattcttacagctaccatttttggacactgactctgtgccatatgtctgtgtggcatagatattaccatccttgttttacagctaagcaaatgatacttacattaagtaatttacccaagatcaaacgcaactcattttttggcccccaaagccagtggcagctagtgcactatacttcctttaaagtaagaagcataagcatcccaggaatcctaataggagtaataactaacatttactgagaacctactatatgcaagtgctttacgtcagtcatcttagccttcccaatcctgtgtaaggttagggtaggtatccccattttgcaatgagaaaactgaagcgaagagaaatatagcaatttggccaaagtcactagtaaattataaagatgggcttcaaaccaaataatccagagaaacctccttccccggaatgctcccagtgtggttaaagcacactgaggaagcacgagaagccaacacctcaagaagggcaggcagtcctgaaggtctgagccttctgctacactgaactcaggaccctcttggtggcatatcagctccatgtgtccagggttctctccccatggtcttcgcctgtggttcttctggttgttttgcttcttacttccccctcctctgctctgcaggatgtggctgtgaccgcagtgaggagcagcctcgccctctcccccaaaccaaaatgggagtctgaagaggcagaggaggtggagactgtgggggtttttttccccagctgaatccttccagtggaaacctgaaccttgctttgctcccagcttgccttggggctttctggaccatgctccccagccggaagaggagattgctccatgtgagccttccttcctccttggccttcctgttacccagctctccattgcccccattgccgtctcacatttattccgctgtcttctccctctctccctgtttcagtctccctttttctcttgtctgggtcctccctatgatcctctggcctggccatactctccctctggcccttacccatctatctccttgtttcctaagatttccttgcatttcgcacacatccatatggatgtggatccacctgcatccctcagccctgcccccaccgcatccaaaaccaggtctttcagaggctgccttgccaccagaaaaactaagctaagctctacaaaggacccaagaattgtacaagcgagagtttcacaatatgaaaagctaagactgaaagagctagagattcctctgccaccattacccctaaagtctaccattctgtcactgccggtccctcacctgctgtgctgggtgccagtcttgccttggatgttcccggaaagcttacagaatggagaagcttcacttagtgtgagagccctttggcttggccccaccccttgagccccgcctacctactctctgcttaacctccggttcatcacttctgtcaccaagaaggcctatggcccaagagcaacctagaaataagacaaaggtcaaaaagagtggaattctgttggaaatagtctcaattctttgaaggggggaaagggatttgcatcctccactctcaaattgcttctttcttttcttgctgcccagttcctgaagatcctgtccttacatttctacagtactgggaaggatgtaaagcccaaatttctggggtaggaggtcagtgggaaaagttctgaagattgaaaggtggtgctgtggggcaagtatttaatatattattccagtgattgccaggtaagagcacagactgtcacaacccttaatactgaagggaggaaggtgctgggaccagggctgctgcaccacaggtgaccagcaggtgccagcacagcactgaatcactagcgtagaggaacaagcctactgagttgcctttttttttttttttttttttttttttgagacagagttttgctcttgttgcccaggctggagtgcaatggggtgatctcggctcactgcaacctctgcctcccgggttcaagtgattctcctgcctcaacctcccaagtagctgaaattacaggcctgtgccaccatgcctggcttattttgtatttttagtagagacggtttcaccatgttggccaggatcgtcttgaactcctgacctcaggtgatccaccttggccttccagagtgctgggattacaggtgtgagccaacgcaccccgcagggcctactgagtaggctactgtagtagctactttgtagctgctaaagggatacaaaatgaggggaagccacaattgggttttgtttgtttgtttgttgttttgtttttgagatagggtctcactctgtcgcccaggccacagtgcagtggcatcatcacagctgactgcagccttgacctcctgggctcaagagctcttcctacttcagcctcccaagtagctgggaccagaggctcacaagccttccttttttttgtagagaggagggtctaactatgttgcccaggctgaacttctaagctcaagcaatcctcctaccttagtctcccaaagtgttgggattacaggcgtgagccactgcacccatcctggaagtcacagttgttgaatgagacaaaaacacttgctatcaagaatcttatggggaatctggcgagggaaataagcttaaacataaagaacagtaatactagtcaaacaatgccattaactttaatggagatttaaataattttgagagtaaagaagcttaattatgatagggctgaagaggtagacttggaaagatagattcaactacttaatagccagagatggggaagaagtcccagatgatggggacggcataagcacatgcaggaaaaaaacaaaatacaggacgttctcaggaagtggtgatttatgtctggaatgtaagttgtttgagagataagtgaagaaggaaaaagatcagatcatggcaaactttaaaaaagttgccccaggccgggcgcggtggctcatgactgtaatcccagcactttgggaagccaaggtgggtggatcacctgaggtcagaagtttgagaccagcctggccaacgtggtgaaaccctgtctcggctgggcatggtggctcacacctgtaatcccagcactttgggacaccgaggtgggcggatcacgaggttaggagatcaagaccatcctggctaacatggtgaaaccccatctctactaaaaatacaaaaattagctgggcatgatggcacatgcctgtagtcccagctactcgggaagctgaggcaggagattcgcttgaaccagggaggcagaggttgtagtgagccgagatcgcgcctctgccctccagcctggtgatagagtgagactcggtctccaaaaaaagaaaagaaaaaagaaaaagaataaaggg

SEQ ID NO: 2259 - DNA, 4001 bp, Homo sapiens
gcaggcctccttcacacgataacctgccgcccagagagtgggaacttcgcaagtctgcgggaggccccttcgggagcccacccatcactccacccgcgcccagagcccaagcagggagacaccagctaaggggactcaaatggcccatgagccccacgggacacagcagccccatcagccatgagcagagctgctctggggaaaatcggaaagttctggaagcacatggggcctcctgggacacctggcccggctctggtatgtgcccccgagcccatgtctctggccacggtgggccagccacgtctctcagacccaccccctgtgcagtgtgactgtgagggtcccccagggtgaagagtccaagctgctggcctgggggttctgccctcactgtctgcacacctagccccagggcttcatcacacccatggctgtgggggcagagaacacaggggtgtctggggcagaagggggcaagagtgtctgccctcggcccacagagctggcccgccaaagggctgcacctacctggactgcacttggggcagcactcggagcccactgggtactcgtcctccttgcaggacggcagagctggggcgtagcagggggctcccaggaaggtgagatacagcacctaagggggtcaggacaggcattgggagatgccctggctgccctgtgggctctgccaggcttggccccacagcctgaatctccctctgtgcaatggggaggagcggcagtgcctggtagagaggacagaagcgggccccaggccaggctcatggaacaaccttgccgaccgctggagcccgggatagggtggggaccgcccctcctccagccctgatgacgctgcctggcagcgcggagccctgggaactggaactctgccctcgccagggaccccacaccccacacctgggagcattgagcccactgggcagacaacctgccggcccccctgctggcctaggttggacctgctgacccctgaagagccagcaggggcagccagggatgggccccagaggctcacaagccagacagtgggtgacaggctgatcagggccacatcggggagggtggctctgccgtggcctcgttcctgggctggctgatgggcagtcgggggcccctgatggggatagtggctggacaggcaggagtgccacatgagcatggagagtatccccaccccacccacctgggtccagccccctgctgcacactgatcttatcacctgtcaccaaggtcagggctgccggggagttgggtcacctgctcgagggccccgcccagagacgcccagagacacccagcccccagaagtgcccacatccggccaaatgggggctcaccagctgcccgtggacggagtggtgagtgggggacacacgcaggaggaggtctgctgggtagggctgtggctctgctgctcaccccactgtggtgagcccagtgctgggggtctgggttgacccgagagccccaggcagcaggggacgggctggacgccggagccagcaacggccaggacaggggcatggggaagagatctgtgggaggccctggggtcagaactgggatctgcgagcagacggagaggaggctcgggggctcaccagcctcaagacgtcggttttgggggtggatctccagggaggaggcccccagtctccaggaggctccatgcctcaggctcagaccggcagctcgggaacccagctagcaggatgaactccagcagaggaactcagcgccattgctgcggctgtgggccagaagagaaagagaaagagaaagagaatccgcctcggtgtgacaagctgtgcctcagaacccgagcagcaggagagtgggcagcagggggtgtctggcagcagagaggggctcaggcctgctgggtggagcggcgctgggggacacaggtgggccctgcgggaggcaggagctgtccaggcaaagccgaggggaagggccggtatgaaggaggcgcccgatgggaggggcgagttctccccctgcaccattccagtccactccgggtttcctgtagaagggggagccccccaaagtccatctgtgtttccccacctcactcacacactcagggaccctcggctgctccccggggcgctgactgacatttttgccgaataaaggggccctgtgggtttcctgttcccatctcagcttctgctgaacagggtaaacttcccttccgaataaaaccaccagaatgcggtctggccaatttcagtcatagacccaccaggcctgtgtccctgcgtgagggggtgggaaaagcccagagtgcccctacccgtcccctgggaggggtggaagggcagctcttgctccccctgcagagacgctgcgcggactgggaaggctgccagcctcgcccggtctccctgtggaccctgccctgaccccaccccagcttcctggctccctgcaccccactgggcttccctgccccacagagcctggtggtagggagacctccggatggagacagcccacagtcccggagccccaaggcaggcaccagtgagtccctcgtgacggcctcgctccctgcatcacatggaacctcgtgacccacgtgacgacgccagtgcccccgtggccccttcctgctgctggacgtgatgcagtcaatggaagcccaggtctgtcacgcaccgcctgtgcttgcccagagcaggtcccagtcaccccctctggcaccgcctgctgcacaccaggaacccccacctccagcaagcccatctgccagacgcctggcccaggaccgccccctgcccctcgactgccccctgcccctcctggtcctgacttcagccaggtgaccccctccagggtccagccctggcccctgggggactcagtggcatctggtggaaaggaccttggggattgcgcccaccctcacctgcaggagagttggcagggtggccagccacaggaatctgtggcaggagcccggggacctgcaccccaactagaaagtgtgcagccctgcaggccggccctggagagggagcaggcaggggtgaagttaggccggctgtggtgtgcgacaccgtcctgtggggccaagcgtcccgagctccagaggcaggtgcactcctggccagcatccagggtggacgagcccagaccccaatactctgaggcagggtgggggaccaggtggcacccagtggaggaaaagcccccaagagacacgcaggagcatggactcccaccccacagctggagcctgggagaggagccccatctgctgtttccctggtgcactcacatcctggccctcagcgccccctgccaggaatgtcccccacatgcagagccatgtgggtcttgcaaggaagaagaagggggccccttgcatcctccactcccgggggccccaggagggcatgggggctccagggtgcagggacagcacgttccctcaccaactccccaagaacgcccaacctccaagagcagacacagcgcctacacctgccggtacggggctccaaccccactctctcagatacgtcctccagagtcgtctcatccaccccaccctggggaggagggaaactgaggcatggcaagagacaagactaacacaggcatcagtgagactcagcccctcctgccccttcctccatgcccctcctaccccgacttcagctcccacaccaaggccccaagcctgacatagggccccaggtgccaggcctcaagggggctgaagggagcccatctgccccaccgagggcacagacagtgccaggtctttgctgaaatgtcacctcttccttgaggccttctctgattgctgagtaagccctgtccccgctccctgctccccgtatccgcccgcctcggccctccgtcccttttctcccttctctgtggcctgcccgctctcacagaatgcagactccaggggtccagggtgttacctcccgggcagcaggaggaaatg

SEQ ID NO: 2260 - DNA, 4001 bp, Homo sapiens
gggaggtgcgcagagtgcagtgggcctgccagggaggggaaaggcctgcccattgggggctgagggtgggcagaagccaggcaggacccagtagaacagagggtggagaacagtgagggtcccagagagagtgaggctgggtcccagttgaccccagaccctgccccgtccaacctgacacaacctccccagttgtaccttctcccagctctcatgtgcccagcctgacctctcctgtcaggtaaacaagccgctaagaggacttgagctgctccttccagaacagggtgcagccccaggccccagacaggactccggggggcacagggcaggctctttcagtatgtggtgaggacagacaggatgggtgtcccgggcctgagagccagacagctcctggaacccgcccccacctccccgcagggttctcacagccctcgtgctggatggagaagcccaggctgagaaagcagggacaggacacccccagagcttcatggcctgtggtgcctgagcatggcctggcctgcccggcctcacaggactccggaccccacacaccacatgtcctcgccggacacctgtgcccacgagctctgcctcgggccctagtggaacccctggcctgtgtggactcccagaggcacctccaggacttaccctgggactgtaccccctggcctgggggacaagggtggtgccggcaggtcgtgcagcaagggtctccgcagtggaattcaggctggacacacatgcagtcccactcggaacagcactcctcgcctgggcaggagacaggccagccccccagcagctgggctgaggccccctcctccccaggcctcccctcggccctccaggggagtgaggttgtccgttctccacccacagttggctccagggagcagagggctcctggctgggagtctggaccctgggtttatccagctgtctctttctcctggggccatgtggcctggctactccccctttgcgccccacagctgcccctgcccaggtgctaactccatatgcaaccaggagctgcccctgcaggacccaggggtggcccccaacagtgcacagtcccctggaggcccgtcgacacctcagaggccgcctgcctggtgtctgggcgctgctgtccccaccaccagccacactgggcctccggacagagcctcccttcccaacccacaggccctggaggaagaagctctggggtgacttccctgccagcttcctctccagaccagccgtgtcagctgaaccctcatccccaggtgcaggtcagaggcaggcagcaggccagacggtggtgcaggggggccctcaactgggcaggagggggctgggcgatggccaagggctcacgacccgcccagcaggacctggaacagccgtcctccacctccagaccccagacccctcttgagggcgctcccacctggctcacccctgctcccggccggggccactggctggagctggcacacctccgcctccctctgggatcctgcctccctccggaaggctcccgctgctggcggctctgtgcccaccctccttagacctcagcaacgccggtctgagcacgggaaggggggcgcccacccatcccggcttccgcgggacgccttggccggtccgcgttaagtaaacgcggtttacttacccgggtaatcgcggcagcagcgcgtcgtgtgaacccggcagcagcgcgcgtccgttcccgtcccaagcaggaggcgcccagggccgcacccgggacccccggtggggcgctgacccaggctgagcgcgcacagcagcgccaggccgcacagggcccgaaacgcgcccatcgccccgtgctgtgccatgctcgggtttcaagagcccacagccagttggacacgccccgtccccgtcctcacccgccctgcccggaggtggctgggaccgttcatgacctgagaatcccgacccaggtgaagtgcgtgtgaggagggggtgtagacactgcggacacagcccggtcccccgcaggtcgccggcaggggcggggaaaccaggctggcggggatcagaaaggttttctatgcaaagtctgcggccacattggtgtccccagtgcagggggcggcgtttatagcaccttgtcccatgggggccccttggagggcgggggtcagccaatcactcctccatcccactgcctccgggtggtatctgcgagtccccgagaggtctccacaaattctggccacccccagagagcctcaaccatggagccccgtgctggggaaccccacagaatggggacagggacccctcggctcagcacaccccacctggctggcttcaggtgtgaaactcaccatgggctgcaggcctgtgggctcccctcccccttgcttgcagctctccaggacccccctcaggccaacctgggaagttccccggggcttgggaggggcaccaggaggagctggtggggagacgagagggtgctggcgcctcctcgggacagtgtcagccgcccccgcgggcacccagggcccggtctctcagagccaccttcatccgtcacaccagacagatccaggtcccggagggagttgaggaggagcccctcgcagagctcttgggagactgtcctatgtctttctgagcctcagtttcccctgtgggcaccgaggggttctgggaccctgcctccaccaggaagcctccctggattgcccagccctgcttctgcgccgtccagcacaggtggagacccccatgaatgctgggggtgggggctctcgggaacgtgagcgtggatgtggttcaacacccttttgagacctgcagccaccgcctcaccccgtaaggcggttcctccttttccaaggtaaatgacaggaattagctgtttgtgacaccccggagttctcaaatccaagatgtaggagcctgccttggagaggcagccctcagacactgcagagaaggaaggggtctctgcagctccaggccgccccgacgctcggaaggaaaggggtggggccagctgggcctgggggcctttgagaggcctggagatcttcagccccgaggctgggagggggtctgggcccctggatagaaagaggcgccatcagtggctcacgcccgtaatcccagcattttgggaggccgaggtgggcctcggatcacctgaggtcaggggttcgagaccagcctgacccacatggagaaagcccgtctctactaaaaatacaaaaaaaattagccaggcgtggtggcgcacgcctgtaatcccagctactcgggaggctgaggcaggagaattgcttgaacctgggaggcagaggttgcggcgaaccaagatggcaccattgcactccagcctgggtgacagagcgagactccatcacaaaaaataaagaatgctcatcagaccacacggtgtgagtcatccatctagaggcagggacagagttagaggagcgagcagtttatggggccaagtgggaggcggccagcgggcagaggagcccctcccccccgccccgtggcgcagctgacactttgaacagccggagagcagcttgccacacagggtggtccccggaggggctgcaggggtgtgacgtccaccctcccatccctctcgccgcagaaggcccctccccggctccccgtgactcctatccttgggctgcgaggctggaggtgacttgttcatcttattgagcagctcaccggtgacacaaatgacggggcattcacacagcagagcagcccacgggccgggcgagggacagcccttgcgtacgtccagaagggcagctgtgaggccccacggggagggtgcagatgggcactgagccagagttcaggcagggccttcggcacagatggcacaggagttgccagcagagatggcgtcaggcgagggggcggggagggtgagcatggagaccaagaggaggtggccccgtgtccatctgggggtgcggcaaggggtcctg

SEQ ID NO: 2261 - DNA, 4001 bp, Homo sapiens
gaccatcatcagttctacagaggcgggggagcacatgtgcagggaggcgcgaggaagagttcaggtaccttactctggcctgggatctccaggggagtttctgcctcaaccattgggagccacaggaggctccccaggcaaacagagaggtgcctcatgcttgagaagggtctctctgccaaggatcagcgggagagggggcagggccgggagaccagctacaaggctgcggcaatagtccgggtggggtcgtggggagcagggatgagggaggagggaatatgagctgccgcaggagctggtcaggaagggaaggaagtgggagggaacctcctccagctactccaggactgcagcctggtgtcctgctgagccctgtgcctgacacccctctcccatccaggggctcacatgaccccagagttcacccaggcaggcccaagctcagcggcaggaagaccccctctgaggccagagtatatggcatgaccccaaagtcaagctggggaccacggtcgtccccattcacactcggccctagagtggggactctcctgacccaaaggccacccaggacttactctggggcagttctccaggacccactcctgacacccactgtcggtgagtcaattctagtctgacagcccccatcttccacccacaagaactggactctctggcctcagatcaacaagtcaccttatgtcaccacagaagccagtgccacctcccaccttcctcctcggtcaagatgtcagatgggggcagatgggccatgtgtccatcaggggcggctctgaggaaggatgaacgcccaccttccccgcagcctcagggcacaggggccgaaggcaggagaggccccctttggaggaagagttccccccagacccttccatgaaatacaagttctctgagcctcagttttccttctctaaaaaatggtttatcttatcttaccaaaccatggagacagtaaaacaaaaatggggttatcctatgttaccagaccaggagacagtcaaaaacaggcaaagggtgcacagtcccttgtacgcccgttgctactgtgggagtgacgttcatattgaataggagccctagggtttctgctgtctccattttcctgcggcccccggagacttcatttgccttgctcgattaccagcccagacctccctcgcttgccctgtccccagaggccgcagaaaacagactctgcagtagcccccggacgcatcggaggaagcagacaggcagctcgccctccagctgtgccctcagtggacctgacacacacctggtcctgctcttcagacacaggaccctggtatttctaagaaatcggaaaaccgtcgcccagaggaaaaggaagtcttttgaagagggtgcccggcgtgggcagtggggcagcgccccggcacagccccttctccaccgcgtgggagggaagggctgtcgcggcagtcgccggggtgagggaagaggggtcccgggtctagcgggggtctgcccaggacccgctgctcagccccaaatgccccggcctgcgctcgcggaggaaccagggtgcgcccctgtcacgacgcgggtaagaggggcttcgggggccagagttgtgccccgagcgcacgtgtgccgggcccggagtccccagcgggtccccagaggcgcgcgtgtctgatgcggatggggggcggcgactgggactcccagcctcccagcccgtgacagcgccccgggagagcgcggcccgggcacccgaaggctgcgcaccagccgggtggacatgcggggcggctgtcccccgtgggccgcgcgagtcacccacctgggcgggcaaggcgtgcgccgcagcccagagctccagtccgacggccagcgcggcccagacggcgacgggcgccatgggtgcgggcggggtccggttgccccctgccctcgcgccctcgcgccctcgcagcccagcgccttctctccaggctccgctgcgctcgctagccctcgactgaaagcgaaagcccgcgccccagcgggccagaggccaggcggcggggcggggcggggccagccggccttggacacgcctcccccacgcccctccccagacgctgctgggcctccgacccgaccactccagcatcgctgggccgatacctccagcgtcactcccagcactcgggtgacccctcaacctcctcctatcgtcccctcctcttcgaatcaccatctccacctgcccggcctccacctgcccggcctccacctgccctcccagctcccacaggcttccctgtcccgtgagggtgaggcactaatttggaaaaacatcccccaaagctgacagctgctttaggggaaccaagagaattctagatcattcacttatttagactctattttaaatatatttaattcttattttttaattttttttgagacaaggtctcactctttcacccatagctcactgcagcctccaactcctgcgctcaagcgatcctcccacctcagcctcccgagtagctgggactacaggctcgggccaccatgctaggctgatttctttatagagatggggtttcgccatgttgtccaggctggtctcgaactcctgagctcacgtgttcttcccaccctcaagtgatcttcccgcctctggcctcccaaggtgctgggattataggtgtgagccactgcactcggcctgtttagactctagagccagaccacctgggtctggatctctgaactgacctcataggactattctaaaaatttaaagatatgtaatatacataatgcagtctgtactttatatatacttaagtaagtatctacatatataacaataggcatttataaatcttggctgttgttactactcttcgcgtgttcatttatccttaaacacgcatccagccttctcacagggagaagactctgcacttccctgctcaagtctcctgcccaggcagggggcagatgaacagaggctgggagagaatgtcaccagggaagctgcagggccctgaggggctgctgagaccaggcccaggagagctggcttccccaggatttacatcatgaccgagcacccattccagctgcaatctgtccccccatccccactttgagtgccagccctaatacagggccagccctgcggggccagagcacattcctccagccctggattacgggggtcctagcccccagcacatagggcatttctaagggttggggtgggctgggtggcaggaggctattctgttccctgtttcctcactgcaggctgcctgaagaggtacagagacccttgctcccggccaccagccccacagtggagcctgcaaggatggtgcttctaggtgctgagtgctgagtgagaaactgggaagtgactccctggggatggaaaaccccacctcctgaccaggaggctgggaaatcacctggtttccacatgtttctgtgacatggaccacgctgagggtgtggctggtatgacccacagccttaactctgcagagccgctggacagacatgcagagctcttctggcccttatgagaatgcctaggagcagctccaaggactccttgatccctaaaatagagctgaaggcaggagggagatgtcacctcgtggaagcaggggacaatagttctctctagttgtcccccacacacctcaagaccaatgggaccaacagactgtctgcacccccaaccctcaacaaccggctcctcctgccagtttccctatcccagtgaatggcaccatcacctcctgaaggtggggatcctcccaggcttaggtcccatcctgggaacgaattcaagcttaatctctatgcaacatggggcttctccccttctccaggccgacccaggcttgagagcaggcgacttctctctgaactctgccaagtgcagttcttgactccagggtcaggcccaggggtgagggtttgggaaggaaagggcacagtgttcc

SEQ ID NO: 2262 - DNA, 4001 bp, Homo sapiens
tccagattgctcttttgccatctaagtttgcctgaagtggggcccacccatcacagggccaaggctccctcctccctatcccctcttcctattcctgaaccagcagcacctgccccaccccaggcccctgctctgctcccagccgcccttccctccatcccacgacagctaggaattacgtggggcaggacacgcagccatcgccatgttcatagaagccaggcaggcaggtcccacagtcagtatctctgcgggaacctgcaatccaggagaggcatgcgtcaccatgggacaggagtgggtcaggcagggagaagggggtctgggagtagagagccctgggtgggggtactcacagagtagccgtgtgtggcggtgcagggccccgcagtctaggcatggttggcagtagaagggtgaactgctgacacattggctgacctggcactccacaaaccagcctggcttacagccacagcgggtgtcggccactgctgaacagttctccagcgccacctgggaggctggtgggggtgcagggagatggggagtggagagttagtcagggccaaaggctcccatggagaggcagaggcattatcccaagataatggagacagaaataggcgaaagacagacaggtacagggctaccctaaaaaagagagaagctcagagattaaggccgaccagaggccaaggcacatggagagatgggaaggtcaccaggaagagagaaggggcaagggcaccctgaaggaggatcagggtggagggttctggcaagggtgggtgcaggaccctcacaccccaagtttgggcccgagccagccacttccttcagaaaggcctgtccttaggaactccctgccaagcactgagaagcccctcaccctgctcatcacaggcctggcagcgggcacattcagaattatggtggttctcccaggccaagaaggtgtcttggggacacacaaggcaggtggagttgccgcagggctccgtgcaaggggccttcaggtagtgccctgtggaaccaggcaggggtcaggcaggcagaggggctgcccagcaacccccgacctgcttcccaccctgccctccctccctctttctctccagctccctacttctctgtcagcctacccctacctcccctgccagcctcctcttacctcccgggcctgcccgccacctctccagccctgcctgccccatgcctctcccacccctgtggccacttacccgctgggcagcctctgcaacaaaacagaccaatcttcttgtggaagtcaccggcacagtcacacctggggctacgagtgccgccctgggcccgggcccccagcagcaccaggaggagcgcctgggggacaggtgctgctgactctcagcgcagctgcccacgtggggcctctccctgctgcgtctcctccatttcagaggccccagcatttgcccacagagcagcccacttcccaggccccgggcagaaggggtgcccatgggtggagaggaaactaacttccttccccccgcgcacacaccaggcttcggagggggcgcttaccagcccctcacaagtttcccctccaccagagcaggaatccagcagcgcccccacccccacccatgctttctgttgggggagggacactgataatgctctgcctggggcccccagaccctcctgggaggggtttcctctcagtggaagggctacgccctggaggagcctttaacgagatcggaaagggcggccaacccagcccccagtgaggcttggagtggagacgcgcccggggccccttccttcaccgaggctcttgggacagggctcaaagctgcccctagcctcctgcgtctcaactcaccgccgccaccgccgcgcagccccgcggccgctgctccatagccctccgacgggcgcccaggggcttcccggctccgtgctctctgcccgtcgtggttccgccttcagccccgcgcccgcagggcccgccccgcgccgtcgagaagggcccgcctggcgggcggggggaggcggggccgcccgagcccaaccgagtccgaccaggtgccccctctgctcggcctagacctgagctcattaggcggcagcggacaggccaagtagaacacgcgaagcgctgggctgcctgctgcgaccaggggcacaggatagagctgcatctcggtccccaccccgactctcgccccaaccctgagaaccacttcaaggtagagccagggcaagtgacttctctctcggcctccgcgtccccagccatggaggaggttgggccaaaagtaccgcaaggggccaagcgcagtagctcaggcctgtaattctagcactatgggaggcagaggcgggcggaacacttggggtcaggagttcgagaccagcctgaccaatatggtgaaatgccgtctctacttaaaatacaaaaactagcccggcgtggtggtgcacacctgcagttccagctactagagtggctggggcaggagaatcgtttgaacccgggaggcagaggttgcagtgagccgacatcacaccactgcactccaacctaggtgacagagtgagactctgtattaaaaaaaaaaaaaaagttcctgaagggacccccatggaggacccaccttcccaagagggctggcctgagtgtgggaactgggcagattcagccctgaatccccggggggcacctggggagaggctctgatggtggctgaaggtggggaagtctgggggtgttggtctggtggcaccccacaccccattacttcccagtgcttcccatggcaagctccatccgtggcccatccgtggcaagtggaggagcacaggaacacaaggaggccgccctgaactcaagtgccccgagtcactgggccccaaagcaaaggactcttcccagtggagtctagacaagtctttataaaagaaccaaaagctcaataaatacgtaacttcacagaacccagcccaagccaggggtggcctgtgggactgggaaggtgggggcagggcaggagtgaatcccactggaggccagtgagggtagaagtaggatgggcagcctaggagcccagccctgaagactcgagctgagctggtaacttcggggagtaggtgacgaggggctgcctgggcaggtggggtggtactgtggcctgggcctcctccactccatccagtccggcaaagcgcaaatcgggcccgggcgtaggcagggatcctgcccagcatccggctcatgcatacaggaggcagtagctgaagcaggtgccggcacgccccaggaggcaggctgtctgctgtctcttggtcaatggcactcttgggggcctccctctgctcagacctccctacagggtggggaggggacagagtccttctttggctgacgccattcagagtggctctggtcaccctctcttccccacggcactcctcaggccccttcactgctgcccaccacagccccctgcgcccagacactgggcagggttcaggctccctccgccatgaccctccccaaatgcgatgctcccaggcatgagtgggcccccatgccagtgccctgagccacctgccctaccccagtccaggccactcacgaggcagtgagcgtggagttaagcagcagggtggtcctgattcggtagagctgggccagggtcagcttcctgtgctgggcagagacccctggtgggggctcaggctggaccctgggagaggcccccgagggcaggtctccacacctcttcctgtgggagcctgcaggttccccggccaggcagccgactagcccaggaccgctgccagggctaggggcccctcggcaatcccagctgggcccagcttcctgaggggagccctgagtcctaatacctggggctggaacagccaggcagagctctgacaggctgcggctgggggcagagggtgtcccatgggtgccagcccctgccagcagctggaggaggctg

SEQ ID NO: 2263 - DNA, 4001 bp, Homo sapiens
cagaaaccccctgggacccgggagatgcggtggggataacagggtccacgctggccagccacaggcagcatctaccacagacaccaggccagtgacagccaaggacgctgcccagccccacgtgccccccacaggggcctccaaggccacacacccttctcccacatctacaccccccaccagcacctccctgtcctgtgcccccagggcctcccagctgcggagggtgagggtcccacacacccagctccacccacagggaaaggctgcccccaggcagcagcttcctgctccccaaccaggtccagccacatagccaggcccccagggccaccagcacctccccttcccccaaaactgcccccaccccacctgcccccccagcccctcccagctccccagctcctccgccctcctaaccaccccaacccccccccagcccctcccagcccctggccaggcccctcacttggtccagggcttgcaggcctggttgtcgcctggggagaagtgccctggagggcagggggcacagtctgcaacaaagatagggtggtcaggggctgcccacaggccccgggtgctggggacatggggcagagcctgtggggcaggcacttgccccccatggctgggtggtgggtttggcctctggaagccctccctgcccacatcccacccgtgggccctgacccgggagctcggtcttgaggatgccagaggaggcaccggtggggccaggtccctgcggcccacggcccatctgcgtcacagacagccgctatgcacacccccaaccgccggccgcagccaccgagctcaccaactccaggcttgtagctgtccaggggctgggtgcccgcccggcagcggcagactgtgtcctgtgtggccgtgcacagctgcttccgctcactcccacttcctgagcaggggccggatgggggggtggtcaggtgggggctgtggacagggtcctcaggaagcgtgggcactggaggacaggttggcctccccaccacacagagggccgtgggcaggggtctgcggcctcccctgagacttggagcccctgcagcccccgaggctcctgggccctcccttcctggccacaacctggggctggttccgtggcagccccagccacccttccctacccctccaccgcctccagccgccagccccgcctgcggcagggtctccatggcccaaccccccagcctcactgctcaggccagcaaggccaggccacatggccagcgtggtctccccgactccacgtggcctgggccgagtctgggcccccggagggagagggggtgcccctgggagacgcctcagctcctcgaaggacccctgtggcggagcagaccccgctgtggtttgaggttcgtttctgcggctgtgggagccccatgctgctgcgtgggaatgtgggtgccaggctgccgccccctgtgctgggtggggctgtggggccaggtgggagctcactgaggttacaccacgtgcagggcttgcacggcttggagctgaccacgtcgttgtagaagcccggcccgcacggacggcacaccgtgttctgggagcggctgcagcggctcaccatcccgttgcctgcagcagaggccggcgtcaggcagcggtcaggccccaggcttgcgcccgtggacccccccaggcggctcctctgccaggcttggccggcccctcacccgccccctccccaggaccagcctcctggctggcccatccctgccccagcccccagtccctggagtgcccgtgcgtggcgacccctcctgaggcctcacctggcctgcactcgtggcagcaccggtcgttgctggggtaggtgtccccgacacagtggagccccgtcacggtgctcagccccaggcccaggaggagcagagccgcacacggcccgcggcccagccgccgagcccccacgcacatcctcgtctctgctgtcgccagagtctgggttttccttgcggggtgtggctataaggactgtggaggaggggaggggagaggggaggagggcagaggaggcgggaggaggaaggtggcaggccggggaccctggctgtgggctgggcacaaaggcggggtctgggcacccccagcattggcttattctgccttctgacctcttctgcccaagaccaccgtgttcagaccccagggcacagtagggcctggcctgcggctcgaccctcagcaaaaaggtccatggagcacgtgggtaaactgaggcagcactgagtcaggagaggcaactcctcagtctggaccttcagggctgtggcactgctgaagcatggtcccccttgtatgcccaagactagctctgagcagcagtgaccacagccatggtaagacagacacccatggccaggcacggtggctcccgcctgtaatcccagcactttgggaggccaaggcgggtggatcacctgaggtcaggagttcaagaccagtctggctaacatggcgaaatcccgtctctactaaaactacaaaaattattcgggcgtggtggcgggcgccggtaatcccagctagtcaggaggctgaggtagcagaatcactcgaacccaggagacagaagttgcaaagcagaggtggcgccactgcactccagcctgggcgacagggcgagactcatctcaaaaaaaaaaaaaaagacacccgtgaccacagcccacgctgagtgtgcctgagcacggcaggtgtctatggctgaactgtgccccttaaattcctgcgtggaagccctaacccccatgtggcagtgtttggagacaggcctctgaggaggtggtgagggtgggtcctggatggcctggcgcacacgggcacgcaggcaggtttccaccttctatgcaaacagttctcaggttccaggtttgcccagaggatgcgaactgcccggagagctggggagcaggtgcggggctgggggctccctgggccctttctgcacctttcaaataactgtgaccagcctgtgattatccaaaagttcatttttgaagttgcaagtggagaggggcctctaggaacagagcagcagggaaggggctggaaatcccctcctcccaggagcacaggaaacagctgcctgtcctcggcccacccgtggggaaattcccagccgtggagcccgctggccctggagagggagggagtggagggagaggccacccgccctcggactgagggtccctaagttggtcaccctccccacgtccccacaagtagagaggaccctggaagggctcagagcatcccagacagtgtgtgtacctgcatgtgcacaccccaacccaggtgggcagaggaggaaagttctggcattttgtggaaggttccacccagcgttcacaagggtttcccactgacagtgagaaaaagcttacatttgcaattggttccttggaggttcaggtgaactgggggtcttggtgggcaacactgctctcctggggcctaagtggccacatctgcccacaggtgcagtgagtggggcccgtgcaccatggagagggcacccccagcatattgctggcaactgcaatggccccaggatggggcacggcccctcctgcttgaagctgcccaggaagctcaggtctccttgtcctgggcttaaggtcacaggtccaagaaagccctgctgtgtccatggaaccgggtgtggcgtggccacaggaggctggacactgacccagagctcaggacccccaaggtctgtaaggcagcctgcagctcgaaccacatccccaggagctgggctccccgctccacacagtagtgtcgcgggcggcacagggcagcccatgagtggccactgctcctccagtaccagactggagctggctggggcctctgaagggccaggtgccaccacatacccagctgtccccccgccttcatgtccagcacagcatggcctcagctcacacctcccacctctgggtgcacggccctca

SEQ ID NO: 2264 - DNA, 4001 bp, Homo sapiens
ggtgtggtggctcatgcctgtaaccctagcactttgggaggccgagacggaaggatcacttgaggtcaggagttcgagaccagactgaccaacatggtgaaacctcatctttactaaaaatacaaaaattagccgggtgtggtggcacatgcctgtaatcccagctacctgggaggctgaggcaggagaatcacttgaatccgggaggcagaggttgcagtgagccgagatcgagcattgcactccagcatgggcaacaagagtgagactcagtctcaaaaaaaaaaaaaaaaaaaaaaggtttggtatgagagttcaggctgtagtgagttatgatcgcactccagcctggacaacagagtgagaccctgtctctaacattaaaaaaagtggagggggcttcactctacagaaaggaagcacatgagcttcagctgccaaaccaaaccagcaaagccccccaagcacctctcacatctcttccttcccttcatctccccaagaccttggcactccaaactcttaccttcccccaggtgagggcttgcagagctgggacagggtgtctctagccagggctttgtcccctctgccctcttggggggaaagggggaatacctcacattgcccattggaaatggaagagggcatagttcctcctttgctgcatagttcctccctcctgcctaaagcccactctgccactctcctcccactgcctaaggttcagatgactagaattgatccatagcatggagtcctctcttcctgtaggattaaaggggaactgggtcttccctctcccccaccgtgacccaccgctggactaacagcctgctccttcctttccctctgtatcattcagcaggcatccactcgcacctactatggttctatgcaggggtccaccggggtcctgggtcagctgagggcctctctctccagcagcccctgggctccgtgaaacacgcctggttactttgcattctccccacagtgattaatttggcgctggccactggtaagtgctcagttttcctaaagcagtccccaaactcaattctgaggcaacccaccatagacttcagccccaccactgaccttcttccaggggcaaatgcccaccacgtgctccagcgaattcaatccacagcgttgctttgccggacgcggattggggaagctaatcccggtggtcctgcaccctcaccccactctcacccacagccaactctccctcctttccttgaccctccagccagtggccagcttaggaagggggcaaacgggaccgcgcacacaacagggtagagcgcggacgaccaacctcccatggctaagggaggccccatctggcctgcccactactcccacggcctcacctgatctgcccaggaccccgacgggcccgcaggtaggcgggctaaagagcgcctcccgcgtatggcagtgctctcagtccaattcacactgaatgaatgaatcagtcccagccatcgcggggtgagaaggaggcgccccccaccactagcccttcagccagcctcccacctgtgggtgctagcatattccggtgttcctgcttgtcacccgcgccccctcactccagctgggcagggaacggggtgaggagtgtcctcccttgcgtcccacgcaccccacactgtccgggctctggaccgccggcacctccccaggcgcccgtcacccgcttacctgtgggaaggctcgtagcgcccccaggaacagcagtcccagcgcggcgaggaggacgcgcatccccggggccggacgtgaggtggcctggcggccggcgcccacctgggaagcgggggaagcgcgcggcgcccacgtgcggtcccggcggttctcagccgcgcgcgtggacttcaggctccagcacactcccgccgcggccacctagtccgcacccaacgcacgccgcgaagtcacttcaaaagtggttgttcctccgaggtttcagccttagttctcccgtatcaaattggttccaggaacacttagctacaagcagcgaagaaaaaagggggcaaacacgtgcagagatgactcaggaaaaggcacactaggagacgcctcccttagctgtttgaatggcccgccccggatttgacggaactagtggtcctggctctagggagtgtgctgcccgccgcacctgggctgcggggagcggaggcaggcagcttctggccctggaggtggggactcacaggatattaggaggccccaagggggttccaatgcccccacctccactcctgccccaagaaacggtgaaatgtgagtagtttcctgtccctgacacgatcagccaggaccttctcccatgcccttgagattctttggaagggacaactggcctagggagactgcagaaaaagcaaccatcacccacccatccccattcataagcatttgctgtaaaatgaatcagtgagtggatgataaattggtggatggatggatggatggatggatgcataggtggatggatggatggatggatggatggatggatggatggatggatgcataagtggatggatggatggatggatggatggatggatggatggatggatgcataggtggatggatggatggatggatggatggatggatggatggatggatgcataagtggatggatggatggatggatggatggatgcataagtggatggatggatggatggatggatgggtgagcagcaggtgagtgggtaaatgggtgggtggatgggtggatggatggatgcatagatggatggatggatggatgcataggtggatggatggatggatggatggatggatggatgcataagtggatggatggatggatggatggatggatggatggatggatggatggatgcataggtggatggatggatggatggatggatggatggatggatggatgcataagtggatggatggatgcataagtggatggatggatggatggatggatggatggatggatggatgggtgagcagcaggtgagtgggtaaatgggtgggtggatgggtggatggatggatgcatagatggatggatggatggatgcataggtggatggatggatggatggatgagcagcaggtgagtgggtaaatgggtgggtggattggtagatggatggactgaatgttggaggaactgatggatggtatagatcattttatttccctgaggcctgaccctttagagttttcttcctggaggaggcggctggcactctctcctaacagaaatgattcaagcctcctcgtactatgttctcatttgctggtgaatgattttcccttccagtgcttccccatcccctgggttttctctttgctccttttattccacattccgtgtgtctgtgttgagcatctgctgggtgggccacaggtcaagggttcttttgactgattttgtttggttttcagatgtgaaagccaaggctcagaaataggcaggcagtcctaggtgctctaattaagggtgggccagttattttccctgagcccagaatagcctaaggatactctggcttctgtgtctaccttgatctgtcctgcgaggtaccaggcctccatcaggtgaaggccctatagggtaggagtgataacctcccaccaggaacttcccagcaaggtctccacaactgaccactccatgctcaaccctcctggggctgctggactccacttgggaaaactgctccatcatgccccttcccaagagacccacttccagactctcctctggatgtaccaggcccagtatcttaggctgtttgagctgggactatgttaaacaatgaggtaagcaattatggaagtgacctgcctgtgataatgacagaaccagacagggacaggaggaacgcaagacacctgcttcccagtccagagctttctactacaaaagtagaaaagctggcagctgggtgacatggctcatatctgtaatcccaaca

SEQ ID NO: 2265 - DNA, 4001 bp, Homo sapiens
aacagtgatcagcattttgccatatgcggtcccctaactccatagtcactgtaatgcaatagctgccattacttgagcacagccgatgtgccaggcatcagagatgcactgcggtgaatacacactatcctcgaaagaaccctagaacttggtatgactgctgttgttactgggagaacactatgcaaatgaggaaagtggggctgcaagtggaattagagcgtcaacaggacagggagcaggcagggttggaacccaggtcggcctggtcccttatcgtgctcctccgggcatgggtgacagagggaggaaggagggagaaatggagggaaatggaaacaggggaagcacagcagtcacacggcaagtcaatgaccaggacgtggttcggtgaagctgagagctaggagggatttttagaaaaccatgatttcaatttttctttaaaaaaaaaaaaaggagaaagagaccaggcgcggtgactcatgcctgtaatcccaacacttgggaggccgaggtggatggatcatctgaggtcaggagtttgacactagactgtccaacatggcaaaaacctgtctctactaaaattacaaaaattagcagggaatggtggcggtggacccctttaatcccagctactgaggctgaggcaggagaatcgcttgaacctgggaagtagaggttgcagtgagccgagattgcgccactgcactccagccacaaaaaaaaaaaaaaaaagaagaagaagaagaagaagaggaagaggagggcagagaaagcagaaggaaaaaaaagtacagtaagaggagaggaggagtataaggagaaagaagagggagaagaggaggaggaggagaaaaataaagagaaaaggaggaggaggaggaagaagaaaagaacagaaagagaaggggaagaggaagaggagaaggaagaatgaggaggagaaagaatgagacggaagaatgaggagaaggaagagtgaggaggagaaagaatgagaaggaagaatgaggagaaggaaaaaggggtgtttctggaggaggaggaggaggaggaggaggaggaggaggcggctgctccaggctgtagatgaacctgcccatcattgagcagctggagaacctcaggaaaaccaggggaactgtggctggggcaggcgtgggctggggaaggacatcgagagtagcttgggccgtcctcctgccccgcggttcccagcacgagctctcccgacagaagaggaaaacgcggcgcgactcggttgggggacagcgctgagatgcggacagatgcggacgttctgccgccgcctgcaggcagagggactcggagatcaggccgcagaagcagaagaaggcagacgggaaggaggaggaaggaaaggagccttgtggcttcgtgtccgaccctcccgcccttggcccgcgtgcctggagccagccccaccgcgcccgcgtttcctcccgcgggacttcccttggccctgggtctgcagcgggtcctgccgagcttccttccctcaggcagcctctctctccctggccactctcgggggtgaggggggttaccggttcccagtgatttttattccctttgctctctcacgcctcatgttccccattctcctgcctcagttgtgtaatcttgagcaaatttctcaacctccctaactctgtttttgcaagcacatcttacaggtgcagtgacaccatacatcttcctcgtgagtgaggattaaatgagacgatgagcatgaaatacttagctcaatgcttggcacatagttctcaagaaagtaggaattgctatgatcagacttactggtttgaaatgttccttccctgcctcccacactgaccatcagtagagccaccacagggcaagtcatgacagaaaaggagaaaaacgcatgagctgcctgcaaaatgtgttcccaaatactgacggtcatctgagagttatcttacctgtgacatctgtgggatccctccttgccccactttggcagaaattggctgaatgtgagagtgtcacaccataaaaatcggactgctgatcccctcctaacactttgaaagtcaccatctaaccaagtaatctccttgtttacatgtggtactctgtttaacattgcagtgtgacatttaactgggccatatttcatttaactaaatgctactcactagtctacgttttggacattctgtaggcagagacattacttcctctgaaagtgacatatttagtttcccagcacagtaattagctcactatttcaggcttttatgccagtaacataagagtctttactgagctaaaagagtctcaacattagttttgccagcccacagttaaacaaagtcaaccacttcagaattctgctactgaaggctatgctcaactttactcaggcgtttaaaaaattcatggctgggaacagtggctcacacctgtaatctcagcacttagggaggctgaggcaggaggatcgcttgagcccaagagttcaagatgacctggacaagatgcccagaccctgtctctacaaaaaatacaaaaattagctgggtgtggtggcatgtgcctgtggttctaactacttgggaggctgggatgggaggattgcttgagcctgggaggtcgaggttgcagtcagccatgtttgcacctgtgcactccagcctgagcaacaaaactagactgtctcaaaaaaaaaaaaaaaaagaattcatgttactgcatgcatttttgtgtggtataaaatcatcgtagtaagctaagtcaaattatatagttaaccagatatacatactatctaagctagccaaaggtgtaatactcttttggtataattttcatttgctttataacatgtatcatattgctttatccattgtagccctgtaatctttcaaatgcaacaaaagctttttctattccataaaaccatctcaaactaaatcagagatgaccccgacaagacagcaacactttagcagtattaataatattaataatatgtttcatccatcctaagcagtattaataatctgtttcatcacatcctaagcatctcattctaaaccaagaaataggccgggtgcagtggctcatgcctataatcccagcactttgggaggctgaggtgggaggatcacaaggtcaggagatcgagaccatcctggctaacatggtgaaaccccatctctactaaaaatacaaaaaaaaattagcaaggcgttgtggcaggtgcctgtagtcccagctactctggaggctgaggcaggagaatggcgtgaacccgggacacggagcttgcagtgagcccagatcgtgccactgcactccagcctgggcgacagggcgagactccatctcaaaaaaataaataaataaataaaataaaaaaaaaataaataaataaataaaccaagaaatagattttatttcattttgattgactataggtctaatcttgaatatctcaagcagctaaatactttgaggctaaatagcatgaaggcccaacaattctaaacaggataaaggagacatttagaaagagaaagccctcaaaataagcttcctataaaatattcttccgcccttccagggcgcatcttagagggaatctcttccgtgggatattcactgtttacacttgttttctgcctgaaagatctattctttcaagattcagtgtcgccacccctactccaaacacccaaactagtagtcactattagacatacctggtgcttgtgatgtcagtaggtgttctgaggcctgggaaggagtaaattgtttttaaacttggaacaaagaaaatgagcaggaaatcaaagaggaaggaggcagagtaaggagaaggaagtacgaatcataaggagaggcgggtgtcagcagccatcgactttgctcacctttcctccttgttctgccctttctccaggtggcatccactcatatgctaaggcttatcaatagttgtctcc

SEQ ID NO: 2266 - DNA, 4001 bp, Homo sapiens
atagaaacaaatcctgcaagtgtcctgtcagaacaatattctaaaaacattttatacttccccaaatttgaaacaaactctgggttatctttagaggtagaacatttcattgagaaactggatctaggagagagaaaccagaatcagagctcaaacacatgggattaatccagtttgattctgaagagaggtgtcccagatgatctggcattattagactttctctttccctttgcaagaactgctgggtgcctttgggaaaggcttctgtgtattcattcctgagtcatatgtaggaactgatgatgcttatattcagtgttcttcagggttatctggctaattaatcttataatttttagaagaaagaagcacttccaaatttaagttattgctattctcacccttcctcttcttcagaaatctagacactaagaatttctgacaattctttctttcaacttcactgacccagaaagttcacacttctgcttcatacatttcttgagagagcagggttgtaattagaaatgcctctgttgcacataagccttgtatacagttatggaatacaaattaatgggctactgtggaaaaattggccaaagctatacctactctaaattaatatcaataggggactgcttcctcctgcatcttttctcaattacttttacttatcttaagtggtagaactatatctttgaaatctttgctggtcagttcccttaagaaaagtgtttctgcagtcacatttcaactctttctcagatggacatatgccactttattctccccaaaacttagagtcttcaaatttagccagaaataggctaaatcctgaaataaataaagcatttcttattttctttttgatcagtgctacgtagttaactgtgaggaaagattttttagtaaagaacaaaactaatctccattcccagtgtaccatcccattctctaggcccacagcttggcctgcatctcaatgggaaattcctgacaagcatcaggggcttcccaaatagatatgggctttctcattcctccatgaagtcttccctgatcaactcaatctaaagtcattgttccctgcttttgagtgacttaggcatttattcttcatactacccttaaataaattcttgatcatgacattttatagctagaagaaacatcataataaatccattcccctaccaccagtttttttagataaagaagctgcaaactagagagattaaatgtctttatcaaatttatacagctggttattaggagacccagaaccagaatccagatcttcttacacctagctcagggccacttccctcctcaaagacacacaaaccacctgtcatttacttaatcctgtctttcactatttttttaagtcttttccataaataagactatagcttgcatcccattccttgatattcattcatatttttaccttttttattccaccaagagctatagcagagggaaggaaaaatactccacaggcccctgtcaattggcttaaccagttctctctatctaacagagttctgcagctaacatttagcattttctgataccttttatctcaaaacctttagataaacttcaaacgccatgtcatgacaatattagaattgtatttacattatgtatacacatctcttccttccaactattgctaacaatactgagtgacaatgataacaactagaaaaacaaataaatagaggattatagcaaatagtaaccttaggtacaattgcctccttacctctaattggagaaaaataaagattagccaactgaaggagcaaagaaatagcaacataactattgagcaaaagagccacagcttccaggatgatctctgagctccttgagttcttgaatggcttaaaggcatattttccaagtggctcaaacacatttttggagaaatgagagctgtggaaaacaaaaattcacaagtgatgggtgaaggatgcaatgtcatgttttgtagcaatatggtaattagtagtgggtgtggaaggcggagttttccttctgtcactgtgttagaaaatgatacttataacttaagtgctgactctcatttggcaccagatcaaatacaacaaaaggaacggaaggctgaaagccaacacaaactcagaacataaaaaaaaaagcacaagggaagttcagaggggaaaaaaatttctttcctaaatcaaacggcagtacagtgcacgtgtagaggaggcttgggagaataaagtggtgtgctctcatctaagaaagtattccagattatttctagataagaaaatcactttttataagaaaaaataaagtttgagattaatccccctaccatactccagatatcatgtacatgagcggcagagtgttaggaagttggagaggctaggatctctagtttggaaaaaatagagttttaatcaagtcatcatcttgtttaccttaaatacccacaatttttatttgtcaattatacttcagtaaacctggaaaaataaaatctatactcacaaaaatgtttcatcaatttctagtgtatagaatgcgttcattctgagtctctagaaaatatcaagtgtattacaagaatttaataaaaaattgtaaatacaacaagctcaattttatatttcatcatttttaaactctgataatctagttctggcataagaagttattttacagaaggatattttcctgcatcctgccctcagccagagcttatactctattccaaaaaaaaaaaaaaaaaaaccttgggttttcttcctgggcccaaaaatatgggtttactacaaaattgaggaagtctcctggttctatggacctcagtcacacaggcttttaaatcagacagacctcaagagcagaggctggcactgcccagttcctacctgctctgtggccttaggcatgttacttgagttctctgagcttcagtttccttcactgtaaaatggagaaaattttcactttataatgcttttgtggagaatgaaatgaaggtgaaaagtttatgcattccataaatgttagattatctcttctctaccctctttagcgatgtagtgaagtttaattcaattattaaatcctagaaaagaatgaacattctttatctttcccacaagataaaattcacctaaagtttacttaaacaaaaggaagtacaatgaaagtattttggaaaacctattttttaatctaagagagaattgacgatttataaattagaaaaaagtccagagatttaacatcctcctttacaaaaaaaggaaactaaggacaagagggtgtgagtagtgtctcaaatcactgctggctggttaatgatggagtgaaaactcaagcccacagatactgctttgtaatccaaccattttgtcttaatattgcactatttacaatattattagcaatatttctctctgaactgtcaaaattttaatttgggccctattttaccttgttcaataaactacttcttaaaagaccagttacacaaaaatgatttttcaacacaacaaatgtttttgtggctctgtacttagatgctgcaatgcagggataaagaataaacttactctagaaaaagactgatgccttgatcccataacctttgcacttgcatcagatctggaattcatatacacaagcacagaacttaaaattggaagttaaattatgtccttcctgtttttatgatctgccccttttcctgtctgctttccaaatttttgagggaatttccctggcttgctaccttaggtaaacatttattcacatgagaaactgttttaaataaaatccagttcctccttccgcctttaaccactgttaggccctggaatatccttattaattatttaaccttatgacagtatcttaagaaagatgacatacttatttcaagaagactatattctagggcctcttttcatgaaataggatttagaaatgaggaaacttca

SEQ ID NO: 2267 - DNA, 4001 bp, Homo sapiens
gaggtttagtgtcctagaaaccagcaccctgcttttcttcccacagctttccttctgtcccagagttgctggatgacttgttggaaaggatcccctctttttctcaacatctcctggatattgatagtccaatgtgaccccaaccaccagcaagctgtacaactgtggttcaccttttgctctctcctgctcagagccgttgtgcaatcagttagccttgaatggagccatgtgtcctgtgttttatcatcccatggtgtaaggaaatatgtaacactgtggttgttagaaaaagcactctcagggctcccagactggtgaatgcactcagctgttctatatttggttactctctttgttttcttctcaaaagagcctaattccggttgatgtcttgggcatccggtcgatgtcttgggcatcctgccatggacaccttactcttcccccacaccctctccccgagtcgcctactttaatttcacccaaagagttctgcgagaagacataagagtgtggtgtgatgaggagaggatcaatgtgttgttgtgctcactgttctgcagacctgagcatgacactagctacacttctggaatttggagacacaagcactgtctgtggtacagtgatcataaccacacacactcttaccagcctccatgcactgaaaaccctatttcctgtaggcagaaacaagcccaggcatttgccaagactgctcatctcattctggtttcattggaggtgcttaatctcagacaagaccatcagaaatcagtttgtattacctgaactttatcagggagaaacatttctaacccaaagcaaccacctagaaaacaagattatcagactagctcaacaaaggaacacgaagagagtatagatttatttttctccagtggcatcttctgcagtgaagaacatccttaaatacctaataatgtttgtatatctgaactactgaataagaaaaaataatgcaaaagagagaagtgtggaacaagaataaagtgaaagaaaaatggaaatattttaactatatggggaaaatactagaaggataatctcctactacatgatgtatttaataaggtagggaaaaggtgaaatgatgtctttaaattatgactggaagagatagattgtgagaaacaatatctgattaaatcattggggtgaatgagtgagcacataggcacacacacatgcacgcacacattgctccgctattaatattgataccttcagcattctttacaaagaaaatcaccttgcaggtctatagggtatatgaatattatgggaaagtggaactggtctctttcctatttccttttaatattaattgcctgatcaaacacattactatcacaatgggtagaccaggtatatcagtgactcaaagcttcaaagtgacagcttataaagggatacaaggaatcttgcattgcaaagaaaaagaaaaagatctagaagctgtgcctctgccctacctccactctgccctaccactgccactgctgaaaagaaggaaggaaaggagagacagaagggcgtttaaccacactttacgattgctgtggggagagggaaaaaaaactcaacacttttggcataagattatttccaagcgactgtttgcagctgttgcagctgccatcagcatgagctggtgggaaaacagcgcccagtggtgcatcttacctgaagagcagagaagtgcaggcagatgtaggtgaagcacaggagcagccccagtccctgaattacagaggccaccagcaatagcttgttcctctcgaatcttggcctggctgcatttcccacattctcttccaggggttggaccctttccatcttcacaatctgggtagagggaagatgaagatatggaaaaggggaacgtgcgataaaactgaagttttccccagaaagaaggaggtaaagacaaaacaaagcctatcaatcagaaaataggcaaaggtcccagggccagagataaaaggcgattgaaagagcaaagcggactctctcagttttaacgctgcaacttttgcaggcaggcgggggaacttctttgtgactaatctgaatttcccctttactttctttctttttttttttcctctgggctaacagggagttgtttttgtgacattccagttctgatttgagtgactgtgaaatgacagtcataaaagtatgctattttcttaacttattgcaccagtaacaaattgtgggtcacttggtaaagataaaaatcatcatccgttaatgtagcagctcatatatcccttccccaaggtgtcttaaatcatagaaaagatttaggggaaatgctggcccaaggttcttatctgcactttactatgtaactaaacattgaacccctctcacagattcagaaagaaagcacacacagatcattcttgaatgaaaaagacaaaacaagaaaataggacactgggtcatgcagaagtaaaggagagatccttggttgtagtctattgcataaaaataaactaccttttggaagcatttactatgtgtcagacactgtgttagatggacttgcaatctttctctcatttaaccctttgaggcaaattcaataaacaattatatgattaattttctgcataccagaaaagaagcagaagggtatccttgtctcctttccttccacttcacatttttcccgtacataatttttccatgaatgaacaaatgaatagatgtaaataagctttgaagattatttctttctttgaggtcgtggctggcctcagaacttggaaagtaagagtattctatcaatagacaccaggtaccctttaccactaaaataaacaatgaaatgaaataaatgataaaattacttataatgtaaagttcaaatgggcaaatatttactgagtacatcacatgagcctggcactgtactggacaacataaggatgctggggaaaagctgtttaagacggaattgtctctctttgtggccaagtatgtctctctcagctccccatgaggcacccagcagatatgtaaagaaaggagggagaaatattttggatattgacagtatgagttgttataccacttcacagaaaaaatggaaatgaggcatacttaaaagagaaagtttgtgggaaatgtaaagtacatttatgactacagtattaatcaattaaaatatgaattaataccttcactacaataattatgccttgcattaggagaacatactggtgttgagaaatttaagttttatctgaaagataaggtaactaaggcacaatatcatagactccaagccaaaactagaaatcaaattgtatccaaacatatttgtcatagttattcccttgaacaaagcttgtgttacatacagggtgtggagaaaaaagctgaaggaaaaatcagtgtgtaaagcccaattcttgtgtaatagttcttcataaaagagtattaaaatcagtaactatttactcgtcaattttcaaaaaatgactaagagtcacagcaaaaaaaaaaaaagccataaatactattggaaactagaaataagctgaaaaagtagtaaaaactattcatgctgaaaatcgtagataacatttttaaattactgtcaaaagaatgaaaaaaataaacatttaccatgcacatacttgtaccttaagcagcatttcttctcagtgttaatatcatggctccgagaaagaaaaatctttgcacagagtcatctctacccacatttaggctaacacttggatgacacacctctcatttttattgtcttgtcgtcctactaccatattttgcctagttgtaatttttgttgatgtttaagtgatattttacacttaattgtctctttttttattgaacacgttttcacagctcttcacattctttgtgggaagagatacacacacaccaggctggaagtttcaggcacagatttctgatagactatctaggcattccaa

SEQ ID NO: 2268 - DNA, 4001 bp, Homo sapiens
tacaaagaaaggtccaagttgtagcccgaaacttcattaagaaactgtgaattctaattccagctttcactgatacagaactggtcaactcactttctaagtatctctacttctgttgttcccagctgaaaaaaaagtgataagaactgaaaaaaagtgataagtaggaattgctgaaaaaaatcactaaaagccttcaggtctttgagcatgatgataaaggtgatatgaatcttggaaaagccaagtttcaatggtttcagtgaggtttctcacaccttataggtcagctttttctgcctttgttccatagctgaagttccaggtaagactggaagcctgacaatttaagtggatgtcccaatgtaatatccaaacagtgtgtattggttttggtgacagaagcactgaattatataccttatgtcatgaatattcttacagggcattcacttctttcccttttctaaacagtgtgttttgctaatccagaataggttatttagatatgtacagaatatataacttaagtatagaaaagtacatatgtgcaaatttgattcccctcaatcccttcttaggagccaggaaatccataagcttaaacacaaatatactaactcacattttgtatttctcaaatccttatatccattctatgaatatataaactatatactcataagatattgagctggaagacatcttattgatcatttgatcctactttctcataatacagattataaaaatcaaggctcaaagaggaaagtaaattagatgaggagtgggtagggtctaactttttttctagcatcttaaaaacaaaatattctgcatttcctgcatgtagatagacctaacccagtgatgagaaaacagaggctactaaataaacttgattgaaaggaaagctgacggccaaatggagcttggtagctatatctgtatttacagagccattcatgtaggcaattattttataaggctaaaaaattaaatctaagaaataaaagggaaaatcacaattatttcccaaaaacctttctctcacaataaaagaggtccaatttaactgggtaaatggtgagcatttcagctctatttcacctccaatacacatcactgtaacattatgtcttataaaatagaggtttgacttgcctcatcactaccaacaccaccaccaccaccaccacccgatccctcaatcaaacttccaaacagtattgtagatgagttttaaatggctactagtctatgtctctttgtcagcagctgctctacaatgttctctctcaatctctctgtctctgtttctctctctctctcaaacacacagaaacacacacacacacacacacaaacacacacacacacacactgctgctatcactgccaccaacattatttggtaaactatcaggttctagggaaaacacacacaacccatctatgctatccttctcataatgaagtgtaaataataaatataagattaaatgtaaggacccattgtgctgtcccagatcctataacaatataagaaattacattagctaattagaaataaaaaaattataattaacatcaagtgaagaacttcaaatatcctgagcaaaaaaaagaaatctattttcagagtagacagggcatgtttcttaagcaaacaactcaaatataccacctatgtcttgcttccatctctgtgccaggactatagaagctaattctcccctagagatcactcaccatgaggtttagtgtcctagaaaccagcaccctgcttttcttcccacagctttccttctgtcccagagttgctggatgacttgttggaaaggatcccctctttttctcaacatctcctggatattgatagtccaatgtgaccccaaccaccagcaagctgtacaactgtggttcaccttttgctctctcctgctcagagccgttgtgcaatcagttagccttgaatggagccatgtgtcctgtgttttatcatcccatggtgtaaggaaatatgtaacactgtggttgttagaaaaagcactctcagggctcccagactggtgaatgcactcagctgttctatatttggttactctctttgttttcttctcaaaagagcctaattccggttgatgtcttgggcatccggtcgatgtcttgggcatcctgccatggacaccttactcttcccccacaccctctccccgagtcgcctactttaatttcacccaaagagttctgcgagaagacataagagtgtggtgtgatgaggagaggatcaatgtgttgttgtgctcactgttctgcagacctgagcatgacactagctacacttctggaatttggagacacaagcactgtctgtggtacagtgatcataaccacacacactcttaccagcctccatgcactgaaaaccctatttcctgtaggcagaaacaagcccaggcatttgccaagactgctcatctcattctggtttcattggaggtgcttaatctcagacaagaccatcagaaatcagtttgtattacctgaactttatcagggagaaacatttctaacccaaagcaaccacctagaaaacaagattatcagactagctcaacaaaggaacacgaagagagtatagatttatttttctccagtggcatcttctgcagtgaagaacatccttaaatacctaataatgtttgtatatctgaactactgaataagaaaaaataatgcaaaagagagaagtgtggaacaagaataaagtgaaagaaaaatggaaatattttaactatatggggaaaatactagaaggataatctcctactacatgatgtatttaataaggtagggaaaaggtgaaatgatgtctttaaattatgactggaagagatagattgtgagaaacaatatctgattaaatcattggggtgaatgagtgagcacataggcacacacacatgcacgcacacattgctccgctattaatattgataccttcagcattctttacaaagaaaatcaccttgcaggtctatagggtatatgaatattatgggaaagtggaactggtctctttcctatttccttttaatattaattgcctgatcaaacacattactatcacaatgggtagaccaggtatatcagtgactcaaagcttcaaagtgacagcttataaagggatacaaggaatcttgcattgcaaagaaaaagaaaaagatctagaagctgtgcctctgccctacctccactctgccctaccactgccactgctgaaaagaaggaaggaaaggagagacagaagggcgtttaaccacactttacgattgctgtggggagagggaaaaaaaactcaacacttttggcataagattatttccaagcgactgtttgcagctgttgcagctgccatcagcatgagctggtgggaaaacagcgcccagtggtgcatcttacctgaagagcagagaagtgcaggcagatgtaggtgaagcacaggagcagccccagtccctgaattacagaggccaccagcaatagcttgttcctctcgaatcttggcctggctgcatttcccacattctcttccaggggttggaccctttccatcttcacaatctgggtagagggaagatgaagatatggaaaaggggaacgtgcgataaaactgaagttttccccagaaagaaggaggtaaagacaaaacaaagcctatcaatcagaaaataggcaaaggtcccagggccagagataaaaggcgattgaaagagcaaagcggactctctcagttttaacgctgcaacttttgcaggcaggcgggggaacttctttgtgactaatctgaatttcccctttactttctttctttttttttttcctctgggctaacagggagttgtttttgtgacattccagttctgatttgagtgactgtgaaatgacagtcataaaagtatgctattttcttaacttattgcaccagtaacaaattg

SEQ ID NO: 2269 - DNA, 4001 bp, Homo sapiens
aggagagcgtttgctaatttccaagcatttgcactgttccactcacactcgctgggtacagattcaaatggtggctgggcagcattagcagtgagtccactgtggcagaagcagcaaagtccctgtccatccagagatcaggcctgagatcttagcaacttctgctcacagactggtggctccagatgtggctacaggacctaaaccatgatctcatgtctgtatccagatcctataggagccaaggctctggaatgagcagtgaatggacaaaagtttccactgggcctgggcacaatttcctcaggcatcttctcagaaagagagctctgcccaccctacatttcaaaccacagagcagcactggactggaaaaccagaagccacgggatgatttgaaatcatttgttctattttccctccttcgggagtcagctgcagcctataaactggggacaaagcagtacttagagttgtatgaaagaatgccaggtgccttcttcccttctctcctggaaaaatgataccagtattgatactctattttttcctgtgtctgacactgtcaccttgattctgagtctgcaacaaatgtctgaatgtcaagaggccagctgccaatacgtagccctgaccgagcaaggtatcatctgatgccttggtgacacctcagcttttccaagaaccagtggattttaggcactgtggctaacctgtgtcccaatgtgggcagtttgttacttttatgttggaacttgttcttttttttaatgcttatataagcaacacaggtttcatgcttttaagtgaagccctgcctgttctcattcattctttctccatccttcccccagatctctcccaagcacaaaaattaataaataagtaaaaagtaagacctccaaaaactagttttttttgtttgtttgctttgttttgtttttgttttttagatggagttttgctcttgttgcccaggctggagtgcaatggttcaatctcggctcaccgcaacctccacctcccaggttcaagcaattctcctgcctcagcctcccaagtagctgggattataggcatgcgccaccacgcccggctaattttttgtatttttagtagagacggagtttctccatgttggtcaggctggtctcgaactctcgacctcaggtgatccacctgcctcagcctctcaaagtgctgggattacaggcatgagccaccatgcccggccaaccacatcatttttttagatgtcttgaaatgttttctttgaggtattgtgagggtaatagtatggggatttcgagagaagttgtcgtcttaacaaataataattaaaacctgtaaaattaaatgtctggagatacttcaaagctgttcaaatgtgtttgcaaacatccccttaactgattcacacaaaatccagacaaagggaaagttatcatagcttcctaatcataactaaaataacaattctgttttaggatttaaaagaataatgaaatacaacaatactaaattatccaaaaaaagacagagagagagaaagctttgacattgtaagtaagttaaaaagaaaaaaaaatgagaaggaacatcttaaaggaaacattttatacaaaaatgtgttacgccaggtagaagctgatacaacacagacgcatctgtgttgcaggaaagaggataactatgcttagccctgtctgagactggagtataatactaaggatgcagtacacgggtcctgagaggtacttcccaattcattttaactcttcatggaggtgataggagactaattacactgcccggattttcaggctcgggaacggaggcacctgagccaccacttttgagctcatctgcattggccacctccctccctccagtaagtaaagcttgggcaactggcactcttacctgggaggctgctgggtgcctcttccaatgctgctgctcctgtgagccggtctcctcctgccgcagaccttggtacttgctggtcgtccctggttctcgtctctccttggcttcccttcctgggtttaaatcctgtctaggccagaggaggagcaaatggagactcctggtgttttcctcccttcctagcagggactctgctaaaagataatgagcaattccttctcttattctaactaggaaagaaaaatatatacatttccttcttctttttcactttgattacacagcagctaaaaatactggaggctgtttccatttaagtgaatccagaataaggatattaaaagagtttgcctgtctcctggccaggagctgggtctcggggttcaaaagtgcatttataaagtttctttctctttttcctgtttcaggcattctgggacttcctgcctactgcttttaaaatgggaaaaagcctttagcacagaaagaaatgagcagagaccctcagggacagaagctcttctgacttccctcctccttcatccatcgtctcacacttgtgagtggcaggactctgaagtgggggcaggaataacagactggggacattcggtcccacaagcccactctgaccctcaccccatcccaaatgcctcccacacgccaacagtacaagagctccaaaatcaggaaagaatagtcgtgcccctttctggctgcccttcctcttttgccctcagatggacaggccttcatccttcctatgaaccagagtcatttcaatagggcatgggctgacacctgccacccttccttacaccccatccctctcctgctctgtgggaagtagattctggagtgcagatccacaacaaaatgaaggagaccatatgtttccagttcacctatgtcagcatcaaatgctgctggagggaaaggagaaggagagacgggggaccaaaaagtggcccccagaaattggaggggggttcccagaggcagcttgcctggatctgaagcttgtgtctgctacttgcaaatgacctttgacaacttctttgtggctcagcttactcgtctgtaaaataggaatagtgtcttatggttattgtgaggttcaaatgagtagatggggtaaagaacttagactagtcccaagacacaatgaggacttggtaaagattacctgctaccatgattattataactttttaattctccttatgtatcccactaaatcatatttgatcctctccacctcagtccaggtaggttcatagttctctgcccttcacttacaaccacaaataatcctgctatctggccctggaatctgggccagccatatacagaggtgaccagtgcagtaggaaccagggtcaccagaaaatttcccaactcccaaacatctcttttctcccttggactattttctctgcttcttaaaagggaaaatctctcccagaggatcctaagactctattgcgccctcaagttgctctcctattcttaatttcctttcactaactctccccaaatgagtggtcttcaccaactctctccgtgaccccattttccatgccctcaataggaataactaaaccagtgcaccaggctcctaagaagccaccttcctccaatctctccttattacagctggtattagttagttgcaggacatggagctgtagcaaagagaccctccaatgcagtgacttaacaacatagatgatttctccccaaacagtagaagacagtggcccagggctggtagggcagtgccaccatccacagcacacacccaccactctctagggtcatcatctcccagccaacaggaagggtaaagggatgagggcagatggaagtgcgtgctcattccttacaaacacaaaaacaaaaactttttattttataattatttcagacttgcagaaaaattgcaaaaatattaaaagaatccctgtatacccttcactcatattctccaagtgttaacattttgtcatatttgccaatcattcattctctcttaatagttttccctgaaaacatttgagagcaaattaaag

SEQ ID NO: 2270 - DNA, 4001 bp, Homo sapiens
ccctccacctctgcctccgccaccaggggagggtaaggctggggtggaggaggtggaggtgtagtgtgaccccagagtctcagctgtcatgctggggcacagagggaggggtatggagacaatccatgaattcctgagatgcttggctggtattagattttatgggcagctgcttattcttagggctctgcttctccaaagacactgaggaagtccaaaggaaacaccagctggcgaagagccacctccaggcccatctgtccatcatcagcctccaggaatgccagtgtccagagggcaccaggtctgcgtctgtctccctgggatgtgccttgtccttggtgggcatttggcagtgatcatgcctccctgtctccctcagagatccaactgtccccattgtggggccctaccttccaaggccggtttacacctcctgccaagctccggggcctgcccccagcctgcctcactgacaaatgccagaccaaggggtcccacgtcaggcaagaggcctcagcctgtgctctgacacccctcagacgggggcccttgccaggctctgtggaagacaagcgaggactgataagtcaggatgaagatagcagccactggaaggcttggagagccaggattccatctcctctacaagtagcaagcaaggagataatgagaaaatcctccccccgagggggggagcaaagagtctctggtggttgcctcagagctgggctttcccttccttgaggctttgcagcgtggaagggactatccgctagactatgagattgagtctgtgtgtgtaagtgtgtgtaagtgactgtgtgtgagagtgtgagtgtgagagagagagcgtgtatatgtaggggaaagaactgatctctttgcacacccaatgatcacgtccacaagtatctagttaggctcatgtgcttccccctgctccccgccccctgaccttggacccccattcaagggcatccctgtcttccttgactgacggttaacactcccaagtgcatggcgctgggctgcccccatcttgagttctgaacagcaaagcctaatctcagagctgctgtgggactgtgactcccaaacctggtggcaggtgctgccttcagcccccacctgagtcagggaccgccacacggccccctgccccaagccttgggttaccctgtagatactgccctggcttatgtgttcactggctcctgtgccccaacccaaaatgccgccaccattgccttcctccaagaggacccccagtatctactgctgcttctcagagccaggagctctgagcaggagcagtcaagaggggttgccggtctgccctcctctgctcttgtgctacactacagagggataggcaaagggagctaacagcgtcgctcagagacaaagaacacagaagcaagatggtttccttggccagcagggagctctggccctgccttctaggctccctgggagtcctgcgcgtcaggcaccctccttctcttccgctgcaggcattgctgactttgagcactcaccctggctctctgatcccagggccaccccttcccctgggtgcgctctccctcccacactctgctgggcatcctgtgtgaaaacatcatcccttaggctctgccctggggctcctaaggaacctcacggaagattctgctccttgctcacagcctccaaatggccaggaaaaagtttcacctctcacaacagttttgcaggagagatgccattctgtgggacaaaatgctgtgggagtattttaggaatgttctaccaacaaaccaactgcacaggcaagaaatggttttctccagctccaagacctcgctttctccttaaacaaaagccccaggttctctgcctgggatcaacctacatctgaagttctgggctgcagacgcttaccttgttcagtcctcgtggagctgggctggcctgtgcctcgccgtagactgcagactgtgaggggcagagccgaggggaggctatgaaaactgtgtccagcagcaactggctggtaaaaatagaacagacccactgccccctcctgctgcccctcctccctcccacccttcacacacacacacacacacacacacacacacacacacacacacacctcacagggcagatgcgtgctgcaatgcacacaacaggcacataggcggaaagccatgtgaatttgtggctcaggagcagaggcaaattctgtgcacataggtgccaccaactgagtgaaaccagcacccacctggggagactcgagctgcagaaagggaaagaatgagcagccagaccaggtgtggggactgagcagagatgggactgggagggggaatgagggagagcaaagggccacagtgaaggcccagaggggcaagtagcagctgggggaagaggaccattgggctaaccctgcatctcttataaggcaatatggaaatgaggcccctgaacccatgccccaaaagcccaagagggctaaagactcagctttcagggatttttcagtggctctggtgcacgtgggatacgagggtgcctggctgtggggagtgatgtgagcagtgttgcaggctgaccccagtgagtgtttccagggctgagcagaatggcagtggcagcagggcacacctttatgctcagggaggtctgagggtctgcagacactctgcatccccctccagatgggtttcctggaatctagatttcccaggttccaaaggacacccgagtctcatgcctggaactcagtgagactaattcacctctcctctgccctaatcttcatctccagccagaagccaacagatcccaggggactggagccacaggggctgcacctgtttaccgggtatttttaggatggttgatgaacacataatacccaccctatagtcagagaaagacaatgcctgctatgttaatcctgtggctattatagtctgtcatctcatgggttggggcaggacactgaccctctcagaggccagagagaggcctcgcaagcaggaggttagggagccccagccatgctccccatttggagaaggagagagtaatgggcaggggtgtcctaaggagacacaccccagtgcccacagaggtaaaggccctgccctctctacaacgacattctgctgcctaatagaggttgctctaattctgttctggtcgggtcaactttgagaagcctctatgtgagacggctgccagggagaaatgacagggtctggggaggcataggggttggggacataggattccaagtggagaggctgtgatggataatgaaggcaggctccagccaaaaggagcagctagaggggagaaggaatttaggggctttgcagatgagcctactggagtttattgccttggcttattataatttatacaataactttccatttatttatttatttatttatatacttttggagacagagtctcactctgtcacccaggctggagtacaggggctctgtcacccaggctggagtacagtggctcactgcaacctccacctcccgggttcaagtgattctcctgcctcagcctcctgagtagctgggactacaggcacgccaccatgcctggctattttttatatttttagtagagatggggttttaccatgttggtcaggctagtctcaaactcttggccttgagcaacgcacctgcctcggcctcccaaagtgctgggattacagacatgagctaccatgaccagcctatacaataactttcttaaaaggccttgatattctcaaaaaatgaattctctgcatgaattatcctgctttttgaaaaggaaaaacaaaagaagacagttcgacaaatagaagaacaaagcagggtgaacaaaagccaagaaagtaggtggccggatgtccgcagcaagacgtggagaacatagtgcagccaggggccctccctgggcaggagccatggagaatctcagactcggagtgattc

SEQ ID NO: 2271 - DNA, 4001 bp, Homo sapiens
catacttttccaacaaaacaaatacatatttataattctactgtactaacatgccagtcatatttctacaggaatttcaaatgtagttccatatctcaacatgtgatactacttgcaaaagtcagatcagtggtatctcatcacaagtgtcagtgttgagttcatcatcctgggccaaactataaagagaaccaactactttttgaaccataagttgaacacttgtgaaagccttgttacatccattgacgaatttcatataaactatattatacatgggtgattttatttgccaattatgtgatatttatatgtttactatatctaaaattttattttaaagatgtgtcatttggtcattgctttacacttgttttctaagtaaaatagagggagttctttgccatgagtgcattacataacacagctataaatgaacatggctaattggcctatatggaacttttccttagtcaggcaggtaactttcttgaccctctaatgggcatctagtttctcaatgtcagattcaatttaaccagaaggctttttgtgtatataagggtcttgctcctcttttctgaacattttgtgtcttccaaggttgtgacacttagattatttttctcttgttatcatggaacaaaatctactgaaatcctgaaggcaatattatatgttgttatatgattgttcaggggcagaatgatactcagttccattaagggacagcctttcaatgtcaagagaccagagggtttgttaaaattggacttaccgtcatagttcaaagagaacaatgtggccaatatgcgaccactatgtgggaagaaaaatcttgcttttcattgccggcatggtttacaagaatgatctaattcctgagaagattactgagatcaacaatagcttgcattcaaaggctagcctttaggtttttatttttaaactttaatgatggcagattacaatttatattttaaggaggtgagatgttatgtttgcattttgagagctatatgagtggtcaaagagagataatctgacatcctaaggcttagaacatgactgcttatgtctgaggttctacgggtttaaaaaatatacagatactttaaaaaataaggtgaatactgaagacacttatacaaagaaataatgactcttacaactttacccaaatatattccttagttctgtcagttctttttccttgatctgcaggtcatcttctaatctttctattgtgataacatatgattcactgacttttttcttccattcatctagtaaagaagaacaaatgagattgattcatagttgtgttttgcaaaatgtagacacagatcataacatacaagtaatcaaaactgttttttattctagattctacaatacttaatttaaattactgattgtgtgtttaaaatgcagatgtttatatttaaaatgcaatcatattgaattgtagtaatgaagaacccattcgatattggataatatatttacatagaaaaatatatttgacttatttcatttgattttattgcattttaattatagcaatctctagttgcaagacggtttttagtttttaaatactagatacttaagatataattctaaaatccctacattcagcaatattccaaatttttttctgtaacattataccaaggaactaaaataatatttttgtaagaaatttcttgtttcctataaagatcttcagaaaaaaataatttgagttcagatagtttttcaaagactttcacaaaacatgctgccttatcttccgtatacaaattaacacatattccaatgagttgttagttatcagtaactataattgaaccatattacacttaaggaaataagaataattagaataattaccagtacaagtttgggttggtctagatttataatttcccatttattataagtttcttcctttctccagggcagttcttcaagttataagattccaagttcaagtgcagtgacagtccagttgaaaaatactttgatagtctggctaaaaataagcccaactgccaaatggaatgtcatgcaacaatgataaagaacaaaatcgtgtgtgctttcgagggtgaaatcataaagggaactaatcagtctgtttaaaagaactgtatcaaaaataaatagcaaatgtttcaataggattatttgcttccatcaattatctacccatacatactttcatggaccatttatttaacagataaatctagaaaatgattcagttacatccgaagttcacaaaagagctgttaaaactacatagacctgttttcaagatcattttctcctaagccaaaataatggcagttggtaaagagtggtaatagaatgtgtctacatacataaataaataataaaaattcattacctctagcatataactaatagaaatgaatgcaggtttggcctgtataagagctacataattatgtttgtatgaagaaattctcaacatagaccaagatttatactattgtggattattccgaccataagaatcatagatcagaatgtaaaacattaagttctacaaatagcaattcgtaaaataataaatgacaagaacagtaagattaagaataagaaaattgagcatttgctatgtgtcagaccctagtttacatgctttacatatatctcattatttaatctcatacatacagtgctgctaggtagatattattcacaaattatggatgagaaaacacaaagttactagtaagttggaagtctggaatcagttctgaccatgtgactctaatatccaagctagatattattgatttgtcttccagaatttctctttcatgcaccttccatttactttattaggacatttctctttgtatgcatattgtatgcctatttctactgatataaagaacccagtctatgatggagaataaatgggaaacccagaaagaaaacattaaatttttcactatatatttatttcagataatcttcttatacctagaaagtataaattttaatcttcagattcacatccagaggatatagctttaacttaacagatacagatttcatattttctatagttaaatgttcaaacaactctctttttgaataaatgattagacaaagttaggactcaccatatatttttgctcagcaaaagtaatagaagtttcagaggtaaggcttccagactgatgagatatagttggcgcatcaggtgtctggcttcatagacactttttgtcctcatctggacatattctccttttcccttcttatcagtacatgcctaccacagctgttgatacttgctatactgcagtggcatctggttaccttggtccatacactctacattctccttgtttgaaaaccagacatcttcagttccaccagctttctctaagcacttctgtgacccccattttctcagtttggaaagtctttgttttgtccagggaccttcctgcttaatctcttcttccttatcttgaagaccatactggatagctttctttaaaagacttgcaatctcccagggctacactttaggaaataatgcaccagctctttctcctctcagagtttcttaaaataatcatggtttctatactctgaatccagaaggacaaagatgggagccttctagaggacaactaaatatatttttcttgatctcttttcttatttctaatatctcggatcttccatccgtgtgtgtgtgtgtacatgtatgttttccacatatggaggaaaaattagctcttacatcatcttccactgtgtttctaatttcctgcttgggacacaagtctgatgtactgctttttagaatttttccttttgattttcaagaatacttttattctcttaaaaagcctaggttttacaaatgaaagctttggctttcaaaggtgtgatttctgcgatgagtttgaaaatccaatcagcaactcagttgaattctcccacat

SEQ ID NO: 2272 - DNA, 4001 bp, Homo sapiens
ctacctgagccccaggagaagcttgtccctcagtgggagggagaaaattctcagaggaaccgtgcatggccagcctgggcgcatagcttctagctttctctctcctctcctactctgcccttccaccagttcagagccactgggcatggtgctggggcctcacaggaggacagagcagcttggactcctctccctgttcctgggggcaccatccagctcccaaaaatagcatgcagacatgcaggatggaggagggctttcagccagcccagaggacaccaccatgccagtggctcaaaggcaggacctgatgcaggggaaagaggtgggctgagactgggggctgcagaatgggagagagtcaagaacctggcagggcaaggaaccagaatgtcctgaaacacctgtgtcctcacacccaagtcccacccacttccacaggcagctttctagcctaatgcattcatagccaacacgtgttggaagcctaacacgttcacagggtcacctttcttggggagtaaagcaaagacaatagaaggcataaggcatactgaccttggggtcaaaaaatctgggcttaaaacccagattttgctgtgtggccttatttaagtcacctagcctctctgacttcagttaaccaactacaaagcaggagagccttgagttctgtccctgtagaaacagtctccgagtttctgagaaacacaggccccacccctcagtccttgtccccagcactcgaatgggattttcctaagccaacagctgttagcccaccaggagagcgggggtaaggggatggggagagggcaggaagagtggaagtgggggtcagaaataggaggcagccagcaacctgatcctctcagattccacttttgcagagagaaggaagattcgccctctaagacatgggtcagaaaaggaatttgggagggcaggtagcttcccggctacagcaggccaggaatgtgctctgaaattccttacacaccaggcaaccccctccctgaatagtcctcagcctgcccaggagaaactagaaaccaagggaatctttctctaccactcctgggcacagagcaaggcttgtcccaagatggggtgttggggtgggatgggacaagggttacacttacgggggcccaggttaaaccctttaatgccaaccagctgggctcacacccaaggacaggttctcccagtggggcctttccccatctgccccccaagtgcagctcagctcagggtctgggagctcagctcagctctgggagggaatggcactgagtcagcggcatcaaatggaattcccgcgttggcctggagaggcgctgcagaggaccctgcacatctggtcgttctcagtacttccaggacagtttctgagttcctagccttgagaatatgaccaggagactcacttgactgacagggctgcagtctcgctctgctccctgggactcaagaaggacctgactggaaaggtataggtgaccctcggcctggaacaagcaatttaggggagtctctgttggttagagcctcattgtatttagagcaggcagaggcctagcaaatatttagcccactctacagatgagaaaactgaggcctggggagggaaagtgactcatccaagagtttaaactctacatctttagtggcaggtccaggactccaaccctagtctccaatggctaccatgggattctctctttctctctgctctattgtaccaatcttggagcccagacctggcaacctgtcctctgaagtgtggcctccaccaggaggggccatggacttctgcggacacaggcagactctgggtaaatatgccagggcccaagaccctcacatctccccgtccattctctgctctcctcttccccagagccctgcccgagccttacctcagaacagcagctgccgacagatcctggaggcgtctgctcagtctcagcggggactgggtgaggcagaggatggagagggctttaagcaggcatgtgggctggggcctggtgagccagccctgcggagggaggaatgtgcgacaggggacgggtggggcagggggatggcggtgggggtggggggtgttggctgctattttggcaggtgccagggacaaggctacaggaacatgtaccccacgccatataagcccatgtggtcctccagctgctcagataagctatttaaaaccagagcagatatgcagggaacagtcatgcaacataaaccagctgtccctcttgagaatcctgataaagcagaggccagcaacccaggcctgggagggccagctgggagcagggttggggggcagaaggcaacctccaagacactccataagtctcagcaccagaatcttggaaggcagagggcaagagttatgtgctgctccacttgaactgatgctgggggtaaagacatcttccaggctactggctcctaatggactgagcagccttaggcaggttgccggctctgccagccccagtgaggacatctgcaaggtgggtcttctccatgacccccaaagccatgtggcacaccctcctcacagggaatggactgaaactgctacaggaggccagatacaaggtagaacttccagtcaagaaccttgaacaggcgctcgttgtgtgagaggggtgatgcggactgtcaaaggtcatcccctaacggctttaaaatcaagcagtgcggggctatgatctgctaaacctactagattgcagatgcataggtcaggcctaggggtcttgcttgcttgcctgtgtctgaccatgcacatgcacttgtatgttcaaggctggcccattgcagggtttggtagattatgaaaatgaaagagacaggaggaaagcaagccagtaagcagctgagctgactctcccctccatctctttctccgaatcttcacagcctaggtcctgcttggctctgaagcaggaatggtcctcctctggagcaggccctcccctcctccatgaccccccctggcacttaaagatcttgcccattcatgatccacactcctctgtttctccgtgggcaaagaaagcaatctcgctattctctgcccccttctcccatcacccaatcatgtgtcccgccttcccagtcctcaaactcttctctcaatccctctgccttgggagctactatgctgcctccaccactaatgtccttgaaagggtcctctgcgcaggggactgccatttgctccacacccatgctgctgtcagactcttgtcccatcactcagctgactccatcccctccatagttccctgtggcctctgagtccagtggccttgattgccctgccacgtgggcctccacactgccagcacatctgtggcagggcaagctgaagccaaccgcccgctggccagcattgtgggactgaggaccaccacagggaagcaggggcactttgtagagagacaggcagatggaggggacagattcccgagggatagtgaggaaggagtcaggctgtcaagaaagtggggggagccccatcatctctctctcccattctagcccacgaagcagggcccagccttgccttgggtcctggcctggagtaacgtagaattcggaattacttttcccaaacccttttttaacttgagggtgggttactgttccttgtaagcccaataacctttcaaacagaccacggtttatttgcatggatgcctagaagagggatctgggcacctaggtcactactgagccccatgggaaaagcccagtagatccttggtgtcacaggccacacgtgtatggcttcgaattgttctaaggcaggagcttcgttcagagcgctgtgagacagcctctcagataaggaaatccagcccccatgcagcagccactcctgggcatagtagggttactcttagcccattttttttttatatccctgtcctttcaaagggatgtaaagagaaaacaaagccagagtggaatgg

SEQ ID NO: 2273 - DNA, 4001 bp, Homo sapiens
ctgtcttcctggatgcattctacttcctgccactctagggagatgctaagatttctggatccaatgccaagcatagtaaaaaagaaaagtggtgccatttcactcagaactgtgtctctcacccagaaggctccccagccagaggcagagagtattttcttcatcttggagaaggggcccattgtgctgaattaaaaataagacaaagaatcaccattctagggtccatttggggttggaaagagtgaaaccaccccaccttgcctatgtatctcccctgtctcaacacacttgaagaaagtgaccagaaccataaacagttaggggttaaatcaagggaagacttgctcctacaagaagccacatctctttcaagttccctgtaggatgctggctccacggagacttgaatgattgaaggaaatcctcaacaccacttgttgaatgactcaaccaggtaggtgtggccaggactgaatggggcaggggcaggcctatagtgtctccaagacaataccaaagcagatgcagggaattgactgaacatacttcagagaggcagaaagcaggagagacagagtaataccttgcaaaaagtagcagcagtgaagaaagaagtaataatgagctcctgtttgcagagcctctcagtgctggaggagaacagagtaccacttcaagccctcctgagtctgggacaagtctaattttgtttctgctcaccctagacatatagagacaaacctttattcttagttgtttttcactgccaaatgccccagaaaacagggcagaacagactttgtcttctttccaaccacccatagccaaagatggcataaaagtggagggtacctcctgcctccttgcaaatgtaatataacccacaccagccagtctctgcaaagctcaagacactagcactttcctaccaccatgaagtcagaagggacctcaaccccccaaagccgccccagcctgagcttcacctgttgcacctgcccacttaccatgggttcacaccagaagagaaagtaaaaggtcaggttgggctctctccacagcaagagcccagagaatactaggaaactgacattttacaaagcacctctttaaagctctctcagaggtgcgtaacttttaactctacctccactcccaaccccccaggcttcctttgcaactctttcccaccatggatggcttgtcgggagagagttaaagaaggtgcacgactaattccccaaaccatctcgcttatctacagacaaaaagaacagccttacatggagacacgcagaaaccacccgcaatttagctcagacctcacctgtcttatgcaacagtacacacacacacacacacacacacacacacacccgcaaggccagagtccaatccccctttaattcggtaaacatagttttgcgcctttcttttccctacgcagaacccgactctactggcagcagagaaatagatgtaaccctagtgccaaatgccttgcagaacacacagatacacaggaaccaaaatgcatctcatagctctccttggtgctgaaatcacgttagccagaaaatcaaaggagcgagtgctctggacttacccaggctgggggtgggcggccggggagcgagaggagcttcctgggaagaaaattcttgcttgctcaggctggagccagctgatgcgctcacctagagagccctcctctttcccttctcttcccttcctcctattctgggaggaagagacaaggctccacgaaagaaatgaaacccaagctgtcagggctacgggtggaaggagaatgaggaggcaaccaaaataagatcaaaaagtcaggtggcttcactccactagtggtaattccttgggtcagagaggacccccttctctcactctccctgggtctgcccgtctcctctgggtgttgagccaacagccttagcacagtcggttcctgcctctgacgtgaaagagaggaggaagcctgggactgctttgctgtctctctctctctctctctctctctctctctctctctctctctctcacgcgctctctcttttcccctcttgctgaaatttcagcagcatgatttttttaagcctccgttttttccatccccctacaagcagccccctagtggacagaaaagaaaagcatcctaaatcctcttgaacagtccagattcaggcacagaaatactccccgcacccaactcttggagctgcctctgcataggcagggtcctgaagaagatagaggcttccctctgaccaacccagataagaagagaaagggagaggatggaagcttttgcagatcctttgcccatgattgaaggagaaatccagggtggaatgggttgggatagaatgttttggaataaggtcagttgtggggttctcaagtggtttgaggtccgggctcagcagaaggaaccctccaaaaagtcagcgtctgcagccaggtgaagtatgtgtatacgtagcacaacccaggcatgggaatgcctaaagaggcagaggatacagggagctggcccttcatccaactccacaatatagcttttttgtaaagctagtaagaaaaatatctgaaaagatatggcctgagatcatctcagaagtagagacagaagtgaccttgatgcacatttatggagaaccttggcagagaaggggcatcaaggggtcactgctcataggctcataagggatatctaacattctcttttaaatgtacagccacacagcctcccggaaagagtcctaatacttacatctaaaaatctgagtcctggtttcagactgccacttgcttactggacattttgcttctctatggctcaattttactgtttgtaaaatgtggataatgctgccccctccctactgaataggaatgctaagggactggaatgatatagaaacatagaacctcaggattggcagggaatttaaaggtaatcttatacaaacactcttcttatatttgattcactcctggcaaataacaatagctaacatttatagagtgtttataccaggtgctaggcactgttataagcccttacatgtattagctcatttaagccatacaataactctataatgcagaggctattattgctactctatagactgggaactgagtaacagaggaatgaaataactttccaaagatcacacaactagtgagtgtcagggatggtaatggaacctgagccatctgaccctggagcttcctcattgaattaccatgttctataaatgtacacttcaggagtgacatttgaagtaaatagaagatagcaccacagttatcattgcttttatttatgacaaagtgcctagattgttacaataaatttatatgtggctgagtttttaaaataaaatatttaccactaggggtgccaaacaaactgtggaaattgctattaccgatgagaatctcctaagaaaattaattctcttggtgatttgggtagtttcacatatacaaaactggctttaaatcttataaaattggaaactattgggttttaacatcagttcagaagacacatcactcaatttctgtaccaaaagcaaattattgcccactgcctaacacagtgcaagaacggagccagcaatttgaagagctgaaacgttgtaatgcattcaggtaataaacgctcagtgagaaattgacattttcttcagaatctcagaattatgaattccttagctgaggtggcttactttttctggctttttttttttttttgggtgaaaagtggatgaagtaggacaaagatggtaggtgacaattaacaaatcatggtccctgtcctcaacagagttaccagttcctcaaagggggaaagaaagagcaagacacaaatgattacaattcaaggactaagtgccaagaatttgggcagtgagcacatggaaaacacaactaacttgatctttgagggctaggggaattcctaaggtatg

SEQ ID NO: 2274 - DNA, 4001 bp, Homo sapiens
aaagatttgggagagaaatgcttcctatctgatgttccctagaatctctctaccctccaccccacagccacacctaggattggggtgagatcagctcataccttgtctggctgccgcttgaagcaggcgaggcccagggaaaggatagaacgggtcctggcagcatgacacacggccttgtaacgttcctcaatgcaccttggggttgggtatgggggttgctgtggctaggagttagccttatgaaggacccaaaccacccaggtctgtgacccccccactccacagttgagggctggcactaaagagaaaagggcttatacttactggttcagcaaactcttcctgtccccaagcccactcagctcctgtgggtaggtaaagggagagttgtgacaggcctctagcaccagccccttcacaaccacctgccctccttgtttcccaactctcaccgtgtccacagccacgaaattagctgtctttatggctagcaggagggatggccacatctccttgaagttgttgctttgcacatccactacgggaacctggactactagctcctccccagatgttgtgcttttgctgacaccacctgggggttaggagggtgatggatgttcatgcttaaggaaagagcccaggggaacagacaccaagctaggccacggtgatggtggtaaggggggtagtttccattggtagcttttcccacaagcctttgtaacccacgtgttctacacacaggccttggagtggagaatgccctgaatttggggagaggaagcctgagtcttctactggcttgtatgagcctgggtaaattacttcccacctcgctttcacaatctgtagaggagaaagttggactagacgacctttgattcttttttcccatgtcctgcaggaaacattttgtagggcttgaggatctcagctcccttaatatcccacagggatccatactactgttctcatggtgccccagcgccacaagcaacagctcccagtaagccccagagcctggcagtgccccacaccagagctcccaatacgtcctaccttcctttggatcacaacgctcaatccactccactgaactgaatcacaactattactactaaccgttatgagctccagactacatctcccgccatgcctccatcagccccatgctcccaacgctccaggcttttgcagccggagccgcggtgtacaacggaacttgtagtctcctcgtggctagttcaggcggaaggagcagtcctctgaagcttgaggagcctctagaactatgagcccgaggccttcccctctcccagagcgcagaggctttgaaggctacctctgggaagccgctcaccgtcggaagctgcgggagctgaaactgcgccatcgtcactgtcggcggccatgacaccgctcgtctcccgcctgagtcgtctgtgggtacgctggacttgcggtccgtctcctggcgcggttcaggcagtcggggatggggcggggtctcgccgtcgggtcgccgatgggtcgaacttccgttcagacgtcccgggtccggcgcggggaaggcagcctggcgcgcgctaattgcctattggcctgtgctgccggctcgcagcccgggtggacccgagccacgccccctggagtgcgccggaaagccgggcgcgctagagctcgcgggaggtaatctttctctcctgctctcgcggcgggaacgcggggcctccgtgttctgctgtcttcatcagcgtgggccgcgggtagcgggtagtggggtggctgggtttgggctttccagagaaggtgacgctgcctgagctgagcttaaagcacgcccaggagttagactaggagagggtcgtgtgggggaaagaagggcgttctgggcatcggtaaattcccagagaggatggagagctcagtgatctccagaaagtgaaagaggcggggagtgggccatcggaggaggctgcccagggtgtaagagcgaccgattggtagggaagcttttgtaataatccaatcaagtgataatgtgaacttgaattaaggctggcagtatggatggcgaggaagggacaaattgtgaagcagctaggcggtatagtcgacctagagggtgattgaatttgaaagaggttcctaggccgggcgcggtggctcacgcctgtaatcccagcactttgggaggccgaggcgggcggattacctgaggtccggagttcaaaaccagcctggccaacatggtgaaaccccgtctctactaaaagtacaaaaaaaattagctgggtatggtgcgggcgcctgtaatcccactacttgggaggctgaggcaggagaatcgcttgaacctgggaggcagaggttgcggtgagccgagatcacgccattttgcacttcagcctaggcaacaagagcgaaactccgtctcaaaaaaaaaaaaaaaaaaaaaattcctattggagactagtccctccgtaaacactacgattcccatccacctctgccttccagtgctcctttgttactcattgtttatagttaatcttcagcttctctcaactgagcccatttcatcattattcagaactgcttgggccgggcgcagtggcttatggcctgtaatcatcttaggaggccaaggtgggaggatcgcttgaccctaggagttcaagactagcctgggcaacatagtgaaaccttgtctctacaaaaagaaaattaaaaattagttgggcatggtggtgcgcacctgtagtcccagctacaggaggctgaggtgagaggatggcttgagcccaggaggtcgaggctgcagtgagccatgttcttattgcactccagcctgagtggcagagcagcaaagtgagggacacactgtctctaaaaacaaaacaaacaaacaaaaaaaaaacaaaaataaaaaaactctttggatttctcctatcctaaaaaagggaaactcttttgactatcccccatcccattaattcatttaacaggtatctattgtgtacagtttacctggcactgactttggacacacaccaatcaacaagagaatcagtccttgcactcaagtcgttttttacagtcaaattcaggaagtacacactgatggaaagaatcaaagtaatgtaaaattacattaggtaagagctacaaggcagaaatatgtgataggataagatgaggggacctgatttggacatttcagtcaagacttgaaaaatgataaggtgttaggtaaaagcataaaagagtccaaacagaggaaatggattgtgtgaggccccaaggtgggcagacacacttgaggtgtttaagcaactaaattcagtcaaccttggctagagcatagtgaggggatgaggcggatggtgcccggatcactggacctgcaaggctgtagtaagaggactgccttctaagagcaagggtgtggcagccaaatccctccaatggcctataaggtactttgtgaccctcctctccccacctcatctggtttacttctctgacctcttctaccactcagtcccatctcattccattctaaccacattgacctacttactgtaccacagacataccaggcaccctccttggggcctttgcactcacttagaatgctttgggtctaccttgaccacagtctttaaaattgcaacattaaaccccaccttggcactcttttttttcccctcttggtctaatttttgctttttatgctaatatttatcacctaacatcttatggaatttacttatgttcattattccttttctgtccccattagaatataagctccctgagggcaggaacttttgatgttttatttactgaagtatgccaagtgcctaaaactgcttggcacatattagggggctctataaatatttgctcaatctttttttttctttaagagacaaggtcttgctgagcccagggtggagtgcagtggcacaatcatagctcactgcagcctc

SEQ ID NO: 2275 - DNA, 4001 bp, Homo sapiens
gtaattcactgtaatcattaggttgccgctaaatccagaaaaaacaattttagattgaaaatgatggagaagttattttgaaataacattcctccatttgtctaaaatgatagctcttgtttctgcaacaggacttcagggtttccaacggaagatagggttaatccattctttataactctgcatttgtaccaaagcccccagctgtcacccattttggcaactacaggacaataacccgaaggcagaatgaccaccagcatttatggaggagcatttcctatgtcagaaaacgtggaaggcaattcaaacatctcaaccttcacaagatcaacaagaggtaggtggcattacctgattttacaactacagaaattaggattcagaaaccccaaattatgccgctaacctggccctagaaattcaaggtctgaatgtaaaacagtattctattagtctgcctagtcataaatcaaattatgtctatatcccttccctcctaaaacataagaaagctggaactagatgtctgattcttagtgctagtaagatcagcgctgcagtcactgctcacacagggctactgaacacttgaaatgacttagtatagctgaattaaaccgtaaccactgttacttaagtaaacaataatcccttctttgtaccccttgggctttagtaacttacgtatcaattttaattccaaaaactaatttggctgaacaaccaagataagccaaaaaatatttcttattgcaacaaatttgctcttcaatgatgcgaatgaagattctccgaaaattcaaggtggatcacaacggttttcatgacacgattcccctctggtagacctctcttaaaagatgtcgcaggtatgaaataagactgagccacgggagaagcgcagccctttggactcccctgcaatttctatagcattcactcatatcttggaagcacttagaacgaagctaccaagagggtttaagaatgcagcaatgagccaggcggatcatctgaggtcaggagttcgagactagcctgaccaacacggtgaaaccccgtctctactaaacacaaaaaatcaccgggcgtggtgacgcccgactgtaatcccagctactggggagactgaggcaggagaagcgcttgaactcgggaggcggaggttgcagtgagccgagatcgcgccactgcactacagcctgggcgacagagcgagattccgtctcaaaaaaaagaatgcaacaatgatactgcactgagcatgcggatttagcctcagactaaaatttgcgacaaaaatgcacgactttttagttaagagtagaggtttaaaaagatgaacgacaaaaaaagagacaacctcctccccaggccacacacacccgagattgcaacagaaatcaagagtgcatttgcacggctaaagtgtctggggaaaacaaaacgggaaaaatccttcctccaaaatggaattcctacggggcactagagcccccggagcggcgcagccagcgccatcgcctattgagggccgcaccacgcggtcgccctgcgcggcccacaggctggtgggaggcaatgacccctcctgtgaagggcggcggccgaaggcagcaagcctggccaggggagagaggacccactcacgttctcgaagcctgttcttgaagttggggtcacttcgtcttttgcggtcgaagtagatgcagtacccaatgaaaagggccccgcatacaccggcggcgatggcgctgttccgacccaccatcttctctacaacgctgagcgtggacggtggcggcagggaccgcgaaggagcggtgggccacgaaccctcagagcggtcggcgcagctcacacccgacggccgcgggccaggaacacagaaaggccgagcacacgccacttccggtcccagtcaactaagggcctcgaggtcgtccgcggcagagcctgagcagaggcccagagcgcggctcctgcgcctgcgcagtgggcgaagccggcgtttcccctgcgccgctgggtgtacgcactggagtcgggaatttgcacgtgaccacggactttttttcatatccgccgaccatgctgtaacgaggcgtacgcgttactggcgtgcacgtactcagaagactagctgacagccttgtttgtggcagacagagatgcagggtcccagactgcgaatgcttcatcttgtctaacacaggcagcctgtgacttgtttgaattaaactgtactttcttttcaggttgccacaatccattgtgcgtagtggttccatttcaaaagaatgttacaggatagcctcattttatgataactggaataaaattaaatggagtaatttcttgaaaaatatacacaattgaagaaaaaatagaaaacgtgaattgttttatagccacacgaaaacatacacatgatcaggccaggcgcggtggctcacgcctgtaatctcaacactttgggaggccgaggcaggcggatcacttaaggccaggagtttgagaccagcctggccaacatagtgaaaccctgtctctactaaaaatacaaaaattagctggccatggtggccggggcctgtaatcccagctactctggaggctgaggcgggagaatcgcttgaaccaggaggcagaggttgcagtgagccaagatcgagccactgcactccagcctgagtgacagatcaggagtccgtctcaaaaaaacaaaatatatatatatatgatctaacttaagatattgacaaggaaaatcgtgggcagaaagcaggcattaaacagacactgtaagttgaggggtatcgaagtcaagcatcagtgtcaagagacattggaaccagagctaccttaccttgaataggggctgggtaaaatgaggctgagacctattggggcacattcccaggaagtttggcattcttggtcacaggatatttacagggaagggaacaagttaataatgtttacctaacagacccaggaaatgtcctgatgtcctgatatcttaagaacaaaagcattcttagtttaattttccctttaaagataatattgatccttgcagaagacagtagttacacaggattaacagtcctttgacaaagaccaggcagtgtctcacacctgtaatcccagcactttgggaggcccagatgggcggatagcttgagcccaagagttcaacaccagcctgggcaacatggtgagaccctgtctccacaaaaaaattaaaaacttagccaggcgtggtggcacacacctgtggtcccaactacatggggaatgatgcggaagtatcccttaatcccaggaggttgaggctgcagttgagttatgattgtaccactgcagtccaaactgggtgacagggtaagacctcgtctcaaaacaaacacacaaaaaatcctttgtcacaagctcttggagtagagctcatcttcctcatttttttgctgttcaatacaaacaagccttgtacctaaggtggacatgttccttctcttgctttagggtatgcaccattctacaaagtaacctttcacttttttttttttttttttttttttttgagacagtcttgctgtcacccaggctggagtgcagtggcatgatcttggctcactataacctccacctcctgggttcaagcgattctcctgcctcagcctccccagtagctcggattacaggcatgtgccaccacacccagcaaatttttgtatttttagtagagatggggtttcaccatgttggccaggctagtctcaaactcctgacatctggtgatccacccacctcggcctcccgaagtgctgggattacaggcatgagccaccgtgagtgatcttctttattttcttaataaacttgttttcactttactctgtggactggccccaaattctttcttaggcaagatccaagaaccctttgttggggtctggatctggatccttttccagtaacacgaggttgcataa

SEQ ID NO: 2276 - DNA, 4001 bp, Homo sapiens
tcatctccccgatactcgccatcaaactgccatgtcaggaacttggcctgctgcgtctgggtggcaagagcaagaagtaaaatctccctccctctttatgatcattatagactctgctcctccttccaagccctcagagcaggaaacccgtggaggagaaagaggaagtgcctcaggggatggaggcaggaactgtggtcacctggaagacagccttagctcggagccgctctgccaagaggagcaagacctgggcgttcaggctgccactgctgtccatatcccctaccacagtggggaacacctgtggaagggtgtacacagtagtaaggctgagccggatggcaccactcagcctaaacccaaatatagaacttcattaagagtgcacagcgccccctggtggagtcacaaagacacactctgggctcttcacagaaaatgtttctctaccctctctcattcagaaaagacacagagaatcaggttacggcccattcctccccataacacacacaattcctcttcctccagacctgggtcccagattggtttttagggagatgacccaggtgtgtggagccctcacctcagtgggactgagctgccaatcccctgcataggccgcatggaggtgatatcccggcaagcccagggcactcatgtgtatagtgtgcgccacctgaggaaaagaggattcagtggagaaaagcgcattcctgctccacttcaatccctcatcccacccttagtcttttccccatccagagggcctctcaagaatcctaaatattccaacatatacagagaaggtcatcggattaaaagcaacaagtcccacaggcacggaggtaaagagaaccccacatcctccctcatttgtcccacatagactggctagggctggagtacaaaggaaaggagaagatgatccagggacaggaaagggggaatagtaaggaggggccagagaagtgggagcacctggaaatggctgctcagaaccttgttgacaacgagcttcactccctccatctgtgctgggaatacatctgaagggggtaggggaagggaaggaataagcacagacaaagaacccctaccccaaaagatagtctcccctttcaatcccatagggaacactttggaggaattaacctcctttcaagtcctgcaatgaaatgctccacttcatttgggcacctgatcctccctgaggctgcatgacccagctatgatctcccctttcctgctcccatcgccggacatccggcattcaagaccctccactcctctgccccttcatcctgagacacccaagtgccaagttctcacctttgcatagacggtgcagctcatcgaagctcccagggttgggcaggggttcctctcggcgggggctccggcggggcaaagtccccattggtgccaggcccaatgtgttccccattttagtccagaggactgggaagagccgaggttagcctgtgaaaggacgctattgcccctttaccccccaacgggccccaccccccattatccggctccccagcctcagaaacttccacatggtccgacgctacacctggaacaggaagagtagggaaggagagcactcatggagagacaaccctaggcacactcccgccccatctttgatctctcacccccacttgtcacccttgtcctctctccctttctctgatcctagcccccaccacagacttcacctagctccctagcctctctattcttcattcccaggccccaagaccaggcccgcaatggtgcagtatcccttaccatctcagaccatcatgctgcccctttccccccggcacaccccggtcatcttgatgggggcagccatcttgagtgatggcagaactgcagcttcacgctgcattcttagcgtggccgtaagcgccatctttgaatctggcaaagaaagctgtcaaagacccaacccaaccctgattgggccccgcccaatcaatgaaaaaaaaaaaaaaaaaaaaaagcctcgctatttaccatgggccaatgggaagggaggaagaaaatgagtggcaggtctgacggcccaagagcttcaaccctggagctgcagaggcgggcaggacttgattggtggccccttagacttaagtggaaggctttagatcactaggcctctccaaggtcggaaaaaaacttgtgagcgtacaagacactagagggagcatcttgtagcttgggccactgaagctccttccacccatgtagtttcatccatgagaaaagtggaactacagcttgtagactggcatagtgtgaagggtggcagaaagaacgattatgaagacttctttggaaccctggttcatttctatcgctcccttctctccaaagaacccatgggaaatcctcctcacagccctccacagcacacctccaaatgagtactactcattaagcgcagcactccctagaacagggacccacccttctcttctggaggtctacatctctcgaagtccccgctcttgaccacttggtggaatggaaacgggtgtgagagtttggcgcagaggagtaagttctagcagaactattcgctgaaacagctgctttctgtatttaacccttccttccctgagtcccaaggcagagttggcaaataaaatctaggaatatggagcctggcccccaaaggcactccatcccaggaccagggacaagccaaagggctgacctcaagcactaagcgctccacaggggaataattgaaaatggagtaagagttcttggtcttggagggtgaagggtgggaggagggagaagatcaggaaaaataactaatggatattaggcttaatacctgggtgatgaaataatctgtacaacaaatccccatgacacaagtttacgtgtgtaacaaacttgcatatataggccaggggcggtggctgatgcctgtaatcctagcactttgggaggccgaggcgggcagatcacctgaggtcgggagttcaagaccagcctgaccaacatggggaaaccccgtctctactaaaagtacaaaattacccgggcgtggtggcgcatgtctgtaatcccagctacttgggatgctgaggcaggagaatccttgaacccgggaggtggaggttgcagtgagccgagatcatgccattacgctccagcctgagcaacaagagcaaaactccgtctcaggaaaacaaacaaaaaaacctgcacatatacttctgaatttaaaacaaaagttaaaaaacaaagatttcttggtctctggtcactacctccctcatcagctttgcgcctccactgtcaccctcaggaatgttccacatactcagcgagtatgcttggggggcaaaagggtgaaagatacaaaagcttctgatatctatttaactgatttcacccaaatgctttgaacctgggaatgtacctctccccctcccccacccccaacaggagtgagacaagggccagggctattgcccctgctgactcaatattggctaatcactgcctagaactgataaggtgatcaaatgaccaggtgccttcaacctttaccctggtagaagcctcttattcacctcttttcctgccagagccctccattgggaggggacgggcggaagctgttttctgaatttgttttactgggggtagggtatgttcagtgatcagcatccaggtcattctgggctctcctgttttctccccgtctcattacacattaactcaaaaacggacaagatcatttacacttgccctcttacccgaccctcattcccctaacccccatagccctcaaccctgtccctgatttcaattcctttctcctttcttctgctccccaatatctctctgccaagttgcagtaaagtgggataaggttgagagatgagatctacccataatggaataaagacaccatgagctttccatggtatgatgggttgatggtattccatgggttgatatgt

SEQ ID NO: 2277 - DNA, 4001 bp, Homo sapiens
aaatctgtcagtaccttcacgagtcagcaggtaaacttgcagcctatcaccgtgctctaagctgaaaacccactcctccgcctatcaatagtctaccacaaactatgtcatcccattgtgactcaggtccgctgatttttacctcacaggtgccttacatgggattaacatgaaacttcatctgtgactcagtgttaggtcctaaaatggggggggcagggtgggagaggatagattaaggaaactgattcacctatgacttacctaacactatacactcactttgtcagcatcccttttgtccatttagacgaaaactctaattaatagtcttgtttttcaggttactttgtcagtctgatttgccagactacttgaggttacagtgacggccaccaaagtggcagatttttggcagggaccaccacactggagaaacagcaatcagctcaagttatcaaacactggggaacatcagttcaggaaaaatgagttaccccatttcggtgaaagtattgggtgaggtctcaaatcaattcactaaactcagcaatccctcgaaatgcccactcacaaaatttctccttcctctctgcccacctgggtgaggagggaaaaagactgaaaggttagatcctcagctggggactctggcccgcgagcgttaaagaaggaaatggaagtggtttctgtagaaacatccgcagggtagagggaaccgaaatgaaaccgaccctgcagtaattcgctgtcccctcgtgaaggcctgcagaaaaaggcagctctgactcccctaaattgatgcccgatgttgggcagagcgccccagccctgcccgggtcgctccacacgaccatctttccactcctccggtcggcgcttccttccccgctgcgggtcagggtggcccttgcacggcggcacaagtccagagggggctgaggaataccctttagccaatcccagtacttagtacccaggcgggcatgagctccaccgaggcgcgcgcccgcccccgcgcgttccctggctcgcggctgggactgttacctccgcggtcctcaccttcagaggaatgagagtcccgcagccctctcctggtcataacaggagacggctgtagcggaggctgctctgagtgctgctgctgaaggcgggtagtccttcgcgtcttcatttcctcggtttcctggggtcgcggctgcctccgctgcctagaccgaaggtagtacgcgctttctctcacttcctctttcgcagaatcggaccggaactcttctagccgggttcgttttcccaccggggacctttctttggccaccaggggctcgaagtcgccgtacacttctggcggctcgtccgagaacctcacttcccgccggccctggcgcgacggaggagttctgtacgcaggcgcatcgctgctgccgccattttgaggggcgagccggccccttccctctcggatgggggccctgggggtgacgtacacaccccatccttcccgcaccgcctctgcccgccgcccgtcgcccgccatagttgttgacgtagctttagtcgatcgcgaagatggctttatggaccctaggttctcctgccggtggtggcgatggcttctcgggggtgttgggcggtggccgctgtggtcagggaggcagttgcgagtcgctggggccgccgcctgcgtcgtcgctgctgtgtagcaaacctgcctctgggcccatggtgtgtcttgagggctgtgagagaggcagtgcctgagctgggtcagctgctgtggatcgctcccgcctcctggctggaggcaccaaagaggaggagaagggggaggaggacgtctctgccatcgcccttaagtaaaggaggggtgggggcgatagaaggatggcagggcaacttgcctgtcctaagtctagccgctcgtggcaagtgttgactgcgtgtaggagactcccgtcctatctcccagtaccaagtctcggggaaaaggagtgcgacgagggtggagaagacccaagtttcgcttctcggccccaggctgttgcgcagtttccctggaatctttttgatcgactgctacgttgaccatgtccttcccagtgtccttagcaggagtgatggccagagagagaacttttgcacatgccatgttttcgtggcaaaaattttagtttcaagtaccttatgagggcggttacctagttttgaattttgtcacttgttgagggtgtacaaaatcctatctagagtcatactcgttggatgtattttcttttccgaaatgtacccataggacacataaccttattcctggtctttaatatttctcggttttataccaagcagcagtgttcggaagaccatgttagtgctacattgtgcacagtgagaaatgaacaagttttttaattaaagacagcactgtaattttaagttgtgatccattatttttacttttattctggatgtgacgtgatactctacatttgatttagaatgctttatggactttatggaataagaaagcatggtaaaatctatttgtttcacctccttatacaaatgtttacagatgtggctaatctgcaaatacctaaccaaatttagacacattcagagaaggtcgattaagttcgtgtaaagtctgaataattattgaaagaaagcttaaattgccttcaaatatacaactgcttgtagggctttgtatgattggagtgaatagatttaaaaaattgtaatttggataccagttacaatgagcgattctgaaaagtttgaaggtgtttgtttattcttccaagtaatcaccttaaaatgtttttgagcaactcatttgttgctcaaacttggcacaaatttcaactacttaagtcgtaatgtgtactatgtttttattttatttttatttttattttattttttttgagacggagtcttgctctgtcacccaggctggagtccagtggcgcgatctcggctcactgcaacctctgcctcccggattcacgccattctcctgcttcagcctccccagcagctgggactacaggcgcatgccgccacgcccggctaatttttttgtatttttagtagagacagggtttcaccgtgttagccaggatggtctcgatctcctgacctcgtgatccgcctctcggcctcccaaagtgctgggattacaggcgtgagccaccctgcccgactgtgtactatgtttttactaatattgtccataaatttggccacaggcaggaggaattacagttttagagtgagataaggtttggcctgttaggagcttagtttactgtagctttatgtacaatatagcttttaaaaactgcagtaacaaaagagagacttctttctttcttttctgtctctctttcttctttcttcttgtcttttaaggaaaaatgaaaaggatactcttccttgtcagtctggattagatggtatatttcggaaattagctagatttactcttccaacaaaatgctcaaaagtattgatatggtaatacgtggcttttatttatgttttaagcagggctttctctttaaagtggctattacattactcattagtaacacaatagtataagttccttaatagatttaattattaaatataaattttatagtaatatattgagttcatattatgaacattaaagtctccttgaaacattttaccaagacagatgactatgtagaaactgggatactagcttataaaacttggatacaggcttgtaaaacttaggtttgagggacaaattaaaaaagagacaagagattctacatattgaacaatcagaggagaggttctgcatattattgaataatcagaatatgcatattttgtaattaaaactgcttgtaaaggcttaggaatggcctttcaactaaattaatgagacacttactgtaaaattagaggtatggtaactttaatgctaacacacacacacacacacacacacacacacacat

SEQ ID NO: 2278 - DNA, 4001 bp, Homo sapiens
gactccagtctatgctcattaccaatgttagggacacgcttccttattcccaagtgcttgatttctgtgcaaaatttatggtaatatatgatcgccctatgaattccttcttgtaggacacagtttaatccagtagttcatatgatgtagaaatattaatgaaattttaacacaatcaaaattctaaatggtaaataaaacagccaattcttcattctttaaatttttttggaagttgtcgaatctccaagtttatgggccttcacagttgacttagtgaacaacctcaaagtgataaagcagacaaggctttttgaagcaaacattccttcaggaaattcaagtggcacttcaaagaagtgtggactttcctggaatagaattttgacttctgtgttccatggaaatgaatggaatacagaaattacttcttaggcaaaaataagttatatacaagatacaatacattattaaaacacccaataatcctcaaataattagctacattctgaagttaatttatttataaattattgaagctctcaagctagcattacctctacattaggaaagaaactagataaaatagttcttaaatgagtcacgcaaggttgcgtaacaaaccagcagaaaaacaggtaatcaagttgtggactgcacgttcagcataataaacattactgaagacaggcactcagttttcataacaaatgttagtttttcaaactattctaatccacacaaagtcttccaaaaacatctgtagttactctaccatgaagttcctttttttattaaatgtttccactggccttttatatcctcatcttgtgctcaaaaaaaaaagctcaaaaaacatggataactgccacagcttaaaacaaagaaaggatctctcatacagatccaaaataaaatgtgttaaaacctaaagacaggtaaaacaaagccagtatgtttaatctatgtaactcatttctggatctgtgtaacagtataaagtctgataattaagcattactcataaagtagagagtactatgaaatttgttaaaagaaggaaaaggcacaaactttttcatcaggtattaaatacaattgggagaatggtacatatataatatgtaagcaaaatggtaggaggtcttactaaaacttcaactttgccctttttagcaccaattttttttttttttaagtattatcttttcaggattaagattatgaatgtcgagaacctaggcatgttgggaatggagtaatcgccgcctacactagtaggcaaatttcccactcacatttcgaaccctaaaataattcggcttctcaccttaaagtctaaacccaaaaatttactcacatcttaacccatttaatatttataagattcagtttctttttatcccaaaacaaaaatatacccccaacctacctcgtttactgtttgagtgaggccaggcgtggtggctcacgcctgtaatcccagcactttgggaggctgaggtgggagaatcgcttgaagccaggagttcgagaccaacctgggcaatacagtgagaccctgtcgctataaaaataaaaaataaagtaattagtagggcatggtggtgcgggcctgtagttccagctacttgggaggctgaggcgggaggatcccttgagcccagaagtatgaggctgtggtgagctatgatcacgccactgtactctagcctcggtgacagggcaagtacctgtctcaaaaacaataaaaataaaaataccatttgtgcggtacgaaggtgggggtggggagggaccgtttctgaaagtccttttcaaaaattcaagatatcagtttcaatactaaaacatggaaaagctgcatagtcattttgtttacttacaaattctggcgaagttttaaatcgtaaaactgttagtatcaggagagcccttcgagtattctctccgctccacaccgctcggctgcacccagcggccgccgcggcccgaatgtcgtccagggtccccgcccatatgacaaacactttccgccggaaggcgcccgtggaatcctgggactagtagtctccgtgccctgccttctgccttctccatccttcaccctctactgccaggtcgtctgacccagcgacaggcgcggtaaatgcgcgaccaaaccgcagaggtcccatgcaatctcatgctgacaggattacaggcatctctgtaagacgtcgaccaccctgacctgaaattcatagactgaagaaactcataggaccaacacagtgagcagcagtaccaaatgataatggcaagcaccatgtcctggaacacaccctctgtgccattaagaggagcatgtaatccaatgagttgcctaatctaaacctcagtttgctcgtgtgtcaaatggggacaacgttacttacctcataagtttgttattagtagattagatgacgtatgcagcatttctgttaaatgacagtagtgacaaaaaatagctgttttgatctactaattttataaatgtgaaaattaagagatggcgagcaatttacccaagaacatacaatttgttgggggaaaaatgaagtaagtctaaaattcctgttcttgacctacagcaattcaggacaaatctaaccaaatttcaagaagaaatctattcatgtaaaactcccttcccctttcctcttttttttcccataacagtcctgaccaacacactattttacttattttgatttttgcccgactcctcccatagaatataatctccaagaaggcaggaaacattttttgtcttttagtctattttgttcactgctgtatccccagcacagagaacagggactgcctactacacagtagctcaagtatttattgaattaataattcctcatttaatgtgatttttggtgccttcacttctcaatcaccctctcttggcagaagtgacaggatttggtaacactcttggatggtgtttaataattaactgcaagtcctaattcaacaaaaagaatactatattccattcactttattgtgtttaattaatttcagtataacatttccaggaattttcatttgtattgtcattaaaatatttttctatcatttgtaagactggggaataaatggagccagctactatgtctttaattaacttcctcctgtttaatattttaatcatcttttccttattaaaattgtttgcctacttcatttgtactactaagtcacaacggatagatttatctctttaaataaatgaacttctgcttaccctaaagcaaaaagttcctgtacaaaaaatttattgttctaaaatgtttcatttaaaataattattttggccaggcgtggtggctcacacctgtaatcccagcactttggaaggccaaggcggatggatcacctgaggtcaggagttcaagaccagccttgccaacatggcaaaatccatgtctactaaaaatacaaaaattagctgggcatggtggcaggcacctgtaatcccagctactcgggaggctgaggcaggaggatcacttgaacctggagttgggggaggctgcagtaagccgagattgcaccactgcactccagcctaggcgaaagagcgagactccgtctctaaataaataaattaattaaaaatgaaataaaataactgatttaggaacccagtctcaagagcacaggatttccagacctagccctaatagttaagtgtgtgaattaatgccatttaatctgaattgtaatttttcgtgtttctgtcgttcccaataaatgacaaattccctaaagatagtcttcctcattgctggcacacgtttgataagtaaatgaattattaagtgtattctttgttttaatcatttcttttcttaccggtcttcttttttgggtcactgaattcctccagatttctcaaattcccaaagtaactttaatatccagagctgaggcatccttttttagtggcccagcgcatcccttat

SEQ ID NO: 2279 - DNA, 4001 bp, Homo sapiens
actgtgtccctaaacacactgtgttattggcattttggccaattaagtgacctaaatatctggggtgggcctcatttatggagattgaaggacctgggatcaggagaactctgggcaagaaattgctcctggggaaaagagaggaagcttttgcaaatgtctgaacaggtttcagaacatggggccaaagatcaccttgtgagagtgaaaatgcaaatcaactgcgatatgcaaatcaagcaacccaaactaattagaaaatactggttgccatggcacagtggctcacgcctgtaatcacagcactcttggaggccaaggcaggcaaatcacaaggtcaggagttcgagaccggcctggccaacatggtgaaacccgccccccccccccccccccgcctctactaaaaatacagaaattagccggacgtggtggcaggcacctgtaatcccagctactcgggaggctgaggcaggaaaattgcttgaacccaggaggcggagggtgcagtgagctgagatcgcaccactgcactccagtgtgggtgacagagcaagcctccgtctcaaaaaaaaaaaagaaaagaaagggacacttttaatcacaacccagaatttctgatcagttctctctggatagttccagccccctctgagaggtagctgtttctgtttagagtgaaacaaggtgctctgggcctgacaaacagctcagtttgcctgggctattaagctagaggctaaaaaggggcttccctgactcaagcatttggtactccctcaaaacttcagtcagactgtggcagttcctgcttgtcgggaggctgggcaggatgacgaaaggtcccttgcatctaaccatttcccctggactgcctcccctccccacagatccctagccccttgaagccatgcggggtccaacctgtaaagttgttggagattctgcaatcccctctagggcagcagtctttgaagctgcagtaccacgtggtcaggaggtccaggtaccgctggcccaacagaggaaggcgccagcctggaaaaggaggagctgtgagaccgagaggagaccatccggtgctctacagtgatgcggcaaccttgccacacaacttgtcagggacagagggacacccagaactcagattctaactcccagccccgactcggcccactgtcggtcctcaagccctgcgtccaaaagcagcaagggagacggcagtcaccaggcatgtccacagcggacgttccctagagctgtcaagagcaacaccttcgaataacgccagggtgggctgggagatggcacaggcggtgcgagagaatctggaaagcgcagggatcaggggaggcgggggacgggaagccgggcgccaggggggtgcgcaggggacgcgggtggggcaagggcggtgatggggctccctgctccgcggaggctgcccccgcccacagccggtaccggcggctgagcagagcaggactgcgggcccagatgtcgccccggacaggagcgaggcgaccacagccgcgcccggatcgcactctgctccgcagcgaacggcggaccgtggggacggggtcttacccaggggccccgtggctgcctcctcgtcctcgtcacagtcgtcgggccacacctggcagctgaagagcgtccagtaccgcttggagagggcacccgccgccctgagctgctcctgcaggcgctggaagcccggccaggcccaggccgagcccggctcgtcggttccctcccacggcctggaggcgccgcggggctcaggcgcgcccgggagcagcagcaggaaaaagagccaaagctggcgccacggaccgcgaagcatggccggccccgagctgcgggaccatccggctgccggcctagccaggctcccttaagcccggggcggtcaggcggggaccgcacttcctaggcgggcttgaacccgggattggtgttgctgtggcgaccggcgggccgggctgagtgcgcactggcagcctccgtacacgtgacccaggcgggaacccgaaaccctgtctggggtcctgagaggcagtcccgagactgacttcaggccaggtgcaactagccggcttccaggaagcagtttattctgggtcgtgattgtggttgcaaagaaggtgaactcaggctttgaaatggccactgtcaatcactccgctaggactttcggacggctctggtggcccatcagaggcctaccgaataaggacactcctgctttgcctcgcgtttgcagatcaacttcccgccaacctgttagaggaagccggaaaaccgtctcagtcaggagcgttaggcaggccaggggagtcagctgagtggagaagaggccctggaaagaagggcacagctaggtgcctgtctggccaaggttgccctggctcctccgcagagggaaatgaaaccgcagcaaaacaccagcaggtttccacagtgggagtccacgaaaagcaagaggaagctgattgacgggctccagtctggaggtgtttggagtttggaaaccccccgagtcatgggtaaatcatgaggcgtcatgtcaatgtaattatatctcataaaaatccgaagtactgtgtgcactttcttgactaggtttgcaactttcaagtgctgggactgagcagcccatccgacaccattggcaaaagactacagggcctctttccctcagcgctctcttctccatagcgaggagcatggaacaaggctgttagatttcagaagagcttaatgcattgtttaaaatcacctggcttacttcagccaagccaaaaagccgtcttgtcttaggagaaaactgctgtctagagagatcagaggacttggctaatgtcatatgtttagtggctttgaggttgggccctccagacagtaaggtgaatactagcaccgtgtctcacaaatgtcacaggcaacttgattcatctgttcaccccagtctcttagatcacaccgtgccaggtctgctccattctcagcagctcaccaaatttgtgcctttcattcgaacagctacagaaactagataaagcacctttgctaggacacgaggttgagttgaaaagtaaaatgtttatagtgtctcagccattcagtgtgatgtcaaaaacttttcatagagtagcagccatggcaccagcccagcactgtgtacatcgagcttgcggagtccaccggagacagttaacagcacatacaccacagtgcttattggaaaaccaaaaaaaattaggcagggtgtggtggctcacgcctgtaatcctagcactttagaaggccgaggcgggcggatcacctgagatcaggagttcgagaccagcctggccaacatggtgaaacccagtctctactaaaaatccaaaaattagctgagtgtgatggtgcgcatctgtaatcccagctactcaggaggctgaggcaggagaatggcttgaacccagggggcagaggttgcagtgagccaagatggtaccactgcactccagcctgggtgacagagcagggctccatctcaaaaaaaaaaaaaaaagaaaaaagagaaaagaaaaaaaattaactcactcaacaaatgtcgtttgagtctgaatggcagtctaatatagtgattaccattttctatttgtgcaaccatggatgttactgaaccgtcccatgcctgtttcctcacctataaaaagggataataaaatagtcccctcatagggctgctgtgaagattaaatgagctcattcaatgagcacatcatcaacactcaatacgtggccagttttatttttgtatctacccagccatggaggaggctctgggtggtctacacaggaggcaaggatggctttagttaatactggtggtttataagtgaatttatggtgaaaaaattaatagtaacaatagtttattaaaacaatccaagttttaagatgttgtggaaagaattatctgtacttggaacttttatgtaggg

SEQ ID NO: 2280 - DNA, 4001 bp, Homo sapiens
tactaatcacacttccttcataaacataactctaatcctcaaaccaccctaagagctgagtactattatccccattttacagatgatgaaactgagggacaagttttttttaagtggctacgtcactaaaggtagtagctgagcaatactgaagtgttagtctgacttcaaagctggtgtaagtgccatcataccacactgagtctgtgttaggattgtattctgacatcagaaaggcaatcagaagaaccatactgctaaattgaatatagtctcaagagccacataacgttttatgaattcggctacacaacggataccttggtagggtatctccaaaggataccttgacaaaaaacaaggaagaaaccatatagcaacaactgatacgtgtttctcttgctcctactgttaggaaaaattcacagacaatccgtacaagttacttcaacacaaagaaatgtaaatccaggaaataaaaatcttaacagcaaaatccatcacccttatctatggtccattatttcaatattgggtattcacactacaaacctgatttcataaccaggcattaaactaaaataagatgcataatgctattaatactttcaaattccttgaatcctggcaggacaaaatatcccaaaccctctaaacccaattactaattctagtgaattgttaagtcgacccagtgagagtttgggacgccctccatgacacaagcagggggccagggaacagcatattatactctgtatgtatgactgcaaactttgtcatcactccattccacagacttcataaaagtaaaagctttttgtttctttgtctgaacaaatggagccacaagcataggatgcctgcaagatgtccccacttcagtgggagaggtgcaaatacaacttccacgaagaaactcgctactgaagtctgcagaagccaccgcaacacaccgcaaacctccattccgcgatcgctgaatgacagagacatttctgaaatgtctcaaacctgctgttcatctgtggcctggtggccgtgtcaaaagcctgcggagctcctaaagaaggcactaatcctctccggaggtcttgctaaaagctgtgggaaacgaagggagccaggcacgtacgctttcctgcaatctaaaacttccgagattgcatttaccaaaacccctttccacaaagaggtaagggtgacttagctgctactgtggatatcaagatcgaaattcaattaaaaacaaagcaaaggtacccgttccagtaacgtatgtttcactccagtaaaaagtaaaaagacacagcaaagaacaaggtccccggttcccgtattcttgaccttcaagaactgcaaaaaagtcaagacccagtgaaagacgaaaagtttgagtggctgctgggctcgcgggcggctcgcctgactccggagcagctggaggaacccgcctcgaggttagggtctcgccgcgcccccacgacggctgtgggcgcagagcccagaggatggagcctccccttcctgaaacccgctcgaagctcggaaagccccggcccctccgcgcgggctgcggcccccaggctccttccccgacgcgcccgagggcgcggaccagcccccggcacgcgaccccgcacacttccgggcccgacgccctggccgctcgcccacttaccggcatcatcttggacccgaaccgcatggaagcgggtggccagactgcggccccggccgagctgaggtgccccggagggtcgcggatgcgggggaggggagcggagagcgaggccgcccggacctgttgcgaggcggcggcggcggcagcggcggcgcgcgggtccgaagggccctccgcgcgggctggggcaccaacaagccccgggctcccccgccccggccgggccccctgacgcggctttgtctcttcgacgctcgtgacggtcggggctccctcctccgctccgaaaccaactaatcccgggtcgggccccagccgagcccgtgccggctccgccccccgcgccgaccccgcccgcggcgcgcccggcggcctgggggaggggcggccgcgggaacgggagctgcgcgcgcctgcgcgggcccggctgggtagacggggagcggcgggagccggccgccttttctttcttcgccccggactgaagtgcggtcggggccgcgcggcggagcggctggagcgcgcgcctcctagcggagccggggcaattggaaggccgcgcctcaggaaaacaggatggtagtgaatggcaccgagccgccccagggctgccgccgtcacctcctcggcggctccgagtcgtgcgaggcaggggaccctttgccttcagaacagggcgcccgacgttgggcgcgtggacagagtcctccggcggccgcgccgctgggccaggcggagagaggcggacggacttcaggggaggcccgggccacgccgcggaaactacccgactccctggaggcggccaggaccgaccctgtcccgacaaaatggagttccccgtgtggcttcagctcgcggcgcgttcccagagctcctcagtgatccggctttcggattgttcgcctttcatctcatttgccgttgtccaaattctaatttaaaactcatgtgttacttgctgtaaggttaacaaacgtacaccgcaaactggataaagggataacttttatgttgtgtatgttttaccacaataaaaataaattttgtaaaaatgtgtcaggcagcattctgaggagcttccctggggggtgctgggaacaccctgcaaacagcctccgatacggggagccggtggataccatccttttccagggagggaggccaaggcctagggaaatggcagggctgccttccaaagagtagcagagcgggttcaggcttttattccaccttccagagagacacatactgcgggaaccctaactccaggaagctttgttctagtaagttgtcagtgcaagttcactcagaatcacttttctctgcctttatacatgattctagaacctgaagtggggtaaatcccctgggtttatctagtatcaagaacagacaattctttcttagcccaccatatcccttaccagaatctccatcgaactccctattgcaccatcccagatactgtatctggaaatactaaattacggttaattcaactagaatttaacgttctcgcccgggcgcagtggctcacgcctgtaatcccagcactttgggaggccgaggcgggcagatcacctgaggtcaggagttcgagaccagcctggccacgtggtgaaacccttgtctctactaaaaatataaaaattagccgggcatggtggcgcatgcctgtaatgccagctactcgggaggctgaggcaggagaatctcttgaacctgggaagcggaggttgcaatgagcagagatcaccccactgcacttcagcctgggcaacgagagtgaaactccatctgaaaaaaaaaaaaagaatttaacgttctcaaaaaatctggtttatagtcttgttttcttaagagggttatactgagttaagcaaaataaattcatccctcattcagtaaatatttattaaatacctgccacttggtagatattcttctaagtcctagggatacatcaatgaacaaaaagttcaaaagacaagtgtagttattgtgaaaaaaatagaataaggtaagagaaggggataaggtgtacaggtgcaactttaaatatggtggtcaaggtaagcctcactgaaaaggcggtgtgtgagcacagtcttgaaggaaatgagggtgtgaactccacaaatatgaaggaagatttccaggcagagggaacagccaacgctaaggcctgatatgggagcctgcctggcaaattctgggaccatcaaggaggctaagatagctggagcagacgatgaggggagagtagtaggagatgagatggagtgatatgaagggccagacaaggagggccttg

SEQ ID NO: 2281 - DNA, 4001 bp, Homo sapiens
cctctgaggcaggaactactattacccgactctgcagatgggtaacctgaggctccaagtggttaagtgacttgctggagtaaatggggaagaggagatttgaaccccagcattctgacttccatactaccccattaaccactgtgccagaccagcttctccatgcgactggccttcgggatttggagacagctactgttcgctgtagctttcacgagaaggactgcaaggcagggctcacatcccgagccattctctggtggccgccgcgcatagacaagccccgctcaggtccgccttccgttcaccccaggctacctctgattgacaataggcagctgccacactgcagcctctgacaccaacttttatcttatttcatcttattttttgagacagagtcttgctctgttgcccaggctggagtgcagtggcatgatatcagctcgctgcaacctctccatcccaggttcaagcaattcttgtgcctcagcctcccgagtagctgggagtacaggtgcctgccaccatgcccagctaatttttgtatttcaagtagagactgggtttcaccatgatggccaggctggtctcgaactcctgacctcaggtgatccacccaccttggcctcccaaaggctgtgagggatgacaggcgtgagctaccgtgcccagccaactttttatcttattttaaaaactacatacgtaatgcatacattcatatatggcaacatttcaaacaccgtgtcctgttcttaatgaaatgctttttaatctttccccgaataaatccaaagaggggtggctcagcgctcagtaagtgccagaggccacgcgctttgtttactcctcccccagagctaaggctgaacaaataaacagcaatgacagcaacaaaaaacaaaacaacaaaaaccaaagcattgtgttaatgagcctgagccatttccaaatgtccagacagtgaataaacagatggcagcatctttggaagcaaatgacctctggtcagaagtttggggtgcattgcttttccctgcacccttgctggttgaagatcgtctatctgtcccctgtttatgtagcagacgtgtgcatactacatgggcttatctcctagcgtccaggccaaaatacaagctgagcaaaggtaatcatcgctccccaagtccaagccccgggaaaggcaggggctgcaggaggaggcggcccaggagctaagggggcgtgaggtgtctccctccaggccggcccgggccatttcttcacgggctttctctacctgggaccgctccggagacaggccaggagccctcgacagacaaactcagagccacagggagctgtccctcgggaaaccatcgaaaccgcttagtaaccaactccatgggtcaaggcccccgcccagatccttctccctgtccagaggggggcctggccctggctcctcagggaagctgaggcctcgggattggcacagccctgcaggtcggagggagcgcgcgggcggggaggagcttgctggcgatttccacctgcacccgcgccccgcaccccggcctcttcccggggttaccctcccaacggccctcggagcccggggtggagaggggacagcaggaggagggccctcccggaacccctgcggggctgtctttggcgccaaaggcggccggcgctgagggcaggacccgcgtctcctcgcaggctagactctggccgctccagcctctcgcgagcgccaagtcccaggggccgatccaactccgagggagcccctgtgtcgccttgtcccagctcgtccccgatcgctctcccctcacctcccagcttcggagctgcgagcccaggtgcctgcccagcgctgcgctccagcccccgcccgcggagccgaaccgccccccggccctgggcctcctacctgcagccgtcgcagccccgggcatcggcgtccgtcccggctggcctggcgcgggccccggtttcgctgcgtccccttcgcgggcgcgcgagcctccgggcgggtgcgcgggcggggaggcagggcgggctgcccggcccctaggcgggttatatgggcgcggggaggggaggcgccgcggggagtaggcggccgcgggcgttagcgcctttttagcccggcgcgcgggaaggcagcgcgggccaccgagtcgcggcggggccaaggtctcctcccggcgctccgcctctccagctggccgcgtccaagtcggggtcccgggcgcgctctgccccgcctccttcccgccgccttttggcgcgcgtcgctcctgcagagcccggcgaggccgcccacgcagggccgaagcaggtccggcgccagggcccctcccgcgggccagacccgaccgcgatcttcggcagagctggggacgccggtgccgactctgtgcccgacgcctgcgtttcccccggactccctgctgtcccccagacggcccatctttcctgacacccgggtctctcctggccgccgccactagcgctgggctcctcggcgcgcggggcgcttggaatccaaggggcaggggatgtggccggcggggaacaggggtgaggggcggggaacaggggtgaggggcgccgccccaggcccaggaggaggggaacggctgctttccgccaagcagggcttgccacccacttctcctgtggagccacggtcccgcccggcagaggatcccgcggagagcctctgggggctgctctcccaaccccagccggagtttgggccccacgtccttccaggggtcacccaggacgcgaacactcccgggcggcggccagcaccctgctccctcccccggccgccgcctgtgggctcgggctctggatcccgttcggtgtttggaaggagctcgcgggcgtcggtgcgcttggagttgttctctgcgcgcaccagacctgcgctaggtcaggccgaagctctctaccggccagcgacacccgccgccccgcccgcctgctcctcctaggccatcggggcttccagggccctcgaccacgtacaccaggccctggctaggggacccgacatgctgggcgagttccgagcggctctcagtggcggcgctgcttatggtctgatgcttatggggcccgtgatctggctccgaaccgatgtcctctgcccatggtgacccccacgtcttggaaagtcgcgtcagtgaagcccgtggcttcgcgagcgagccgggctggcgcagactgggttctctggccgcagcgggtccgcgcctgacggggagggtccggctgactcgcacatcttcatggctcacccactgtttgctgggcgcacggggtggggacccaaagacgaatcccatgcagaggtttgggtctagttttggcaacagaaaaggccggcaccgccggagtaggacgcgcgcgcaccaccatccattcggccggggaggttggggcgtccgcggggagcagacccgaggctgggcgcccggaggtacgagcaggaccctggccggctctcagctcccagaacccagggccaggcggggatgtcagggtctgcgcgatctggggggccctagaggcgccggcggggcctggcgcggactactagcggcctgcgggagccaggggtggagggggccgctgtctagggaagaggaccggggtccggagtgggggtgagaacgaggcacgcccctgagcctgcgaaacctgcggaccgagcgcccgcgcaggagctcgctccctctgggcccccaggtcccagacccgcacgattcttcgcccggtgccagcccagatgcgcgcgggtgatgaacgggcggtggccgcgatccacgcgctcgctctgcccagtcagcggcaaattcgttctctccttgatctcagtggcactggagcgtgaggcaagggccaggcggcaggtagaggggtcggactcagcaaaagcaaacaaaaccccaagcaaacgaaataaatacttatacattacatacacgatataa

SEQ ID NO: 2282 - DNA, 4001 bp, Homo sapiens
cgaggcttctggatccacctcgggttccaggcggtccagcagccgggagatagcccctcccagctcacacacctcctgggagagtctgggggtacaaggcagccccccaggagccccaggcctgctgtgcgtttctaatagcaacgtgttggtggatacatgtatcaatgcacaagtgggtgacagccagacaagggagagagggacaccccatgcctgatgtagccgttccacgctctgggctacagtcccagcactgggtttcagataaaaagatcacgcaggcgtgtggagaggccatggtgccgccagactcgagtgcatggacccagcatctgggcaggctgtggggctgggtcacccacaccctcacccaccctctgggccacacacacacactgcctctcttctcaaagccttgcctgggaacacacagctacaggcacagacatccatgtatccatcgcaacacacatacggacacacgtgagcacctacccacccaaatcacacaatcacacctgcagtaccaatctgctcacacgtacacacaccacaacacacaggcaaacacgtgtacatacacacacaccagcctgtacacacacccataacatacacacacacatctgcacatatcctcgcctgcgtattgcatgcacatccacgcttagacacacacatgcacgcacaccaatacccacccgccacatgcacattgatgtgcacgctcacacacatcgctgtcacacacaccctggtcacactgcctggggagcccacggctccaaaggcctccgtccccagatctttgggcctctacatcccagtgccagcagagcttcggggcacttggactctgcctatctgcccgctgccccctgcccatggctgagtttcccgtgtggcacaggtacccatggtcccagctgtctgcttccctgggaggaggaacggccccacgtggagcagctgtgccgagccttccaccttctcaattagcagctggtgcctgcctggcccccagggacctggcaagtctggaagtgaggccaggtccccagggctcaggctgcaggggccaaccacaagctgcagacccttccctcccctcttccaagccagcagcccactgcagggggcgggtggcgcaagaggcctcaagcccagtttgccacaggtcctggccctggagctcagacccacaccgagaagagcccgtggggctgacaagaagcaccgtctgccactgctgtcaaatgagcaaattccctgatgagggcgggggcagcttcacacccaagcccaggagcaaagatgacttctagggtgcactgagctcctggcagctggggcagggcagggcagctcggaaactctgagcctggaccaagccgccagccccaaagccaaggagcatcagagacccccgagcacgaggcagaaacaccagcagccccatcggcatggacccggcctcctctccctggctgcgggtccctgcccagcaggtgggcacaggctgttggagcccgaatctgcttgcctccatgcctgggacctgcctctagcccctcaacgcctcccttcctacctctgctcaccccaactggcagcagactccaggccaggaaggcaggcagaaggatgcccctctgaaccctacactgcagcaaaatcccccgcaaagtccccgaagagatcctatgaatggcgcgtcacacctaccgtggcgaggtgccgtgcggggtcaccgacgtacagcatggtaggcgccggggggtctgcacacgccagggaactggtgtcccgtgggacgaggcatggatctgggcggcccgaggggaagggtcacggtcgtggccgcccggcagcgtggaccgagcgggagaggctccgcagctagtgaggcaggagccgaggatgctggggaacatgcgggccgtttgttggcattttcgcttttcccatctcccttagttctgtcaactggctgaatccaacaacaaaacccgcggcccacccctttattcctcatgagtattcatccaagtccggggcaggcctcagcttgcccggtgatgtgttggaccgcaccaaggaggctgcgtggggagggcggggacgccggtcagcgccggctccataattaaacccaccagggctccttccgagatgctgcctgcctggggaaggctcggggggccccaggccctcaccccgtaaagcagcctctgttcccaggcatgagggctgagccccggccctggagatcatggtaggcaaggctgggccaccccaagggggagagatggtgtcgcctcccttggcacccaggtggggcgcacctgccccctgcgcggggaactcggtggtccgccaggaccagtccaagggctgcatggagaggaggggctcacaggaggttcgaccctagacccccgagggagacaggtgacgggagtgagcagctcttgtggggcctgccttccactgcctgcccaaagcaggggtgagtccaagagcccagagccgtgcgtttggagcccaccctggcactggccaagcccccaggaaacagggacaagccactgttgccaaagaacagcccggcagtggggccccctgcaggcgtggacggccttggcacagccagggaggggctctgcagtggtgccccgcacccgtctagtggggcctttgaggtgactgccactccctgttgggccgtctgaatttccattgtatttcagccgtcttgggtacaaagttgaccctggcagaggggcccgagtccccctggaagcaggcagggcatctatgctcagacaaacctggggactggggcctgcggacccacacttccagtccccagggcgccgtggctctcacgagggctgagaaatccatggggagctgagaaatccatgcggagaccctttcccctttccttccaaccttttcctgccaaatcccaaaccacctgcctgctttctcttgtctccatctccccagcttccttcctccctgtcgtccccaccgagagccggcaggggcctcatcgctccccacccccacccccgggagagcgggcagagctgggtgagggcaggggaggtttggactgcagctgcctgaggagccctggggacccgccctgccccaccagcaggccgggctgaggacgaaaggacgattccaggtgttgtgccccaaggggctggggcctggagagcccagctcagggccctagggccgggaggcagcaggtgagtcctggacgcccgtctcttcctgtggcagaggatctcagcccccaacaggaagggcagcagcactcaggaggagacgactgagaaaaagacagttttgtctggtagatcaggttcaggaagggcgtctctgggaagccccctgcagggggtcggctggggcccagactggatgttctggggaaagcagcagcctccttgcaggagagcccagggcgagcactaggagactcctgctgggatcggggatgccctggggatgagggtgccttctgcttctgagcctgggacccctcttgggttgggggcgggctccccagggatggacagaccctcagagcagggccgaggcggggcctgggttccgctcccgacccccacagggcacatcctcagcctctgtaggcggtgtcctctcctgccaaagggaatgatgcattgaaaaggagactcaggcgagtcccatgcacagggccggcctgatggttttataaatagccaaaaggagagcgccaagtggaaggacgtgaggaaggaagacagccaggctgccttcagcacgagccccacccatgcccagggcaccgtgcctgagaccccgcatctctccacccttagcatctgggccaggctgcggggatcccagtgcggctgagctacacgtttccaactcaaaagcacccaaaaccactggcctctgccccagagcggcacccagctttctgcaaa

SEQ ID NO: 2283 - DNA, 4001 bp, Homo sapiens
ttcccgagggaccccatccttgggagctgaggccaggacagctcccaaggatggggccgcttcctggggccctgggcttggcggagatcaggagactggggcccgagcccacggtctggccatgcagtcccccttctcttggaaacagagattcctctgatcctaatcacttaggatccgagtcagagagggaggcacgtgaaaaagcgtagtagggatgtcagctgaaatcctgacgccccgctggcccctccccagctccacctccgcctccctcgctcctgtcacctctccagctcctgcccccgcccgagcatccctgctccccgcccggcatttatcccgcactctcattcattctgttcaactaggacaggaaccgggagctccagacggggcagagacatgctcttcttcatccaccactggcagccatggcatggtgcatggtgtgcccgtgacagacgtttccagaaggcagcatgtttgagggctggagtctggcatcggggcctgcctggagtctcctgagggctcagctggcctccctctggcctcctggccttctccctccagcctggacaggggctctgagctgtgaccccagctcttgtagaacaaggaggtccgtgtcctcgttccctggagaatattgagaccagactgttgtggttttttgagagtatgccgctcctcaaactccctgatctctcgtgggcatgtctgaacttgggccccaacctcacccaggggtgagtgactgacaagcagcctgggcttcggaggaagagagcccatcccaccagggcaagacctccgtcctgccggtacttcccacagcatctcccggagcccgtgattaaacgaatggaaatgccaacaagattcgacatgcggctggggggaagcctccctctcccgacaatgtgcacacagcaccctctgctctcatccacagcaccctctgctctcacccacagcaccctgtgctctcacccacagcaccctctgctctcacccggggctgaggcgaggccttgcccaatcccgtgccagggccatgtggaactttccacacctcacaccggagaaacgcgcccccaggagcagtccccagacgtgtgtctgcaggactgcgaggcccagggccaccgctgctatcctgcctgcacctgcccgcagcggctgagcccgtctgcagcacccactctgtgcttagcgccacatgggggccttgcagatgcatgtccctccacacgcccaggtgacttcagatgactccagggtagcctggtgccccccgggcctccacggacccacatttgagccgcccactgtggcctggtgcaagggcctcgccccaccctctcctcaaccctcactgccttccacctgctaaccgccccggagtccactcacggtgccgccgcctcctcccccagacccttctccacgtccctcagcttctgccccctgcctcccggatcccgctcaaagcccacctcccctgagaggcctcctccagagggctggcccaccagcccctcccttccaggttgtggcgaggggcagcctggaccctgagtgtctgcgggaggccccagtggggtatccaggctgtatccccatcaggccctgtgctgctgcctatgagaggcaggtggccaacaggatgcacagactttatttaaccacctggaaacgggctggtccaggccctcccacccagaatgccgagtgcccgggaagacgagggggaaggcacagctcacacacgcttctctcccctctccgaaccctgctgccagcaccccagagcccaacccaggtgtcagccctgacatcctgtgtccttgcacacatgcccctgcccatctgtctgcccatccatccacctgtcctgcagatgtgaatcaggcgccacctgtaacagcctcctgctgtgctggagacactgacagatgcttagcagggcttcctggacaccttccagcacacattagtggctgagccgagaatgggtggctgagccgagaacttgaattatgacacgtgcagtgcagggtacagggagggggaggcagtcacggggcgtgccacctccgatggccctcggtgataagcggacattggagcaggagcccaaaggtggagaaggcggtccaggacggctgtggggggccatcgaggcagagggcagaggccccagagccagagagacagcagcatgcttgctcaggaatcacccagccccgctctgcctgtcccctccccagttagtgggctcaggagtgacggatggtcccgcccagtgcactggccttggtcagctcctgcaaaggcaggtctcctcttcacacccatttcctaggcttgacatcctagcaccctcccaggtgcaggaagatggcagccggcacgagacacgaccccggccctccatgctgacgacagtaaacaaaccagccagcaagcgtgcaggggcttgggatcaaaagtggtctcagaaacacagagccaggcacaggggccagggctggcgtccaggcaaggacgggctcgggaaaaggtgaaggcgggcctgcaggaagggaaagatctgccccaggtattgggtgggcctgggggtgtttccaggctggggaccagcagggcagagagcctgcagccagaggaagggccgagggcctgtgcagggagagacggagcccagggggatagcgggagaggtggtcggagctgagcagagacgcccggggctgcaaagcgctccctctggctccggtgttgagaacacagggcgggcgtcagcaaaggcagcaattgtgagatgtatctgagcagtgggtgcgaggtgggccgcgggtgcgacgtgggccgcgggtgcgaggtgggccccgcaggggccccaggcacatttgcaggcaggattcacaggacctcaggcatggagagtgcctccagggctctggcctgagcaaaggcgagagtggatttcctgctggctgagacacggcaccatcccctctcaggggaagataagtttagtttgggtttagcaagttgaggtcctattaggctggtgactggggggaggtccaatgggggacagaacaaaggagacagaaatagcagctggccgagggtggcaggggggccggaggcgggcgtgcactaggcacagcaggcgggtgagtggggtggctcctctgatccctggatctccagttaggacaactggtccctcccctggccccacatggcttgagccccaccgctgctcggggtctttcatgacacaaggcctggagaggatgctgagggctcccttggccatgctcagcaatcccatgagccattcccagttgggccctgccctctccaaaccgtgggaactcagcagcctctgggttgccaagccccagtcccttttctgttctcccagccagcctctcgtgcctcctggcctcccaggctgcccctctgcatctccccctctgcttggtgtctcggatgtcgtagtgcccagtgctcagctccagccgctgtctctccctgcctccgtgcagatcccccagagccctgactgtaagtgcccatgtgcaggactccctagaggtcgtctccacagcctgcctgcccacaccagcaactgagtgtccacatggccgctcctgccagtgtggccccaactccttacccacctcacatccagaccctgccggcctttcctgccttggggagcagcagagcctcctgcaagggtgcaaatggaacctcagcatctttctggaatcctcccctgctcttcctctaaggtcaccttcaaactccaccctaagcctgaccaccacccaccacctcctctgatgcacacaggactgagccaccaggtggtcacacttttcaggccccaggaccactggaaacccctccctcatggggctttgggaactgctcgctcgtcgtcctcctccctgcatgcggctccttctcagcta

SEQ ID NO: 2284 - DNA, 4001 bp, Homo sapiens
aaaataagtgagtattccaacaatctttaagtatttaaactggagggcagctgtcccccaattaccatccttttctgaaatccacccctccccctcccaaaaacattctcagttatttcccagaggagcagccaaaaagaaaaacaaaaacaaaaacttaccaagggaaagaacaaagaacaaagaataaaccacatgagtactttcactggatcttgaattttagcaacagttactttactctctcaagatcctccaaaacaaagcctcaactcgtatcagctccatctattagactgcaccctagaccttggaaaatcttatggcttacactaaaactaatcagccacttttaaacagaaagacgtttaaagaaatcactagaataggctgggcacggtggatcacacctgtaatcccagcactttgggaggcagaggtgggtggatcacctgaggtcaggagttcgagaccagcctggccaacatggcgaaaccccgtctctaccaaaaatacaaaaaattagccagacttggtggcgggcacctgtaatcccagctactcaggaggctgaggcaggagaatcacttgaacccgggaggcggaggttgcaatgagccgagatcatgccattgcactccagcctgagcgacagagtgagactctgtctcaaaaaaaagaaaggaagaaagaaatcactagaatcactgttcactccaccaacattttatgtttccactttcagttgaacaaatattccactagagtcacctggaattcattattgtctccaccaaattgcccaagtcaatcagaaaccttgagactggcacaccatctgattctctgccatacactcgcttatcagctctgctcggaagaaatgttcttaaccagttcggcttgcactgatcacacttcagcaataaaggcctgaatctgacagaagttcctgccttccaggtcattgtgggtagggccaggcaagtttggttggctcctacatttgcactaacgttgagagaagtactatcccctcccctgccgtttcacgtagattcagagagtgggtgtagcagctgcaagagcaccccgtaagaggaaagggcccctggccagaggatgagaggcggtcctgtggcctcgagctcctccagggagggagggcaccgcgcttcctctcagccaactgctgcctcatttcctgagcaggaggagggagcggaaaagctgccagcaggcaggccggggtctttccgacggttcccaccccaaaaccctcaccatttcacagaaggttcagtactgcccctccccgaacagagaagcacccacccactcttaccccttgggcaggaaacctcaagccagagcaaagttctcccaccctccatggggaagtgggggagggagaagccgctgagcccctcccacggccgcgcccggatcggaggcactgaatgaatgaggtggagaaaaaaagaggaggaaagccacaccccaaaccccgtaaggctcaatttcttcaaaggtcaagcctgctcgcccgagcactgtttccccctcgtccgcttggtgtcctactggtgctgagccccacccatcctccgagatcccaacttcatctccgagcccgccggccttcagaggaccgtgctccacggcaaaagggaccttattccgcttgccggatactccagcgcctgcccctccctcatgagcctcaccatctccgtacctgttcccgggcccgcctttctccctcaacttctcgctggaggcgctcagctcgctcctctgcatcatctgcctgctgctgcagaacctggatcttgcgcttcaccgcctcgatggtggtgatcccagccatggtgcccacccagctactgctcgcgctccggttcctgcctcctccgctcggcgttgcagcctcctctcacccttacttccgcctgctacgccctgaaataccggaactcaccaacccgcccggatgtgacgtccctctgccgcgccctcccaccgccaggcaggcgggaaggcagtccactggagggagagccgcggcagggagtggatcctcccagtcgccctggagtacggctcccggccttaccttgggccagtaaactgggacggggttgggacgagggagtgttaccatggtaactgggcggcgcttcgtgccctagcctctcccgccaggctggctgcccacaatggttggcccctttgcaggtagtcggctgaccttacactcccgcaattgacccctcactcccgcaatgccgatacccgtcacccctcactgtatttgctccacaatataaacatcctacaagtctctgcttccactcaccccacgacaaactccaaaaccaagttataagaaaagtctaaaagactttctgggcctcaggttcaaaagagccccactcagtctcctttcaaagtcggctcaggtaggtaggttctctctcccgtctcctggaagtcaatgaatggaactgtcggagtggaagggatgggcaagatggcacaaattctcattctatttggcatggtatgaacttaagtgttctatttagaacagacttttctccttttttttttttttttttttttttttaagagacaagatctcgctctgttgctggagtgcggcagtggcgagatcacaactcactacagcttcgaactcctgggctcaagcgagcctcctacctcagcctccggtgtagctgggactacaggtgcacgccaccccgtcaggctccctgttattttatttatttttgttttgttttttattttttgggacggagtctcctctgtcgcccaggttggagtgcagtggtgcgaactcggctcactgtaagctccgcctcccgggttcaagcgattctcctgcctcagcctcccgagtagcgccctccaccacgcccggctaattttttttttgtagttttagtagagacggggtttcaccgtgttagccaggatggtctcgatctcctgacctcgtgatctgccggcctcggcctcccaaagtgctgggattacaggtccctgttacttttgagagtcatcatgcaccaaattaaccaaccttccagcccctccaaaccttggaatgattcaggacttggcaatttaatcatcagctgggcgtggtagctcatgtctgtaagtctaggattttgggaggctgaggtgggaggatggcttgagcccaggagttcaaaaccagcctgggcaatatagcaagacctcatctctaaaaataaataaataatttaataatcacttacaattccttttgtaggtaagaaagatatgcccccattttatcaggaagaaatcctctattacagaccactgtcagccgggcggggtgactcatgcctgtgatcccaacatttgggaggccaacgcgagaagatcacttcagcccagagtttgagaccagcctgggcagtatagtgagacctcgtctctacaaacaattaaaaaattagccaggcttggtggcagcacgtctgtagtcccagctacttgggaggctgaggtgggaagatttcttgagccgggaaggcagaggttgcagtgagccaagattgtatcactgcctccagtctgggtgacagattgagagcctgtctcaaaaaaataaaaaacagacgactgttactagatccttcatgcaacagccagacatgagtgcctgtaaactgtactatagaattgagcctccattctgttacaacttttaccaatttcaatgccactgtacttccaagtacccccaaggaactgtttatgagttagaaacttccctttggccagatgtggtggctcatgcctgtaatcccagcactttgggaggccacggcgggcagatcacctgaggtcaggagtttgagaccagcctggccaacatggcaaaaccccgtctctactaaaaatgcaaaaattagccgggtgtggtggtgcacacctgt

SEQ ID NO: 2285 - DNA, 4001 bp, Homo sapiens
gttcaaggaggccacctcagcctcagcctgcatttgaaggaaagaatggacaagggaagcagaggcatggagaaaagaagaaataactatgacattaagatcagggttgactaccatgaaaaagccagagtctcgcagggtagaacttgtcttagctcagctgttaaaagatctagcagacataactttatatatatatatttcctccctttcccatcaacgaactcccatatgttccacaggaagagtgttttaaaactcagttccttgcccagcccagtgagttagtaccacccacttcctggactcagttcaaattcctcaacacactggagtcagaaaagaaagtcaatgaagggttccttctgcctgagctctggcttggaggcatgtctcatcctcagtaacctttcaagtgtctcataaagcaggaaaaaaaaaaaaaaaaaagcaaggtttcttaaagagggtatcctgactgggtgtggtggctcatgcctgtaatcccagtattctgggaggctggggcgggtggatcatgaggtcaggaatttgagaccagcctggccaatatggtgaaaccctgactctaataaaaaatacaaaaattagccaggtgtggtggcgcgtacctctagtcccagctactcgggaggctgaggcagaagaatcccttgaacccgggaggcagaggttgtactgagctgagattgcgccactacactccagcctgggcaacacggtgaaactccatttcaaaaaaaaaaaaaaaaaaagagggaatcctggattacctattaattgctgcttaactcaaaccgttattcctatgatcactttaccctaacacatcagaagaataactagccaagggaatgtcttccagaatagccttccagactggaaagcaaaagaatggaatattgttgggatgcctactcaccagcccttcaacttgtgcccccgtactccttttttaagttggctacaaggagctgcttctggctaaaattatctgctttgatagctttacaaaaaagaaagaacatttccaccacacccactaccattcctccaaatttctgaattttctcctttctattcctccagccatccccttagcttcaccctctaatacagcgacaatcttccccctggcctccatctcacaatgaagtatataggttagagtccaagtaaacccatcctggatgggttttctctaagaaacaaggaaagaaggaggcagcctgcaggtggatggataaattctaatggtaggaaaacctctttccatgactgcctccccgctacctttactggtgggaggtaccctgactgcaacagtatacaagaatttaatatgccccgcacaccacccagttcagatgcttatccaagtgcctggtaaacacgatctctcttctatagcccagattgtgcctgaattctattaccctgatttcttcctggcaggcaggagttggtgcagctatagaaacagcctgggccactagctccgatgaggaagaatatagaccaaaagactcctttttaaccatcaggactggcacaaaaacttccacatacaaacatgagaagctgaagagactaggaagggaagcagagggctggggctacaatctagccaccaggcaaagaaaatcgagaagtcaacataagctgaaatcattaagaaaccatttgtgcctctaactacactactcaaaacaccacaaagacaagtattctctgcttctgcctcttccagaaaaatagatgttctctgtaacaacacacatttctcctcacaaacccaacaaggccatggatcaagagcaagtcaggctatcaggcaagacctaggagacactgctagtaaaatgacttacccccctcagacgaaaaatacaactagatttagaggaagctcatgaaatgtaagacatcatgcagctcaccagtagttacccaaactggagtagaagataacaggctatggggcgggggtgtacagttgccatgacagcaagctggctcaggcagtttctcccacaaatcagcatttacaatagaattcttagcaaggctgaaaagggagagggggaaaacacatcttggtgccctcctaagagcatgcacacatgaacaagcctgtatcaaaagcagaacctgagatgggagtcctagaaaaagcttcagagaccccctccagggtggagtggtagggaatgggaccttgcctttctcttttctcctagcacagaggatcagttctctttacaatgaaacaaaagcctgcagaatcaagatctgatactttgtttaaaggaacaaggaagacaagctgacttttccctcatgagtctatgcacagtgcctgtccctttcaggtcaaataataccaatgggtaccaagagattgaacaggcctactttttgcagaccaggctacctgtggccctgggaaacgttaagctctgcactttcctaatcatcttaggttttagcatgcccatccagatgcggttttggtgtttcagctgacctatctctgcccagtgtggaggatatacagtactctgtggttcttcccttcaagtaataataggattctccactgcccaggaagcaaagatcctgggtgagggattggggaaagagtagaatgccccagcaactcagtcacattaccagatggctgacaacaccttcggctatcctccactccaaagagatttcccaaatatgtcaacccctccaggcaagaaactgacagtgtgatggtactctcaggcagaacagggccaaggacagaaggggattagcctaaatctggctttctgccacactggggtttctcttattagataaaagccacagataaaattcaaatgaaagagtatcagaaagttaggcttgagccctgtgagtaaaggactatttgagttcactgtgctcacaaatgcattacccagggagataccgtgtccttggggaatttaaacttcaccaaaggggaggcaagttggaagggagtagagctatctgccccacagtaaacaaaggcggagcctaagcaggggtaaagggctatctgcctctcccctgtgagtgtgtgttctagtactggggaaagagaaaggaaagcaaagcaaccaaagaaaggttgcttagtccaccaggcccacgaatagaagagaaccacacaacagtcaagcattctaacctctccagagactaggaatttaggattaaggccagaatcaaagcccactccctcggtagtactcttaaggtttttgttattacttttttttttctttttgaggcagaggtagtgtgctgaccttacactcccgcagttgacccctcactcccccagtgccgatactcgcccaggctggagtacagtggcatgatccaatcctggttcactgccacctccgcctccagggttgaagcaattcttgtgcctcagcctcccaagtagctgggattacaggcatgcgccaccatgcccagctaattttttgtatttttagtagagatggggtttcatcagatccacaggtggacctcagatccacccgcctaggcctcccaaagggctgggattacaggtgtgagccaccgcacccagcctcttaagttttttagactagaaaaaaattaaaaagagaaaaatatcagggacaattaggagagagttattaaaaacagataaggtgaactgtacatttataaatggttaaaatggtaaattttacatgtatttttatcaccactaccacaaaaaaaaagagataaggaaaaagactgcatttaaacattatgttgccatctgtttccatttagacagaagtaaaaaggaaatacagaactgaaagtaaatttgacaaggtgctacattataaaagaccaatttccaggccgagagcagaaaagaaagatggatcctagaacaccagtgtctcagttttagactcatctagcttccc

SEQ ID NO: 2286 - DNA, 4001 bp, Homo sapiens
ttcaccatgttggccaggctggtctcaaactcttgacctcaggtgatccacccgcctcggccttccaaagtgctgggattacaggcgtgagccaccgcacccagcccaaatatgattttaaatattacatgctccttttttcctattaactcagttcactgagaaacttgtttccaccaatactgggacatttctgttgttgttggtaagattcctatggtacttttcttctaaaaaacttttcaatctactctctcatttatctttgcagcaaacttcaaggttaaagatgaaggaaagtaggtgatgatgatgggataatatgagatggaaaagagaatttattttatttgagaatgggaaaattcagccctagacaagctgagtaattactcacggtcatagagtgaagtctggtggtgatacctttaccccctaagattctttcttagtttctattatactctgtcactgtagggatctctctgctgccctaggagcaatgcttcatatggcatctccatggcataaaggcaaatgcctgcattggccaagataaataaacccatatatggccagggtcagtgtgacctccatttcccattgtgaaatccgagctggttttgttggacagttgagagatgagaggttccctattaatacacatatccacatgccaagacttggacataaaagctaagaatgtggcatgggggaggaggtaggataagtgacagcattctgaacttagagtcccctctctttgtccaggtcctgggaaagataattaaattcctgggttggtgataggagataaatgagacctttacatgtattaaaaaaaaacttttaacatgttggagatgtctttaagaaagaaaatacatgccattatgagaatataccagcatgtggttatatgcaaaaatgtatgtgagtatatatgtctgtgttccatgaacccacaagtgtgtttggaatttcgtcatacattaacataaagatctatatgtgtagattaaacccatcctccatctctctaatactcacatcagcagccttcttctctgccagttccagcttctcctgggcatccttcaaagcttcagaatacttgtccagctcatcctctgtccctttcagcttcttctgcatggctgccagctcatcctccagctataggagcccagagagtcacacacaaaaacacacaaacacaacaatgcagggttggaccctgggctcttggagccctgagtgtaacctccatgttaccatccctagtgagacacactttctccccagccacttccagcccactgcctcaggagttatgccgtagcttggcctgtgaccctgtaatctctgatcctaagatgaccaagccatcctgggttttcatccaagacccctggatgataaatatctaaagtgtagatgcccgtgatgctatttgagtgaaaagagatgctctttccctctagaactcttaccttttcctctagaagtcaagggttcttccaaaacatggtccatttctacttaaattcagcagacatactgtggctcactgactttcccaaggtcacaaaggcagtctgagacagatatgttagatatcctctgctcctccagtgaggctggggagtccatcccacccccaaaaaggaggtgacaccagtagtcactgtctttcccatgaaaactcccttccatttcacagtcttgttcactagcagatgagagagatcaatgccagtgcctacctgtttacttctttcttctgcctgcttctgctcagcttcagcttgctctgcccgatccagagcattctccttgtctaacttcagcatctgcatctttttcttgatggcctccatcatgagcagtggctgttggtaggctcacctgtgaacactggagaactggagactggggcaagaaagaaggggctgctgcctgagtgaccaggaggtccccagacttgagtctttatctgtgctcatagctccaccttttgttcctaatatggtctttccagctccctccaccccatcattgttctcctgggggaacacagggtgagacgctttgatgaactgacatcaccagcaaaaaaaatatctagcaacagctgaggctgattttagacaatggaaagtgggggagggaagaggttctccctgaccctgaaactttccactcattctgggcagctctatggatgttttaaaagaagaggaagaggggagggaagaacattgaaatagagaagtgtactttggcaattctaggttggcagtttgcatccagggggtcctggttgcctttcagcttcccgtttcactctcccccagactgtgttgaatgctggtcaaactccgttagttgagttttagcttttgattcctggtattcaaggagcttgggcacagggaagaggggaggtcactcatgatccttaacaattctcccagatccccagatcaaattgctgtgctattctgggagtctccgattggcagggagacgtttttcctccccaccaagagccacaagagtagagtaagaggtagggttggaatctccaaccctatccttgaaggctatcccagagcttcaagtggggtggggagagaaacaggggagggtcagaacaatccagacaggatcataccctttgttttcccacagtaatcttaaaatagaactgttgtacccacacagactttggtctgtgtggctctctcctcttcttccctttatcttctcccttcttaattctccccaacgctgccactcaccacatcatcgtaatcatcattatcagctctattctttccagtttagttccagaccatgtttattcttccattgggagccttgttactaacaggtggcaaggataccagtccactggcaccatacacctgaaaatatgccaagggagaggtgggcactgttcaaggtgaccagatatattggacaaatataaatggctctagttagtcatttatgtcaggatactgagagttaatgctaagccccagcaatgggggaacggagacacccaccaggccagtgggtagagcagagctggagtccactattgagagcttccagtcactagaggtagataggcagatagaccatcagctgactctcgacagagagaggagaaaccaagtctcctttctctggagattagccagggaaaggggttagggaacagggagaggaaggagtggaaaatggggggggggtgggcaagtgaataagggggagaaaaatacgaggacaagaaaaggcaaagaaatgtcccttctagtataaggggacaagaaatagaaagattctatcctcaaattccaactctctcccattcccacaccagccctcttaggttaagattgaaatgcacataggttgcagctactggacttttgggggggtcctggagagaagaggttcagtaaaagagacaggagccccagagattgaagtatgaaagagggtggtgctgaatcacctgctgctgtaagaatatgtttgacatttagttggttcctaattaaacaacccaatatcaaacatatcacacagaagcaggcaggagagctttgggggtcatctgccttccttccagttgcaaagaaagaatagagcagacaccaggcaccaatcatgtctaggtggagagccatctccttgaggaagggtactggctcctgctcttcacctcccaagacagccagctcttgcttattgtcctacgtgtcatccctgcctcagctcctcctctacaagctcctggcctttgctggatcacgttggcctaaaccaggaagaatacctggcagggctccacatccgggcaactatcgttccctagagctcccacacagagcttctcaccctgatgtcacggccccagcgcccagaggatcagccgtgtcagcagctcctcatcaaaattgccacctgctctcttcaatgccatt

SEQ ID NO: 2287 - DNA, 4001 bp, Homo sapiens
gagaatacttacaaagatgaattaaatacttactgagtttctctagctcaagccgcaagctttgacactctcgggtttcattcacaagtctctcctgactgtgggacaacctcttttctatttcaaaatactgttgttctacagcagacaagcaaaaaacaaaaaacaaaatcaaacacatgtacatacattgtgaatactgttatttatttctaataaccttgattttaaaacttaagatacagtattagaattgtgctccacataagagaatctgagtaaagataaatagactgagcactgaaaaggacttaaagcatttccaaacgacttacatgacaaaaaataaaaaataaaaataaggcctaaaaggggctttacaaatcaatgtcttcaaggcaggtaacctcatttatcttagtattttctccagacatcagtaaactgcttaataaataaagtatttattacacgagaaaaaattgtttagacaaaaaaaaactcctttgttttaaaagacttcttttatagtagtcaagatattacctgaaagcataaaactactaaatatatgtaaaagtaaatgtgtaaactttccaagggaagggattgaatatcatgttcagcatagtatcaggaacatgtaagacattcaatatttatggtgcaaattaataaatagaatgcaatgtactatactcagctctgggatcagagaactaattttcaaggtcaattctgcttgacagttacactttttttgaagtaaaaacttgttcagaatttccagtcaacttagcaagaacagtatgaacctccccaaacaaatggtaaaccaaaacacattaacgggaagtttgtattttactaatggtaatgactatattcttcatatttttttcaaggatgttcaagccattattgtcagtaactttcttacttaaaggcctactttaggtaattacaagaaaattttaatgttttctatcaaactccaactttttaagagaaatcaagatatattaaatttatgtactgcacattcactgtgtttccagcgctcttatgcacctaatattcatttttgtaaacatctgattcgttctggagccacgggacgacgcacacactaagaacaagtgcacagagtggtcaatttggcaaaggcctagaatgcaggtgcctagaaaatagggcggagccactatcagttgaagtgcaacaaaacatataaggtactctaggcttagagagatgggttcgcagactctatcaagtctgtttcccgtctgccggacgaaggaaaataagcgtccctgtatgagcctaccctaactacaaagaaaatgctactgaacttagattcagatttttttttcaaaggcttcttatcaaactgtaaggagcaggaaagcgaaggctcaggatatccacagagcccaggaagtgaggttaacagagcggtacccagtgccaacttgatgggggaagaccagacccaaagggcgggagtcgagcccaaaaccaaggacggaaagagcatctcacttaccgctctccaccttaaatttctcatgccgccccttcaggccatcgatctcggattgctgatcagcaaggaacttttcaagtttgttctggacagacttgggcagcttgttcagctccgtgcgctccaggacttgctgcaacaccgccgccatgtcggtggggccagggaccccagtggcagcggccgacggggtagaagcggagaagaaaggcgaagaccagcaggacccagacgcctgggccgccgcctctatcacctcgctcggtggctcgcgcgcgcccgcccgccggagactcccgcggcgggaccctgggaaatcgagtccaccctcagcggcagcgtttcagcaacagcacctcaccgcccgcgaccgaagtgcgcgcgcagccgttggaagctacgaaccctgggaacccgagctcagaggctatccctgatcctcttgcgcacccaattttccggcttccagctccacccacttcaggccttgtagggctctgggaaatgtagtgtttttctcattcttttccgggagcccaatgctgcaccgccctctcagcttccgtttttctccccgctcccctggctctcctatctcggccccgtaaccgctgtccgcacggtggcgccacatacgtactcgtcaccccttggccctccctgaagagctggtgaccttaccgtcaaagccccgggatgccatggatcgtcctcgttggcggcttctggacactgagccactagagggcatcggtcccggtagggccggacggcaggctccgggataccgccacgctctctatggcgcccagaagggggcggggtggcgaccgcagtcgctttggctgaggctctgcggggaagggagggggggcttttacgtcatcaatctgcgccacctgactcccaagtccctggctttggagtgggaagtgaggtgtgggaagtaggtcgctttctgatgaattcagtggcagtgaattgagaccggagggaatctggcccctagaggctggtacttgggcccgaaacccccatctccggcggagagaccgtccgaggtaattgtctgccacgagtgcacattctgaaaacaggtaagtcagcctaagtgtagtgtgtgtgtgtgtgtgtgtgtgtgtgtgctctcttttcaagagaaaaaggaagggacagtgttggaaccatatggacagtcactccggcacacacttctgacgaacttaccttgtgtgaaacggcgtacctaaatggtttttggtggtggggaggtggcactgagtgattcagtacccgggaatttaaggacccgggttaattcttcaggaggagaattaaaagaaaccggtagcactttgagtgtagcctatgttttaaatttttcgttgcagaaacggttacctaacattatattgtttttaaaattgaaaactgttgtaactgaagtttttaaacacattgttaatttctacagtaacagaacttgtatggttccagatcataattctgtagttttaaagctcaatccgtagattgtttcgtgtttactcttatgaaagaatttgttaaattattcattgtaaataatgcattcccagtgtcgtctctctgcagttcccacagtcgtgggccttctgtgaattggtgatttagttcttatatgaaatttattctttttctctagttcttacttttgaatcatgttgtgaagccgtctaagaaatataaatggaagcattttatgatattttgtaataactaaggaaaaataaatcaacagcggagcttaaggttgatttttccccaaaaatattttttagataagcattgtaattaaagttgctggtatatgaagtattatgctatgtcctaagcccacagtattatcatactgttgatctgtcatttgggaaatgtagatttttctgtacttagattcacagaatcctaaaattagataggttttcagatctgctaggattcaaatgctttattttatagattaggaaaccagagcccagaaaggttgagttgtgtcagtcacagtgcttggaccacaaaggctttggctgatatacaacatttctggaaaattatgaccctataaggcaaaatacagttgtcccttggtatccgtggggcattggttccaggaccctctcacctgcccaccccatggatatgaaatccatggatgctccagttccttatattaaatggtgtagcatttgcatatcttaaatcatctctaagttacttataatacctaatacaatgtaaatgctatagttgttatattatattgtttagggaatagtgacaagaaaaaacatctttaatgatacagatgtaatcatgctttaaaaaaataatttttcaatctgtggttggttgaatacatggaagtggaaaccacagatgtggaaagctgactatatacatttttagt

SEQ ID NO: 2288 - DNA, 4001 bp, Homo sapiens
aacaattgctttaaatactgtgggtataaatatgacaaattaggtatattttggttattaaatgtattattttggtaatctttacatgattaaaaattaataaacaggaatactggctgggcacggtggctgacatctataatcccagcgctttgggaggccaaaatgggcggatctcttgagcccaggagtttgagaacagcctgggcaacctagcaaaaccccatctctacaaaaaatacaaaaattagctgggtgtggtggcgggcacctgtagtcctagctacttgggaggctgaggtgagaggatcacttaagcctaggaggtggaggatgcagtgaaccaagactgcaccactggtgcctgggtgacagagtgggactccgtctcaaaaaaaaaaaaaaaagggaataattatagataggctagccaaatgagtgaaaaggaagtgtaatcttccttttccttatgtcatattaaatgttttaaccaaaaggtaaaatttttattttagcttcctgaatcccccatccaaatctctccatcaaaaacccaagttctacagcttaactgactgtagtaatgtttaggttcctcacgtcagaaaattatcctacagcaaaaagatcaactcctgaaagctggtcattaaatatttccaaatttgtcttttagtggtatctataaattacaacgggaccctccatttctctttaaaaaattagccagagcaagacttgatgtgtcatatgcaatctgtccctggctggagaaaaatgcagagtttggacttttcctgaagaacatccaagttcctttttaacacgctgggctctacttcaatgcatcctgaactcatgtaagtctttttactaccagcctaatagctgccttctgtgccagaattccttttaatgcactcaattgcccagaagtcgcttctttttaaggaacttcccattgatatttggagctggagcctttgtgcttataattaatgacagagaagacacaccgcttggggggctgatttaaaagggctgaattgtaaggtccactctggtgcttaggtccagtgatactggactctgaacaggcttacttgttgagcgatttagggggaaactggaattctccgtaggaaatggtgtctactgcgttgagcgctatccgcaccacctgctggcactggagactgatgaagtcgtatttacagataagcagggactgctccgtgaccagcaccagccgctccttctcattgttccagtgatccaccctgtaggcagaggaggggcctcagtccacactggacgcggctgtctcgacttagccaaggccagcccgcctggaagggcagcaggggcggcacggggcgcctgagcgtggcacgagcaccccgggaagtcctcgcaaggtgctgcgcggcggctcggggcgagtccccccaccaaggagagcgcagccccggcttactcggtaagcagccacactccctggatctcgccgtcctccacgggccgcaccaccacgcggatctcctccactgcctgctcgatgctgccgggctgggcgggttgcggggtgggggacgggggcaaagatcacaggtcacagctcgctccctgcgggaccgcccggcgcccgcctccgaccccacccgcccccatcccgccccgcgccctcggcccccgccccggccctggcccctgcctcacccggaacacgaagtactccttgacgcgggcgcggcgcgtggggtcgtggatgctgagaggccagagtgtctggcgcagcggcgtccccgcccccggccgccccccgcccgggccgccgcctgcccccacctcctcgccggccgccagcaccgccgtggggctcgtaccggccgagtccaccgagtcccgcagttgcagcattgccgcaccccttaccgaccccgaccctgacgccgacgcgaccgccgtcgccgcagccaccgccaccacccggccgcgcccccggccccgccccgcggaccgccgcgattggctccgccttgccggccccgcctctggctccgccccttcccgcgtccgccgaccctcgggattggctctcctcctgccgttttccgcgattggctctgccccgccgccgttcacaatcgctcccgcccctcgccgggccggaagcgaccgtcacgcgcaggctcacttcctgtttacacaacgagaaggggcggggccgaagccggttgccagggtgtcgcggagcggctgggaaggaggggctgggaatcttggagccccttggcccgcggggaaagcgggtgacccgccctgcaagtgggatgcccccttcggccttctggagcgcaggtgggggcgcgcgcccatcgggggctcgcactgcacggagggtcgcggtgccggggagctgaggttggaggatgcagggcggcggccctggtgcaccgtgggggagttcgcacgccgggcagcgatcttctgccgggacctggcgttcttcacacacggcttattcgtgacggatccacagagcaatgcactctgaagccggagggtagaaagtgctggaatgcgcgcccgggcccaggctgtcgcgagccttcagcaagccagtgcacacagagagggctgcccagagatcccggtcagcgctcgcagttcgaggtggaacatgtgtgtgccctgcgctagccccagctcccggaggtgcccccagcgcgtgtggaggggggcggtgaacggacccgcaatctggtggaggctgcgggaaggaggcgcagagtccaggggtcagggttaccttcgggcaggaggacagatccctctgctcggaggtgaggaagacacacgaggcgaggtgcacacaggcgaggagagtgagatggggggagaatgaggagttcaggatacatctgtttacttcagtcagggagtggggatggagcggagtatttgtaaagatggacggtttagaatcgccgggatgagaaccgggcagggagctgatcagggaagggcatggggatctctgagcagctgggagaccccagggaagtttgcagtggcgcctcccacgcggcagctgggggagtggaagaaaccaatgctggctggtctagatggaggagtttgctgggtagcggtggtcaaagaccagagagaaaagggaggccaaaatcctagagggagtgttgcccaagaatggtggagtgcagggattctgccccacttgccagcagacaggccaggctgccaaagttgcatgggcgctggcagaaagacccaatacccctggagtcagagaggaaagactacaacaggaaacgggcgacgctggtgtgcccagacgcatgttgcaccacagcgggtgcactacaaaacaggaccctggatcctgtggaccaatgtggtctttgtcccacagggaggctgtctccccggcaagggtgcccactgcaagcacaggcgtgagaaatggcccagaaaagagtggtcagggcaatgtgttcttggcacgcccagcaagacctgccagagggacctacagacgagtgtctcccagctatcttaccagcggggaccttgaggtccaagtatccagtccggttagaaatggccgcggatccaacaggtgctggtgagtgggagaatacccctgagggaggaagaacagaggccgggagggagctgagtggatgtagatgagaaatacctggacagctgcaagctgtagtcagtgatgggcaactggaaccagagattccagagagagggagggagaaagagggaggagaagggagaatgagaaagagagggagagagaatgggggggagaaagagggagaatgggggagagaggtaggagcaagttctggaccacgccaaggatggagctgtggtcctggaaccagatgtccagggaatgggatgaagtgacactggctggggccgaggctgcagactgctggtgggagctggcaggacaatga

SEQ ID NO: 2289 - DNA, 4001 bp, Homo sapiens
caatatatgtatattaagccctcagagcagtgccaggtacagaggaagtcagcaatgaagggaaactctcatgattagcgttccctgtgagtgccaaggactgccacaccacctgagaatattcatgcttggccaagtcaaaccttcaccggtggtgtttcatgcggagggtggggaaaggaggaccaagagtcctgctctggcaagaagggaggaagtcatataacttttaaatccaaccattagaagatataagccaagagcactttgaaagcagaacacctattaaaaatagcacacctatttaaacagctacttcacattcatcacggtgaatacacttttctttttggagggcaggtctggggtgtcagctactttgctcgaccagctgagaccatagatgagaaagtgctttaaaatcttgcaaggccaagtcaagtttcagaatctggtttgggaggaaaggattccattacaattagtcccaagaaatgtacatattctgggtactttccaggctcctcccctaaaaatgtatacctgatttccaaccccagttgtttgtcattttctatgacctaagctccgacttaggggagtgtgtgtgcgtgtgtgtgtgtgtgtgtgcgcgtgtgtgtgtatgtaggagctgaagagaggcatgcagacaggggtcctttctacagatccaagtcagggctaggcataaagggcaaagccattttccaaccagaaaaatccctggagtgcccactgaccacttgcaagctttagaccaactcataacacttttctgcctgattctggcacaaatgaaaagtatgtgttgggatgggtgggttgtgggagaacagtaccttactttactaacaaccccaaactgttaatcccagcatgttggcgatagactgagagcccagtcagccaacgagctccctgtttgtgcacaaggcaggctgctggaggtgcaccttgcccaaggtcagcgaattccgggctaacaggcagcacacctacagcagccagaccctatggtctcctggcctccaattcagggttactgtcaatgcattaatttacacttagagggaaagatactgaaggaaataaagaggttctttgttttggaaggaatattaggagaaccagtaattactcgaccccaagaaatattaggccagtatgtcctggcattgccttttcctctcctctgaaatcttccctcttttcacgaaatatggacgcttgggagagtaggtggtgggagcctgggccgcagagatggaggtgagaacgaggaacagggagaaagtttgtcttaggtcagagtgggagggcagggagagagagggaagcctgggagggggcagagtgtgtgaatgggagagcaaaagggttcgatggaagtcaagagaagggcaaggaacggtagaaaaacacagtcagaagcgggcagagagaccagaagggtaaagacagaaaaaatatgagaaaggagagacaaaaaggggcagagagagaggaggcgtccaagcaggaccacaagtcaagaggagagccccagagcggcagcgtgtggagaaggaaccggagagggagcgccccttctcgctcctggctgggagctggagccgggacaggcaggagcgaaggaagggcgcccgaggctgcgcccggggggtggaggtggagcgggcgggctaaggtgggtgcggaagcaggacccaaaccatggtcccacgggactagaatacccaggcaggcgggagagtggccgggcaggcgctcgctcaccgatccgggcggccggcactgtcctccgtccgggggctgcgggcgggcgcgagcggtggcgaggagggcggcgagcagcggccccgccagggcggcgtgcatcctgccagggcccgcggggcgcgggggaccctcctgggcggcgcccctcagcggggcggggagcccccagttgggcacggagtttcctctggagcacggggctccagccgcaggatgctgggcgccctctggggcgtggctgactgtccctgtcggacctgggggtttctctggggccgggctccgtctgttggaagagggagaccctctagggctgggcccctcccccgggcgctcaacctcgctggccgagcccccgggtgctgagggcgtgttggggtccgggggcgcgcggggtcccggagctgcgtcgcggtccaggggcgcgcggggttcctggggcagaaccgagaacccggggtgcgcaagggtcccggggttatgctgggcacccggggcacgcaagggtcccaggggtgcgcggcgctccaggaggcgcgcagtgggacaagtgcggcggaaggcgcggcaggggtggggggcggctctggggcgaccggctgcccccgagcccggctcagaggggcggcgggcggccgcgcggccgctgcccgggctccgccatgctgctccgcggccgggagggagggagagaggagggcgggagagcggcgcggagccgggccgggctgggggctggggccgctggggcgggggaggggaggacctggcgcggggggcgggggggcgaggggccggggccgcgccgggccgggccgggacgggccgggcggcagggagtcagggctagctccgcgcccgggcgcggcgaggcggggtctgatgggcatggcaggcgctcgctcgctcctctctcgctccctcgttcgctccctcacacgcgcggagggaggcgaagcccgcagcagccacttcccaactttccaaacttcccagcgcaactttttcctcccctcccctgcccgcgcctcctcctcccccatccctcctccttcccttcgccaggcgcgaccgggccgcagcttccccgtgcggccgccagagggcgcccgggctaaggacccgctcggccaacctccgccggctcggcggcggacgcggactggtggcagcgacagatttggggaccagcctcgcccaacgcatccgtcccgcagatcctggcaggagcgaacagcgagagggacaggagttggactggggaggcagcaatcacacaaaattcagaaagctgctgtgtgcaaccttatgtcacgcgtagctctgggatgcgcttggtagatgctctgcaaacaccaaatgtaaaagaaaagaaaagaaatcctcaaaattccttggaatcttccatttaagtaatcccctcttatctatgtccttggacccacgcaggatccctgtgtctgtctctggaagagtgagaattgatatcccagtttcttagaccacaagacttgaaagaccccttaaaccaacctacccttcctcaagaggcaaatgagacttagagaaggccagagcacaagatctaagcttctgagccgtttccagcaaatgaagaaagggaggcacaggcacccctgcttggttctgttaaaggagagtttgtcgtctcttcctatcctgacaacaaagattgacagatgaattaggtcatactgtcaggagcccacagcctagagaaggagacagacagagacagatatgcaaagacgccattaaaatacagatgatgagggccaggagagacagaagcacaaggaaatgggagcagagaggaagagctcctaacacagctcagaggcccagggaagacgcctgggagatggtcttgaaaaataagtcagaggtagcttagagaaggaggtgcacatgccttccaagcggaggaagagcaggtgccaaggcgcagcagtgtgagagcacacctgcaggggactgcaagcagttacccatggctgcggcaaaaagcaagtggcaggagctgaagttgtgtcttctggccaagctggggagtctgtccgttctaggtatcaggtcataggaagtcactgcaagatttgaagtttaaggtggctagagtagatctgtgctcatcgggggcatgaattggagggggcaagttggaggcagggagaccagtg

SEQ ID NO: 2290 - DNA, 4001 bp, Homo sapiens
catggattgcagtggagaaccctggctcttggagtcacactgcgtggactcatgtcctggctctgtcacctacaacctgtgtgtgtttttagataagctattaaacatctctaagccccagtctcctcatttataaaatggggctaggacctgccttgtaggttataaggattaaatgacaaaatgcaggccatgcacctggcatggagcacacaataaatgttaccttttaataataaagacataaagtattcctattaggttggtgcaaaagtaattgcgaatattatccttgttatgccgatgttggatattgaagacttggtgctgtaagacaaaggctccaagctaaactagcacttctaggaccaagaatgccttctctcatcctctcaaccctctctctctttgacagagtatattgtttaccagattgaggggatgctggccccaggctgaagtcacatttacttctgacctctgggtttgggctataaggagaaaggcttctctgtggtctggacataattgccatcccaattacaccaagccgaaaggtaaggaagagatggggtctgcctgtgtcacacataaggtgtgaggtcccctccctgtttggctcagcttccccacaggttttgtagtggaggcagaacattgagaatcctcctaccttcttgccgcgaagaggaaagggctgtgggggagaagacagtgcctgagatgaggtctctctgggctctccacccaggccaccaaccttagtccactgaaacacacagctgctctgctctctgcttccttggggcagacatggagccttcttacccaagaaaggagctgcagtggaaatggctccttagagaggggagtgttcccagatgccttggctaccacacctgctaggatttggtgcagcatgctgcatagaaccctacccaggtttctgggatatctggaccctactgacttgcttgaaaacaagaaggtatgtgggacggctgacaggggtaggctgctaaagaaaagggaactggtccctgtagggttcaaagaaagatcacttggccactgcccaggctttctggcatctctcaggttcccccctggcagcatgactgggctcacttagagcttggaggaagaaggtttactggctgggaaggctcagcctggtctctcaggctgcagagagagaacagggcatggctcctcacctgactgtggcttgacatgcctttctgagtctcgcttttacttcctggccatgtttgtaatggagacaatgaatggcttcctgcatgggttggccttcctggcccagagctctcagtgtgaactgaggggagaggggcctgcgcttaagctgctgggaaggcagtcttgtgttcagggatccctgctttgaagaaaactgtaaaaggtcatttaattcatgcccatatcactgggtagcctgaactctaagtcgtttgactcactcctaatctaatgtaatctaatctactggaacagaggagtggtgcaagctgtaccctgtgccatggctagcgccacaggaaaccaatacaggatactttcttggttacccaaacccctgacacccttaaactatgccacccactctccacccaggggagctgggatggtagagcatcttctgccctaccccgaagttggagttcccaaacctggacacaaaagcatcctccttctcagttacctcctagtcccaggctccaactcaagccactcgggaaagcattccagtcctgggcagatcttggctctggtctcagatggagcaagacagcagatgggtaaagcacacgctttcaatccataggtctgggccccattaacacgtcccttcttggtaccgtctttctttttgcacagcagccttgctgaaacaggaaacagacaaagccacaaggttcgcaaaccccagttcctctctcttgctctctggtatcatctaagtgggcccctgaactctgaggcctccagggctgggctcaggagctcctcccatcagtaggcaccccggccaccctttctcttgctactggattggtcggagctcttggacagtttcaagtcaagattcctttccatgattagaaaaggatagtcctctgggtcagattcagacctttgtggtttctatgagagggaaaaaaatgcctttttggtggtaagacctagatgagatgttctcagtgtaggctttcatgtgtatcaggtagttctttgtgtaaggattttcctttttctttagccacctcttcccaatcctggtgttgtaaagagtttctgctcttctgaagtaggtggtgtctttctcagattctggaatgagaccaactctggatttgctcctttctggagcaatgaggagggagtgtaaaggtgggtagctgggggatgaaggaaggaatagaaggcagagtcttctacacatttttttatctggtcaaccggactaggaaatttagggaaaaactaaagggaactgatttgcatgcattaagatgaagccatcacaaatgatgcagccaggaaattcccaagaagttcaggctaaaatagtggagaggaaactggattgggacaagttaactgagcagctttgtaaccttgtaaaattcaccttgtctggatgctactcactgtggtagttgggtgatgtatgtggctctttggaattctaaggtttgacacatgtgaggcaggtaatgagacttaaaaatagctgtgataacatttattaacatgtggagagtttgtcaccattttctctgcttctgcttctttctctgttctttgaggagaaaaaggacaaggaatcggcagggaaaagcagaggatggattctcaagcactaggactgaagacaagtggcatttactcaggatgagagacaacagctcaaggccctgtgtctggagcttgacacatagagatgggaatgagtagaggacagagggcttggggagcccaagatgtcagaaaaagagaattttggccgggcacagtggctcacacctgtaatcccagcactttgggaggtccaggtgggtggatcacttgaggtcaagagttcaagactagcctggccaacatggtgaaaccccatctctaccaaaaatataaaaaattagccggatgtcatggcatgtgcctgtaaacccagctacttgggaggctgaggcacaagaatcgcttgaacctgggaggcagaggttgcagtgagccaagaatgtgccactgcactctagcctgggcgacagagtgagacggagtttcactcttgttgcctaagctggagtgcaattgcgcgatctcggttcactgcaacctccgcctcccaggttcaagcaattctcctgcctcagcctcctgagtagctgggattacaggcatacgccaccatgcctggataattttttgtatttagtagaaatggggtttcaaccatgttagtcaggctggactcaaactactgacctcaggtgatccacctgcctcggcctcccaaagtgctgcgatcacaggcatgagccaccacgcctggccagagaatttttattggcatagaagagtgagaagattctgggagttcagggcattagagcgtaaagaaagacaggagattttaataggagttcctatagagacctactatttggactccattaaacatcagaaagaaatgtctacaaagtccgcagtcattgggatactaatcccatgataactgggatttagagtggtcaatgatatgctcaagatcacacagaaagtgttggacccaggtttgcttgacagtaggtttgagcccttaacattgtgttctgagaacaaaacaattaataaggttgtcatacctatctatctatattgaaaaagacacacacacacacacagaactttgagaatagaaaatataccttattttcaaatgcccacgagacattaaaaaaattgaccatatggat

SEQ ID NO: 2291 - DNA, 4001 bp, Homo sapiens
ttccacatgcacacacacacctccacatgcacacacatacctccacctgcacacacacacctccacatgcacacacacacctccacctgcacacacacacctccacatgcacacgcacaattccatctggacatacacacttccatctccacacacacacctccacctgcatacatacatttccacatgcacacgtacatactagactcaagatgagaacttctttaagaaagcaagaaacggagagatattaaagcagagtgagggcggcagggggtgtaagggagcttcccagaaagtcacattctatttattcataagctggggctgtctaatggtattttcgacattccaagaaagatgctaatctcaagggcgagaggggagcaaggccggcatgaagagccaatctgtttctcggtttttcagtatttcagcttagtagctacagcttccctgccacttttttgtcccctccctttgtagacttgccccttttgcccaggtaggggttttgttcttccagcctggagttttgtgtagggtgtatctgtgtaggggagggggcggaggagccatcaatgagagcaagttttccagagaaagggcagtgaccggttttcctatcttttctctggctttttccaaccaggccaagtgggacgcttgtgaggtcttgaaattccacctctctttaggcccgagacgccatgggctctctcagccagatggcctggacatttccatctcttataacatttccggtttgtaatggtctgggggtagaggagggggctcggctttgaggtccgcctccctcagtgagtttcagggtgcctgggagaggcaggaagtggtatctcgcagctcctgttttgatcttgtttggcttattcttctaaccatgggagccagggggtgcccccaccctttcagcttcctgtgttactcagctggggcttgcaaaagcaaaaagtgttgccaaaaataattttttaaagtgcctcctgctattaatgtttttcctaacgtctcatgtgagggagagcagagagtcagggatttggcatctacaataagcagagggctttgggaccgatggaagacgtggacaaagacttctactgtttgagctttgaagtaactggtaaaacggctgcattccactgtggcctgttcattgtcaatccacaggtcctgaaatcaactggctctacacctacctcctctggttcacatcttcggttccacacatttgcctttgcccaaactctttctatgcagaatgcaatcaaacctaccaaatttaaggtttatcttgctgtattttgggaatatagcaggcctaaggcaatattcttaaaattttcccagtctcctacccttttggggtacctcctctctccccattccatagtatggctttaatccaatattttgcctctttcaactgtttttgtattggcccaaccccaaattacttttccattcgtgttgcaacggaagacaatttaccatagccacttcagtggggatgaagggccacccaagtctggagcttgaatgaaacctctttccacagctctgcttttctggactccccaaaacgtcataaaagtcgcagccaagttgttgcaaatcgggcatgtagtttcctggtctgagccccagggtcccccacactgaagcccagtgttacagtatgtgggaagaagcactttttacaggcctactgctgacattctaggcagttagaccccgggagccgagggctcagagggcatataaaccccagtgaagagaggagcaaggcggaggccatacacacctggtgccggtctgaggtcttcagctcctgcttctgcgtggttttcccctgcctctgatctgctctccagaaacaccaccacctcaccacagaagcaccagcccacagctcatctctctgctctagtagaggttgcttagggcttcagccaatccccgctgcgctgtcatctcaagatcttaattccaggacgcagatcttcaaacccaaggctgccctgctctcgtttttgtattgcacaatattgaaagcttgctttctctgctagtagagctgtttctgccctgaaggttggaccctcctcaggagtctcaatagtgccccagagcctatggtatccaaaaggcccagagacatccggaggtgaagccagcggagggagctgatccttgggattctaatagggagtttgtggtaagttctcagcatgtgaagttggaaattcaaatttatgaaggtcaaatggcaaaaataaaggtctgaaccagttctggccactttcttccaattatttttcccagataccacagtttggggctatacttttattggagttgaggctttcatggaagagatagagagttgaattaccttattttaggggaaacaatagctgttaactgaaaaagtctgagactgtttttctttaaaactggaagctagggggttggtggggaggagggacaaagaagagaagggtgaggattgggaggggtgagaagaagggagggaggaaaccacaaccaagggaacttctgctcttgggctggagcatggggtgaaactcctccttggagacaaacccagaaatgtctcttaatatatcccccctcattcccacaaagcttgctttgattcaagctctggttgtgtcttacctgggatattacaagagtctcaactcccccaacccctgcttggagccagggttcttattgctacaagttagataatccttgaaccctcccccctcttttttttttttcaagacagggtcttgctctgttaccccatgcaggagtacagtggtgcagcctggacctcctgggctcaagcgatcctcctgcctcagcctcccaagtagctgtgactataggtgtgtaccaccatgcatggctaatttttttatttttaatagagatgaggtctcactatgttgcccaggctggtcttgatcactcaagtgatccttctgccttggccccccaaagtgttgggattacaggtgtgagacactgcatccagttggaaattacagaactttttaagacacagatctgatcattcacaagtcatttcctcagatagtaattgcataccttctaaggatgagccagacattgctaagtgtaggactttatacctcaataaagcatagttccattcttactcagcttattacctatagcagtgtttctcaagctgggtagcatgcattctaaaggatctctgattttatatatatacatatatgggtttcctttaaaaatgggtccatgcattattcaagtttgagataccttgttcaacagaaaaagtttaagacccataattctaaagacctgtctgagatcctttctttggtactactctggcataccttcatttcagccatactctgctatacccaattctttgccatacataggcctgtaatcattccaattcctttaccttaaacactcttctactttctgcttttttccctcatcatcactcttgcttctctactggttagctcctactcatccttcaagattcagctaaaatggtttctttcctttatttttattttttgagacagaatcttgctccgtcacccaggctggagtgcagtggcacaatctcagctcactgcaacctccacctcctgggttcaagcaattcttgtgtctcagcctcctgagtagctcggacttcaggcatgcacgattacgctcagctaatttttgtatctttagtagagacgggttttcgccatgttggccaggctggtcttgaactcctggcctcaagtggtccacctgccttggcctcccaaagtgctgggattataggcatgagctgccgtgcctggccaggtttccttcctttaaagccttccctgttccacctcaggtggaataattgctgccttctttctctttttcctgcatcatgctttatgcactgc

SEQ ID NO: 2292 - DNA, 4001 bp, Homo sapiens
acaaagagaaaatgctttgcaaaggaacgagctttacaaacaaataattatttttccttcaaggtcctccccagtaaagctgagctaatcagaggaggtttgtctaagtactgaggtgcctttcccactgcaagcctaacaagactgactctgaggcatctagctccccgactgtgcaaatcatccccactgaaacatcccagtccctatcgtcaggacgttcagtggacggcagctcttttccacactctttccatcgccctactacccaagtccagcgggcttgctgctgacagagggaaataccaccatcctaccctgcccgtcacaacaggcctctcagcccagaggccgtgggagaagtcgccttctccatcacttcccatgttccagatgctggctcagacactttctcctgcctctgtccaggagccagggatctgagaggtgatccattccatagagttacaacaaaaacagtaactgtaacaaaatcaaaaacctttacagaagctaggcgttttccacttccatcttacatccatcgttcctgcagcaatttctgtctttctagttcaaattagagttagggatggaagtgtttccacccaaaccatcaattacattaacacccctgttttcagctttgtgagtacataaggcagagcagctgcactgggatttgagagttcctagcccagccttttgctgcctaaaattatctcgcacacacccaaaactgttctatttccagaaatggttcaactaatttctttgcatctcaggtcttccagagcccttttaaaatgcaagtatctctggaggaaataaccatattccactggccccagcccagttctcacacagcacctgcccaataaatatttacagaattaaactggttaccagatgcctatcctcacaggaggtgggtcagagcccaaggctatggagggtgggggctgcaggggcagccctggcagggagcctcgcctggtttcaccaacctcaatgctcgcctgaggcagctctgcctgccacagcgagataactgagttctcatgaaagtaaatctgaaatacccaaatatggaaacttagcagaaggaggccgaatgagcagagaaagtcggccagccagagtggcccagtgggacccgcagcaagagcgtggccccgaaaattctcagaaccaccaagaccctgcagaacaggaacaaagtggagaccatctggtacggagaactcagaatctgcgaattctctgggtgcctctgggcaactccttccacctctcggagctttggtttgcgtcaaggttccttagagctcgccttctgggggaggggggtagctgctttctaaaggaagacgcgcaaacgaacagctggtagaggcttccattccttgcaatcctgaagtttcattctggagttgctttgattggaaagccctgcaaaggtggagagggtgccttcgggtgcggaagggggccagggcctggtttgcagtgcggatgtgcgggacgtgcctgaaagtcctccccgccagtgcaccccgacggaacctggcccctccggtccacagccgccctctggaccagctccccagctttggacccccagtctccgccctcgccacacctctccccggctaagaaacccgctccgcaccgctcccgctgtccccgggccgtcggcggtcacctgccccgccggtctcccgcaagcccgggcccctccgcctcccccggcccagccgccgcctcgcgccctccccgccggtcggggaccggccggacgccagcaggcgctttcggtttcaaagtaactgggacgagatgaaaagcgctcgtcggtgtccccaccccggcccttccgtcgcgagggtgcccagggcggcgacccgccggactcacgtggggctcggcgcgcgggctccgcgaggccggtctgcaggcgcggctgctgctcctggctgcggccggcggcggcggcgaagcggaggcgaggcctggggcggggccggggcgcgggcggaggggcgcgggcgggcgcaggggaagagcggacgcgcaggaaggggtcgggaggaggctgagaccgtcatccaggcggttggaaagctaacctacccgcttcagaaccgttagtatctacaagtccagtcatctgatttccctcacgtgcgtctgaattgtggccgtcttgctcttccgtcaggcacaacaaggctcagcccgtcctctcctgtgttgacccatttgctcaaggccttgcttgagatctggctcaaatcagtccttcctggactttccttcagggtagcacaaatttgccagccctcctcttgctgttggcctaacaccagcaatctctgagagttgtagagctccccggttggcttcccaaacatctcctgtggtcctcaaaacaagctggtgaagtaggcctggtcatccccattttacagatgagctgtctgagggccagagcagcaacgtggagtgacgtacccaaggttagacacgctcagcaagctctgcagctggaacttgaatccaggtctgctgtctgcctgtctctctccctctctctctctctatacgtattttttattttattttattttttgagacggagtctcgctctcacgccaggctggagtgcggtgacgcgatctcggctcactgcaaccctggcctcccaggttcaagcaattctcctgcctcagcctcccgagtagctgggattacaagcatgtgccaccacgccgggctaatttttgtacttttagtagagacggggtttcaccatgttggtcaggctggtctcatctcttgaccttgtgatccgcctgccttgccctcccaacaggcgtgagccaccgcgcttggcctgcgcactcttagatacgggctctttcttacaatatattctctccaagggcaatacattctatataaatgaaatggaccaaaattccaattctatctagatcctttactttcagttaggccaccgtgggaaaagtacttaactgctctgagtttcagttaccgtcctcgtcaataaaaggggagaataatacacaccttgggagtcaaaaactcagatgtgcacaggagctcggcaggaaacatacaggagggaggcagaggttgtggtcatggagaaaggagggaggcgctggtgcactaaagagcaggtggaggatctagtggagcagccaccacccagtgccagcctattgttacctgatctcttatttctccaaagagccagaaatccagatccaaaccttttttggttggtgagttagatgaaccgctccgtgggggagaggcactggtgggtgttgctttgggactgtagatctgtctcataatcttctcatgagaattaaatgagatggcactcctgtacgcctaacacagagtaggtgcttagtgaacccaagttctccttcctgttctgccatacactatactttccctctctttttgtgggtgtgtattttttgagagaggttctcactctgtcacccaggctggagtgcaggggcatgatcacagctcactgcaggctggatctcctgggctcaagtaattctgccgcttcagcccccagagtagctgggactacaggcacacaccactacgcccacctcccccagctcctttttttttttttttttttttgaagagatggagacttactatgttgcccaggctggtctcaaactcctgggtttaagcgatcctcccacctcgacctcccaaagtgctgggattaaatgtgcaagccactacgtcccacccgctttctcttaccattgcctgcttcttgcctctcttctcattacttccaagcataataaagttgatactgttttttagaagttatatctcctttcactggctggaacatcagtgtctagtatgcatacatgcaggtatgctcagaatccctggtcctgtcattgactgtaatttgcttctct

SEQ ID NO: 2293 - DNA, 4001 bp, Homo sapiens
agagtcaaattgaggaattttaaaagtatttacttcaagataataagccaattatatgttaatacaaatatttttatgaaaaataaccattttccaaaacaaaagaattagtgagaagagtgccaccattttacatgtttgcacatctctttaatgtgttgcttaatagaagatagctggattctcatgtctgctcctacattcagtctgttgcatatcatatatcatttagcttcagggaaacatctctgtgcatttgtaaaaggagagtacaaatggcaaacgatgtcagtactattatgaaaatagttttgaccatgcagatcccctgaaagtgtgtcagggagccccaagcagtgctgtgctagtaaacatttaataatctgctcaactgggggaaagctccagcttgtagcatttgccgatttctgtggttaaacacttccactatggctaatttcaaggtaacaatgaaaaaggtcactgaactggaactgggaaagagatgcacacaattggctcttacctgaactcacctgaagtaagagtccattaagtgacttcctagtaagagctgctccagcaccccaggggcccttgaagcacactttggaaaccactgctctattagatggctgtgtgggcccatgtcttgtcagctttgtcctggcagacacagcacatgtgactctcacagtctccttgctcctgctgaacagccagcagaggactgaatgccccatccttcctctccccatccatgtgtgtatttcccagacctattcaacaggcctaagtcattcactgaccttgttcactctctaatcggttattgtcttgtccactatttgtttttatgaaattgggtttttaatctcataacacattgtagaaaaataagcatttatgttcggccatgagatgtggacttgaggtgtctttctgggtgaggttctagtatataaacagagctgtgatgcctcccagggcaggatccgtctccttctgaagcttcctcaagcctggacccactttgttcactgacatgagagagcccaacagcagaactagaaaggctatgcttctttacctaacaaatatatttatctaattaattagatactttcagctggtattctgtcattcccaggcagctatttagtggaaatgagtaagcactccattttattaaaatctttcccctctgtgtataacagcttacgtaacaggaacaacaaagcagctcagttcttgcaagtcaggaaaaaaaaaacatatcaaaactgctaaaaatagagcttatatatcacctttctgcagtcaatggcattcgtattcttgccatcaatgggatgtacagtgtggtactcctactgaagagttgttaactcaagccaaaagagacaaaagaaagtcacatcccatctattccctaagaactcttgttgagtttctttgaaatgccatcttcttgtttcataaattgatgcatcttttccatgagaattttttaggaattccaaaggaaagctgtggatgccaccatttacattctttacttacgtatctctacggattcatttctggagaacatatgacaaatattctcacattctgaagcaacgtgagcttagccttcagttataacaaaaaagatatgtattttgcagagtttaaggtttaacaaagaaaggtagatcctgctctgtctatccataccacctccatacccctgccaacatccagtttggattaatgaagatttgaaaaactggggaatttttaaatatattatgttatagtgcataagacataagtccacaaaatttgtcttcagggttttcaagttctgattcttggggaattactgattactacagataaaatcccagagtgaaaagggcacaggaccagagacctctgtctctgctctgccactcaccatccatgaaaccgtgagcaggacaccccacagcccactcatctgcacatccctgcactgatcctgggttaggtcctgagaatgcagaggctgtgacgttgcatctgcccttgagtccctccaaggacagaagaaataaggcacaaaaatgatcaattacaatatcccactggcaagtaccacaaacagagatttcgacaaagaactggtacagcctaggtgaggggtagctaacaatttctgaggtgtctgtgctgatttcacagagaagaaatcatctcagctggtcttgaagaaagaggaggcattttctagatgaaggaggttaaagaatttcctgctatcacaaaagttctagaatggttagcaattaactgtagctgaagtggaattaagggaacatgccagtcatttgcctgtttgcccagatccaccccctactcttgctctgcttagctctgcagcatgaggtagggtgaaatttgatgccgcaaactgttttccaggctccctggcttctggttaggttcagccaatgagaggcactgggatgggaagagtgggaagaggggcaagccaggggatctctccccgatccctgggtgctgggcagcatctcaacagtgactggtgctcctccatggctctaatgacaccagatggcccctctctctgtggacaggctgccagaaggcaaactgtccatttctcagctctgctcaggtcttgctggcagtgttggtcaactgcctaatacccacttgagcagcatgggaaggatacaaatatgttattccccaaacccacccaaggcccaccaatgggtcctgggcttaaagaggagagactgtggctggtgataaagaaaagttaaaatgttcaatcccaagatgcagtgacccaacgggtctctggaatccatgccctcggtgggttccagatgctctcctgctaggatcggcagttctctctcaaggtcatggctggcgttgaatcctgtgattctgctcttccaggaagaacagttactaccaggaagcaaaaaaaaaggagggggggggagcgcagggctggcacagtggctcaagcctgtaatcccaacactttgagaggccgaggcaggaagattgcttgagctcaggagtatgagaccagcctgggcaacatggcaaaaccccatctctacaaaaaatacaaaaattagttggccaggtgcagtggctcatgcttgtaatcccagcactctgggaggccgaggtgggtagatcacctgaggtcgggagttcaagaccagcctgaccaacatggagaaatcctgtctctactaagaatacaaattagctgggcatggtggcgcatgcctgtaatcccagctacttgggaggctaaggcaggagaatcgtttgaacccaggaggctgcggtgagccgagattgtaccattgcactccagactgggcaacaagagcaaaattatgtctctaaataaataaataaataaaattagcagggtgtggtggtgcacgcctgtagtcccagcgacttggggggctgtggcaggaggatcgcttgggcctgggaggtcgaggctgcagtgagccgtgttcattgttcacgccactgcactccaccctgggcgacagagaaagaccttaacttaaaaaaggaaaggaaaacgaaggaggagaaagcactttatctgttaggctatcctcctggcacaaaggagaactgaaatggtctcacagtttttccaaagcttctgtctgtgatggcctaaagaggccttccctcaaaaactgaagaagaaacccctttaaccaggcaggtcaaagacgaaggccttggagaaagggagaaccaataaggccattttccattacacctaatgtggctgggagctcatgcagagaccaggtgacaccacgacaaccagacaacatgtgaccacagtccaccgacgcactgttcttgccccaggatgactggctttgatgtcttagaggcagagataagggtatgttttctttgcttttccttatgtcttcacagaaggaagt

SEQ ID NO: 2294 - DNA, 4001 bp, Homo sapiens
gaaacatcccagtccctatcgtcaggacgttcagtggacggcagctcttttccacactctttccatcgccctactacccaagtccagcgggcttgctgctgacagagggaaataccaccatcctaccctgcccgtcacaacaggcctctcagcccagaggccgtgggagaagtcgccttctccatcacttcccatgttccagatgctggctcagacactttctcctgcctctgtccaggagccagggatctgagaggtgatccattccatagagttacaacaaaaacagtaactgtaacaaaatcaaaaacctttacagaagctaggcgttttccacttccatcttacatccatcgttcctgcagcaatttctgtctttctagttcaaattagagttagggatggaagtgtttccacccaaaccatcaattacattaacacccctgttttcagctttgtgagtacataaggcagagcagctgcactgggatttgagagttcctagcccagccttttgctgcctaaaattatctcgcacacacccaaaactgttctatttccagaaatggttcaactaatttctttgcatctcaggtcttccagagcccttttaaaatgcaagtatctctggaggaaataaccatattccactggccccagcccagttctcacacagcacctgcccaataaatatttacagaattaaactggttaccagatgcctatcctcacaggaggtgggtcagagcccaaggctatggagggtgggggctgcaggggcagccctggcagggagcctcgcctggtttcaccaacctcaatgctcgcctgaggcagctctgcctgccacagcgagataactgagttctcatgaaagtaaatctgaaatacccaaatatggaaacttagcagaaggaggccgaatgagcagagaaagtcggccagccagagtggcccagtgggacccgcagcaagagcgtggccccgaaaattctcagaaccaccaagaccctgcagaacaggaacaaagtggagaccatctggtacggagaactcagaatctgcgaattctctgggtgcctctgggcaactccttccacctctcggagctttggtttgcgtcaaggttccttagagctcgccttctgggggaggggggtagctgctttctaaaggaagacgcgcaaacgaacagctggtagaggcttccattccttgcaatcctgaagtttcattctggagttgctttgattggaaagccctgcaaaggtggagagggtgccttcgggtgcggaagggggccagggcctggtttgcagtgcggatgtgcgggacgtgcctgaaagtcctccccgccagtgcaccccgacggaacctggcccctccggtccacagccgccctctggaccagctccccagctttggacccccagtctccgccctcgccacacctctccccggctaagaaacccgctccgcaccgctcccgctgtccccgggccgtcggcggtcacctgccccgccggtctcccgcaagcccgggcccctccgcctcccccggcccagccgccgcctcgcgccctccccgccggtcggggaccggccggacgccagcaggcgctttcggtttcaaagtaactgggacgagatgaaaagcgctcgtcggtgtccccaccccggcccttccgtcgcgagggtgcccagggcggcgacccgccggactcacgtggggctcggcgcgcgggctccgcgaggccggtctgcaggcgcggctgctgctcctggctgcggccggcggcggcggcgaagcggaggcgaggcctggggcggggccggggcgcgggcggaggggcgcgggcgggcgcaggggaagagcggacgcgcaggaaggggtcgggaggaggctgagaccgtcatccaggcggttggaaagctaacctacccgcttcagaaccgttagtatctacaagtccagtcatctgatttccctcacgtgcgtctgaattgtggccgtcttgctcttccgtcaggcacaacaaggctcagcccgtcctctcctgtgttgacccatttgctcaaggccttgcttgagatctggctcaaatcagtccttcctggactttccttcagggtagcacaaatttgccagccctcctcttgctgttggcctaacaccagcaatctctgagagttgtagagctccccggttggcttcccaaacatctcctgtggtcctcaaaacaagctggtgaagtaggcctggtcatccccattttacagatgagctgtctgagggccagagcagcaacgtggagtgacgtacccaaggttagacacgctcagcaagctctgcagctggaacttgaatccaggtctgctgtctgcctgtctctctccctctctctctctctatacgtattttttattttattttattttttgagacggagtctcgctctcacgccaggctggagtgcggtgacgcgatctcggctcactgcaaccctggcctcccaggttcaagcaattctcctgcctcagcctcccgagtagctgggattacaagcatgtgccaccacgccgggctaatttttgtacttttagtagagacggggtttcaccatgttggtcaggctggtctcatctcttgaccttgtgatccgcctgccttgccctcccaacaggcgtgagccaccgcgcttggcctgcgcactcttagatacgggctctttcttacaatatattctctccaagggcaatacattctatataaatgaaatggaccaaaattccaattctatctagatcctttactttcagttaggccaccgtgggaaaagtacttaactgctctgagtttcagttaccgtcctcgtcaataaaaggggagaataatacacaccttgggagtcaaaaactcagatgtgcacaggagctcggcaggaaacatacaggagggaggcagaggttgtggtcatggagaaaggagggaggcgctggtgcactaaagagcaggtggaggatctagtggagcagccaccacccagtgccagcctattgttacctgatctcttatttctccaaagagccagaaatccagatccaaaccttttttggttggtgagttagatgaaccgctccgtgggggagaggcactggtgggtgttgctttgggactgtagatctgtctcataatcttctcatgagaattaaatgagatggcactcctgtacgcctaacacagagtaggtgcttagtgaacccaagttctccttcctgttctgccatacactatactttccctctctttttgtgggtgtgtattttttgagagaggttctcactctgtcacccaggctggagtgcaggggcatgatcacagctcactgcaggctggatctcctgggctcaagtaattctgccgcttcagcccccagagtagctgggactacaggcacacaccactacgcccacctcccccagctcctttttttttttttttttttttgaagagatggagacttactatgttgcccaggctggtctcaaactcctgggtttaagcgatcctcccacctcgacctcccaaagtgctgggattaaatgtgcaagccactacgtcccacccgctttctcttaccattgcctgcttcttgcctctcttctcattacttccaagcataataaagttgatactgttttttagaagttatatctcctttcactggctggaacatcagtgtctagtatgcatacatgcaggtatgctcagaatccctggtcctgtcattgactgtaatttgcttctctctcctactcctctccccaccaactaaataaagcagtcaattgttccaaaaattacatccaagccttaaatatgatggaataaaacctgggatagagaggtggatctttattgtggtgggaaatgggggccgcataactcgagggctgcgtctaagtggaaagggtaaaggaattttagacgggtattagtc

SEQ ID NO: 2295 - DNA, 4001 bp, Homo sapiens
aagtgcagtggcatgatcttggctcactgcaacctccgcctctggggttcaaacgattctcctgcctcagcctctggagtagctgggattacaggcacccaccaccacacctggctaacttttgtatttttggcagagacagggtttcaccatgttggccaggctgatctcgaactcctgacttcaaggatcctcccaccttggcctcccaaattgctgggattacagtgtgagccaccacagccagccactagtcttgagccgtagccaatgtgggtatctcgcgactcccatccatccatccatccatctccatccctgcagtaatctcaagacaaggggtgggaggtgggagaagaaccattccagagggctctctccccatacgtgttcctgaattctcctgagtctggtcactgcctgagtcaggtctggcctgtccagctctggaagaggcaggctgtgaggcccctgacctcacaaaggactgtcatgaactccgtcatccccgcagtccccccaccctgcagataagatgactgacacaaagatgggggatctgctcctcgtccttccacttttactcatcaatgccttcatcaccattatacttgtttactgagcacttcctagatgccaggttctgtgctcagcacttcatttccattgccttatttaatctttacaaagaccccaagatacctcatggcactactatttttctgattttgtaggagagcaaattagattttagaaaagttaagtcactagctcaaggttactggctccagttgccgcccttctatcatcatccttttctaatgtttttgggccagaggggacactattcccttcccaggccttcccaagagtgtccaagcccccagatacgcacacatcccaggacaggctgctcccaggttgcctgagcccctgacccttttgtttcccactctatccctccaaatggccgctttctggagctgcttaaaggaaggagaaactggagggaaggggggcaagggggacagtatctcactgggcctaatctctggacaatgaagaactagagaactgaccttctagaagtcaggacaaagggcagggccagggtgggcagggcacagctgcccctcctcctcccccgcaacccaagtccctgcagcagcaccaccatcatccatccaccttcccagcaagctccccactctgccccgggctgggcctggcttggcttgaagccctcacctcagctggcaccaacaagggggctgggagtccattctggagggctgggaagcagggctactttggggagtggattctggagggggtcaccaccccctcatcgacagaccactgggagaaaatccttctggggtgattggcggggtcgtctggtgggggtgggggaggtccagggctaggaccacccagtttggagccgggagggacccagcagattagagacctgggtaaggcagctgcgcagggctgtaattacccccagaggagcagggaagacacaagcgcagaatgccggagcaagggcggcagcaaggctcccagacctgtccccagcccagccatcagcaggggagagaaagcgaaaccctttcaggggtctccttgtgactctccttcatgcctcccgacgtcccccgggccgctttggtttaggtgggtttgagcgagaatttggactcgaagctgccctctcagccccagtgccagagcccccaaactccagggtgggaaaggggagtcccagccctgctccccctctcccccagtccccgcggcgggtgagtcacccgagcgctccctacttagtcctcaggcgctgcggcgcgtaccaagacgcggacgcagggggaggcagctagcgcggcgaactcctggagccgtggagcccgctcggccgtggccgtgggagaggcgccgggaggctgcgggcgcggggctccggggcgggggcggcgcgaacggcgcggacggcgcgggcgcggggggctgggtcccggggcgctgctggggtggacccccccgcctcgaacttggtacgcgccagcgagaggccaggcccagcccgggcggtacaatagggttgggccgaggccgggactgggccggcgccgggcggggaacgggttcgcgaccgcagccgagagaccccgggcgaccggcacctccgagactcgcgggccacctgcctcgaccttccccggagcgcccccgcctccgagtcgctacttgccgggccgggccgggccgggcgtgatgcgccgcgggacccctgtcctggccactggccgccgccgccgccgccgctgagaccccgagacccccagtgacgccgcagccatggagagcggcccgcgtgcggagctgggggcgggcgcacccccaggtatgccgggagccacgcggaggcgagatgggggtagatggaggggctgcagggcggccgaggatgaggccggccggctgggcggggacccctccgctgccgcgccctctgaccacttggaagtttaaaaataaaggctgcggcggcggcggctccaggctcgcgatgcatcctctgacagctgccccctcccccaccccgggtgccggacgcatcgggcgtcgggagccgcagggaccccgcgcgggagttgttggggtgacccttctgccccagcttagtgccatctcagcttccccgcccccacgtcccttcccgattcaccccgggccttgaagatcctcttctactgagctagggcttccgtccccttccccatcccccgtggcacatgtgaccccagcctgagtgtgtcgggggtccatattctcaggcctgggccctgcataccgacgcctcggccttagtgcccgtaccctcaggccctggcccagacctcgcccccaccccatccgtccagctgccgcgcaaagggcctgttgctgctgcgggccggcggggaggggaaaggagggaggggaggagagagggaggtctctagccgctgctgccaagtaacccgccggataaaggcgagggggagggggaggcggcattgtttggggtgagggcgggagctggggagtgggccgcctcccctgcagccaggcctactctggagcccacccagcctgattcggggaggagggggacagaagtaaatctgcttctcctgcctgccctccttcccagcctctctgggccccaatctcccactagagaatgaggtaaaggctccaagccggcactccctggacctgccacatcattccccagcctgaggctttgatacctccccccttactctctttttttctctctttctgcccacaccttagaccaccaaagctcccctcccctccctcaccccaccaaccaccagtgctcaggacttctgcaaatcccattcggatctgggagcagctgatgagggggtggggacaggtttctggttgggcttggttttggagggaggcgatttctctttcttcctggaaggggagggaagaacatgattattgaagacccaagttctgttcccattgactcaggggggaggtggccccatccccacacccccatggagtcctgagcctaatcctgtcacctccctgccccttggggtgtgggcacaggatgaaacagttcgtgtgggtgcggagagcccaggataaggtggggccaatgggctgtgggtgggctcctccccatgccagcgaggatgcttctaggggactgtctgggtgtgggacctgggagaacagggaggggaggctaccatcagactggtgggtttcaggaggcttgtaggctgggctggaaacaagggtggctgggtctgtcctggtttggctgaacctgagaggggacacccagggaggcccagcctgagtccaacctcagcttactggccctctgcacctgagggcctctggcactggatagttgggggcctgaatgggggtggtgactgggatacagagcctgagct

SEQ ID NO: 2296 - DNA, 4001 bp, Homo sapiens
acacctatagtaccagctacttgggaggctgaggcgggaggactgcttgaactcgggaggtcaggctggatgagcctcaatcatgccactacactccagcctgggtatatcatttaaaattaaatagacagtgctatgaagacaaccagcatagagttagaggttagagaattaggcaggtaatcaggagggaaggcctctcaaaggaggtgacatttgagtaactatgaatgaaggcaggagtgggctaagtgactatctagaagaagggagttccaagagccttgagggcaggagtatgctgctgcccctccctaattaccttacttcactgaaacgaagaatactgggggctgggggtagagtctgcagatttttgttaaagatttcaatattgatttcaggcttaaaaaatggataaaatgagagcaaagtacaaaaactaaccaggaagacctctactcatctcataggaaaaggagaaagaaacatttaccatgcccctcacattttacaccatcccatttaatattaggtagacattactatccccattttatagataaagaaattgaagatcaatcaagtaagtcagaattccaaccaaggtccatgtgtttccccttacctgacattgtttcctaacaaaatattctcgtcttttggccgggtgtggtggctcacccctgtaatcccagcactttgggagcctgaacaggcagatcacttaaggccacgagttcgagaccaggctggccaacatggtgaaaccccgtctctactaaaaatacaaaaattggtcaggcgcagtggctcacgcctgtaatcccagcactttgggaggccgagacaggcggatcacctgaggtcaggagttcgagaccagcctggccaacatggtgaaaccccatctctactaaaaatacaaaaatcagccaggcgtggtggtggacacctgtaatcccagctactcgggaggctgaggcagaagaactgcttgaacctgggaggcagaggttgcagtgagccaagttagtgccactgcactccaccccgggtgacagagatttcgtctgggggcggggggagggagggaagaacgaaagaaaaatgacctaagtctgcagccccagcccctagtccaactttataggaccatatggtgtccaaactattccctgggaaagaagggagccacccactccattagaggggcaccactcactgcttactctggcccatctcttattccattgaataaaacgttcctttctggcacgaccagtatctgaacatctctcacaatacccacgccacagtacgagacactgtagcctaagagtaaagcctaacagtcagctcctagcattagctttggagttaaacacgggtccaaatcctaacttcccaggtgtaaatatgggcaaattacgtaagctctccaagctgtaaaacggcaatgttatccatctgataggggctactctgcagattaactgagatgctgtaacgtgcgtggcccggtgcccaacacatagtaagagagaagttaagtggcagttattggtatttattaccgtcgttgttgttggcttagcacagagctgcactcaggccttgggggcggggtctcctccggggaacttctccgacggtcccctcacctgcctggaacgcccccggagtgacccagcaagaggcttccccttgccagagctcacaggaaggcccttttccaaacgcacctcgcgctcggcgccgggccccttccctgtacgcctcaatttcgccccgcccgccgaggtcacgcgctccaagttaccattttcttgctctcggtgccacggttcgcctgcctcgacatggtgccggccgccccgccccactcgcctagccacgggttagctcggcgacccctgcagacgccggagcctaagccgctgcccctcagcccacaagaccgaccggcactgactcactgcgcctgcgcggcctcccgcggggcaccacgggactagtggtccggccgacgtgggcaactcccgcccaacaaacgtcagactacaacacccaacagcccctttggcagcaccgcctcttaacacagtcaactacaactcccggagtgctccgcgcgcgcctgcctggtagagcccagcttgcgctgggcagcatcctggccgctgggtggcgtccgcagccttcggtaatcctgggtcacacacacgcttcctccttgtccccctccccccgcgcccggctcagagatgatgctccacaaattcctctctcgccggggttggtcttggaaagtccctctttcgagctagcgtcttccgctgttgcgattcagctccagaagctcccaagatgtcccagaaaactagcaatgactcacacagaattggcttcttcattagaaaaatatttaatgacctactatgtgccaagcatttcgctagtgtctttctcttcagactgccaaaccccaaatgatgccagcacctgccttctaccacctgtggcctcgtgatggaatatccagtcttttaggtaaagttcaagtcactttctccccctccctccccctagaacagctacactgcctggttcccagaaaacaaagatcactaactgtcgtggccgtcagttctgagttctaatcccagctttgccattttaggcaagttgctaaatctctctcagttgttgtaaagactggtgagccacgcatgcccagcacttgggcgcataaaaggcataaaagaaacgtgtattcccttccagccaccctccaaaaacaagccaacaaacaggcaccagaaacacgaagggaatgtgctggctgaactctcacccatcaccaaggggaagtctatagtccctgaccacagctctttggtttcagctcccgcggtctctcagctggtcaactctgaggaagctgggctggggggtccctgagcactctctgttcacttaggcctggtagcctgactgtagcagctgcattctggcccctagccctcaccatgacaaccagcctgtccagacacgagccagccaggctagggagggctggggggccgctgaggctgcaagctggtgcccagggttcccccagtccctccctcagggtgcaggaccaatcattattatacccttttccccagacattctgtttcctccctagaggcagtgacccctcactctccatcctgtgtaatgccacaggggagggagccaagggccgagggctctgggaaggaacttgagggttggttggggttgggggaggaaagcaggagtcaactagcccccaagggccagctcagctagacaagagccctctgcattcccaggacagaggacagctgaggtgaaagctgcagttggccagccggtctgtcggtctgggctcctccctgccggctgcccttggctgcccacagaaacctgagtcacactcacagccagccacccaaccccaccctgcctgctgtcaagcagggcggttctagagagagtggaggtggagcctttccctgcctgtccaacagcctccgagattttgcctctctctgcctgggattcctcctcttggcgtctctttctctttgggacttgcagtgtcattagtcctgaatgaacagtgggggtgggggccatctcaggttgatctatatgatcccctcctcactcagataggttcttaaaggcttcttaggccgagcacagtggctcatgccagtaaccccagcacattgggaggcaaaggcaggaggaacactttagcccaggagtttgagaccagcctgggcaacatagtgagacccccatctccataaaaaataatttttaaaaaggctgttctgttatgaaatagccactcttttgtttatttacttttttaacaaaaataaataaaaattaaaaaaaacaacaaccagctgagcattgtggtgtgcacctctggcccccagctactaggaaggttaagg

SEQ ID NO: 2297 - DNA, 4001 bp, Homo sapiens
ttctccacaattcacaaacctttgctgaaatacgcttttctatgaagttcttgtgcatgtgaaacttaaaatattaatcaaattgtatgattttttttcctgttaatttgtcttgtgccagtttaatttgcagccctgagccactgaacctaacagggtagagggaaatttttttcttcacctgcaaaagaaagggttaagtgctatcccatgaaactatatcgagtcaactctatagagctattgggcactctctgcacccattggggtaattggtgtcacaagggtaattctgctgggctaacatgtttcaggtgtagacattcctgcatgggcaaagaaaagaaaacccaaatgaatctgtgtctgaacaagcccacggatatggctctaaaccacctttctgctaaaatccaaagcagaaggggacagattcagatttattctagtatcccagaagtttgctctgtgatagggacagatcaagctcagtactgattctaacactgccttaactgctcatctggcacacacaagtgaccatgatgcaacacacaaagtgcaatcaagaaagctccaaagatgctgccatctgccccacacgtaggctcccaggagcacacctgcagcaggtcagcgaggaaagaggacagcgggagggagcgcaggccagggaacgtgtgccccaggcccttcagctcgggttttatttgggttttaagcagcaagacaaggggagaaaaggcaggctgagccctggcatctcagatggcagagatggctcccagtaccccacccagaaatgcagggcagccctggaggggaggttagagaggaaacgactgtgtccccctcatcctgcccagtctggggctttcccaggacttaagtactgacctgctaacacagtccctgcagggagtccatctaggatcggccacctctgaggttctcccactttcctctgattccagctccttgctggccagggtatggccacattttccttgcccccactccaccaccttccaccttccaccttcctctcttagcctctatctatgagaggtacgcccctcacccccgagagcagggtctcattggcggccatggtcccagcctcaaggggcctggttgaaacaggctgtgtcatgagcccccacagccaccctgcgcgacacccccctcacaggcccacagcaggctgcatcctgagctccccgccctagacagagacagattactcccggagcagtcccccaaacctcccacccgcccaggcctccccagtccccggctccccgacgcccctgcacgccacccccgcccaggagcaccttgaggtcttcggccgcgtcctgcagcggccgcacgcggtgcgcccagtgctccccagagcgctcgcaggccgcacacaggaggcgcagctcgtcgccacagaaggcggccagtggctcgcggtgcgcggggcacacgccctgcgggaccggcgacggcgggtgcaggcgccgcgccatctcggccatcttagcaagcgggcggttgggccgcaggttcctctgcggggacagctcgcggcactcggggcacgcgtacgggccctcgggctggccccagcagcgccggatgcactcgcggcagaagttgtggccgcagtcggtcatcaccggatccgtgaagtagtcgaggcagatggcgcaggtggcctcctcctggaggttggtggacaggtcgggggcggccatggcgcggacagaggggaggaaggcggtactgtccgcggggcggcggcgggcggcctcggcagctcgcggggacgcggggtatccgggtgcggcggcgcaggctcgggcactccggggcgcgaggctcgggactcccgggtgctcgggctccggggcgcggggactccagggcgcaggactctgggtttcggtagcgctgggcgcgtaggctccgagcgctcgggggacgcgggacgtagggatcccggatgccggcaggaagaggagccgaggcggaagcaggaagcgactgggtgggttttgtgtgtttttttttttttttttttttttttttttttttttttggaacaacccgcttttgcctccgattggccgctgccagtcacgcggcccgcgggcgggacggaattggagagctttcacttgctgacctggcgtcaccaccgctccggttcttgtggccaggtcttttacccctgccctggggaggactcaggcgcaggggagggatggggacagggggcggggcgcaggggagggatggggacagggggcggggcgcaggggagggatggagcagggggcagggcaaggagggatggggactcagggcggggcacacggaagcaactgcaaggactaagggagtccgcagcctggggcattggagcccttcgccatacccctagtgcgtcctcaccccctcagcccgtgcttcccagggcgggtatcctcggaaggcccggccctcacagccttggcaggccaaggtcagaatgattggagttgggggatgggacgggggcatccctccaggaccagctctccaggaggcccacattctttctgcgggaaccactccaaaggggcatgctgttccaggcagcccctcgcgcagacactccggctttgtcgaggtaggagtacgcttactctggaattctgccttgctagtgactgacacaggctgttaaagtgcttgaccctgcaggggtgggtggggggttccttggaaaaggtaagggcgctgtggaaaagaggcccctacataaatcctaatctctttgggattttgcccctgctcgtgcaactttggggatcgaacgggatgggggtgggcagctctgaggctttttacgggttcagcctttcccattttcccccatcgaaggacccaataggatgcataggacatttctatgggcagcctgggaccatccctgacacagcaaccacccccgctcctccccaccataggatatttctacttctttgacagagtaacctaaacccctgggggggctgggagccacagattcctgtcattccaaagtgggggtgggggcatggctaaaaaaaacgtgaccacgctgttcctggtgtgtaggtatggatttagaaatcggtccactcagaacgcaggggctttcaaaagtttcctctaggaagcatctgtcagtataccctcttaatgtttgacagttctaatcacaattatatttagaatttgagaaacccccctgtgtgtctaatggctgccagcgtgatgccagagaaccctggcaggtggcctgcagtaagcagaaggcccacaccttctgcagagccaggagcagtgcccgagtcccccggtctgtgtctatcctttcacccacatggtcactgtggagatgaccatctgaccagacttcggagcccccaggcagaagaaaggctgcagggggcctgggaaggtggcctgggagtaggtgtgcaggtgggacccatcgcttacactgtagaaggacacttccccggcttcgaagtccaggaagatgcccatgtggctgggaggctccatcagcatgaccggggttagggcagagaaggtggataagtacttggtccccttggacagctgcaccacccagaagccgttttcggggcacttggggaccctgtctttccggctcacgttgtccctgcacacacccagggcccacaacgcgtccccggtgatgttcatgcccacctcccagtagtgcctcccagaggagaaggccgtctggcccacagcacaggggtaagccacaaatcggtccttgctgcagaacccactgccctccggcgaagagccgaggtagcgcctctggcggctctcatacaggaggaggtaggggtacgcggaggtggcatcaggcaccacatcctctgtagatgggcgtggtggtggagagatggggagaggtgtggggcattcagggtcaaaggtgggag

SEQ ID NO: 2298 - DNA, 4001 bp, Homo sapiens
cggggcaggggaaggagcccttccgcttccgcctccccttcttgcccctcgccttttcccagctcagctggatgcaggctcggcagaagttgtggccacaggtggtcatcacagggtctgtgaagtaatccagacagatggagcacgtagcttcctcctgcagttttctggcgagttccacagcctccatggctcctgggagacacgaggcaggttcccgcttgagggactctggagagagttggagggagcagcccgatgatctgggcgccggcagtgtgcaaccgtcctgtacagcctccctttacagaggagggctaggactgcagtccagttagagagtccagagtcatcatttttagccttgtcaacaacagacacagatgcctccccagaaactacacagaccctccctgaccaatgctctgcaggcccctccgcctctcctctccactgggcctggaccctacccgtccacttccgcctgctgctggctacccccagctccacatctcatcagctcctcctccccgacagaccgttgccggctaggccttcaacctgcctttctggagaagcctgctaggtcagcttagggagaagcccctacccttggagccttcccttaatcactttccatccactgaccccacccagatccccactccaactcccccatacatccccagctgtctttgctggcgcaactctcccattgcaagtagcctgactaaagagcctttcaaatgtcagaattttttctttaacaaaaccccgtacaccaaaggaagaagggatgggctatcagaggaaaaaagctctcttccattcggtagtgaggtggggttcagaaaaaacacgcgtgtgcatgtacgcacagacgaacacccatacacatacccatgtatgtatacaaacgtgcatgtgcacacacgcatacccacgcatacacaccacacaaatacaaacatgtacgcacagaaacactgatccacaaacacagcacacacaggcacagatgcacatatcggtaaacatacatgcatgtacacacaggtacacgcgcgcacacacgcacaggcacacaagcatgcacatagatgccccctgcaatctcaacactcgcgaccccacgcagtggagatctacagactttcgcctacgccacggggttgctatggggaccgagttgcagaaggagttgaaaatcgcgtctacactgcaagcacgattctccccttccgttctgccatcccctaaagcgagggcgtctaggggtctcagacttccccggctctgtcccacgtccagtttctcggagctttctgcacgccaaccacccggcgccagccctccgactccccccaagagccctaacggaggcacccagcccaccctgaccgaagccgggcagggacagcggcagcgggcctggggctctggctctggctgccgggatggctgtccttcccgctctggtccgctagggtcccggtagagttaccttgttgaagcgcgctagcccctccagggacgcggcggccggcggaggcgggaaggccgggcgttggagggcgaggaggaccgggttaggcttaggtcgtggcccaggcgccacaggagggtagcctaggcggcggggtgggggctactcaccgcggggaaggggggcccgcacagcgcctagtgcacctggccgagcgctcgctgccgggaaaggctgggtctgcccccacgaagcccaggaggctgcggcccggcccggggcgtggggacctggggtcgggaggcctagggactttgtggcgtcagcgggggctggggggcggcgggggaggggaatgctgggcgagggagtgttcggcggccgggactggggcggcgcctcttaggagaggttgggggtggcttggggaaggaaggcggcagggggtggaaggctctggacgagccggggacaggcgcagcgggtgctgactgggcggtggggaggatgtggtccacagcccagcgaagggaggagtcttgttggcctggggtgggacttttaggggaggttaagggagtgtggagggtggggagttggggggttacttgggggtggggagtggaatggggacagctggtggggctaggggcgggcaggcgagcgtcagggtggggggagtgggattggaagaggcttctcaacctggggttggggctgcgggagggcacgcgagccccaggctggagggttaggtgaggggctaagttggtcggggtaggggatggagaggagtttgtgtgggctggggtgggggcgaggcagcaggagcgagtgcctgttgagaagctatgaagggggtccccaggagcagccagtcagccgccaggtctgcccacatggttggcagtcagcatcaggctgagggtacagggaggggcgtcccaatcctgtgggcggaccagtttggagggaccacctggcaggtcaggtcccctagaaccaggcgggacggggtgggtcttgccgacaccccaggtggttttgttaccagaaacaggtcctgatccagaccccaagagagggttttggatcttgggcaagaaagaattcggggcaaatccatagagtaaagtgaaagcaagtttattaagaaagtaaaggaataaagagtggctactccatgggcagaccagcccccagggctacaggttgcccatttttatggctatttactgattatatgctaaataaggggtggggtattcatgagtttcccagaaaaggaagggcaattccagaaactgagggctcctccccttcttagaccatatagggtaactgtgaccttgtcttggcatctgtaaactgttgtggcactggtgagggtatctcatagcatgctaacgtattaaaattagcatataatgagcagtcatgataaccagaggttattctggtcgccatctaggttttggtgggattttgctggcctcttcaccacatactgtttcatcagcaaggtctttatgacgtgtatcttgtgccaacctcctatcccatcctgtgacttggaatgtctaacctctggggaatgcagcccagcaggtctcagaattattttacccagcctctatacaagatggagttgctctggtttaaaagtctcttacggtttcagccaaaatgccgcccccagccctgcccaggtcctgactggtggccatttctcctggccttgagtccccacgcctagtcatcacgcttcatcctccagtagagggatgcacctttcacatggagggttcatctcctgctttcaggaacaggagccagaggcctgcgtgccctgagtcagagtcctgggattggagagagaggacagatgaagaaactaaggcttggcccacacagggggtgcagacaggcaggaaaacagggccttgaaggctaagaggcaccattctgcaatctcctgggtgtgcgggtgtagacagctggccacaggcatagatggctggctttccctgggctcactcggtagagtgtttcttctgtggtctctcatcactcgcacacacaaaggggtctgtgtgctgtcaggtgcgggctggctgcgcacactggccgattaagtgaattacccttgtgaacccagaatatctgaggctagtttaagtcaattaggaagtttattttgccaaagttaaggacacacgcccatgacacagccatgtgcccaaggtggtccgagcacagcttggttttatacattttagggagacatgagacatcgatcaatatatgtaagatgaacattggttccatccagaaaggcgggacaactggaagtggggagggggcttccaggtcataggtagataagagacaaatgtttgcattcttttgagtttctgattagcctttccaaaagaggcaatcagatatacatttatctcagtgagcagagatatgactttgaatagaatgggacgcaggtttgctctaagcagtt

SEQ ID NO: 2299 - DNA, 4001 bp, Homo sapiens
tttatcctcttgatatgaaagccctccaggaacatccttcagtccacaatgtcgaggatacactctacaggatgaattccaagccctttagtgcagctccacaatcgcttacctacagtcccgaaattcaaaagctttgaaattttaatttttttcattggtttgcaacagaacccactgtgaatgctgggaggttatttatcgtctatcccattagcgtgacattcacgtgtttcaatgtagaaacattaacgtgtttgatagagttaactcagaccctgataaaagtctcacataacagaccttgccagaaaaaagaaaaatcccaaaatattctgaagtccttacacctggatcccaagagtttaagagactgtgaaacctttatcttttcagcccatcaatccaatctaatttccaccaatcaccctacacagtctttagttccagggatgtagaagggtgtcctgtgccctgaataccctccaacccagtgaggtactcattcttcaagaaacctgttcatggatttcctttcctgtgaaatttccctgacctttcctctattgtgccacaaccattgtactgaggactcacctccactgctgcaagttatatgtttctcctgttagactgtgaatgaagtcttcattgagtactttattcaatcctagcacagtgccccaacactaggggctcattaacggccaattagctaaaacaaattcatgcccagctttccctaactctcaatttccttcaaagttcatttctccttcatccccaaaccttaggattttccctaaccatgcagtccactttccgagtttctctttccccatgtcatcttacaattttcttccaggcgccttctctggaccccttgctctccaacatattctctccacctccatttaatccatagtcctcctctctcctatctgtgaacacgccaagtcccctccctccaaagcaatccatcttcactgcccttacctcttacctactccctcaacacctcgctggcccgggccctttcagccaaaacgcttcctcacaacgtgtttcccaaatcccccttctctcactgtacgggtctgccagctccagaaccagcgctcggccgggttccgcacatcacaaaccctccctcggagccagtgtcccctcccccagcctctcgcagccggcacccctcccttcatgctccccttatctcttgcggtccagcttctctggaaagtgtcccaggggcgagtctttcaccttagagacccctcgggatggcgcccgtccgagcagccccaggccccagcacctccgtccccagctcctctagggttgcgcaaatcccttgcggcccagatgccaggcagggcctccggctcaccttgctggatgtcgccgttgctgccccccgggatgggcacgctgagctggcgctccggctcgggcaggcagcgcaggcagaaggagtgaagacagggcagcagcttgggctccgcctcacgccggctctgcaagctctgctgacacacggcgcaggtgtccaggagcgaggctggcggtccaggaggcggccctgccgagggacccggagcgggagccgaggctggagctggagccggcgtcgatactgcgcccccggcaactccagtgcccactgaggccgcaggagatgaagcagcctgggccgagcccgaggaggccgcggccacccccccgtcgtcgggcccggccgcgccgccctcagcgccggccctgccgccttcctcctcctcctcctccaccagcaccgcggtgagaggcggctccgcctcctgcgcggcgggcccggcggccccggcagttaccggcgcgctgccgctgcccccgccgccgctctcagcctcgccgccgcctttgttttccgccatgttttcctctttgaacccgccggaccgccccgcgccgcccgccgcccgcgtcgccgccgccgccgcccccagccccagccgcagccgcagcaagagcggcagccgagagctagcgagagagcgaaccaacgagagcgcgcgcgcacgcggcgcccccgccctcgcgtcgcgcgtttgaaggagggcggttgcggcacgcgcacgtacgcacggacgtcctcccgagggaggcgggaactcggttcgcgggcgcggagcggtcccggaccctcgaagccagttccttgcgtcagtgccgcggctctttaacccgaagggagattttttttttaaagccagaggccgttgacgctgggtagcctttggctggggttggttatgaactccgacacagcggtggtgcatacggaagggtggtagccgggacggttccggtccctgcgagcgtgtcccgggcgtctccgcggaagtttcacctgccgcgccgctcgatcgccgggacctcctgggtctctgctgtgcgtagaccagccgcgttcctttgggtggccgtggagcactaaagcggggcttattgtttgtttggttttggtttttttttttgttttttttttgctttttgtttttgaactgaggatctatcagaaataggctgaaaagaccgagtgaggaagaaactctttaacagctatttttggcatcttaaggtgattctcaggagttgctacgtatcagaatcaacggaggagtttttcaaagcagagatgccagggccagtccccagacctgaatcaggaagtgagggagagagccgacggagggggaaaagtcccttcagctgattcttatgtatgtcagtttggagagccacggatataaccaatactgcgtccttctgaggtcccactttaagtgtcctgggttgagctgggtgacaaatgcccttacaacaatggtagtagaagctttcaggccaagcgcagtggctcacgcctgtaatcccagcactttgggaggccgaggcgggcagatcacttgaggtcaggtcaggagttcgtgggcagcctggccaatatggtgaaaccccgtctctactaaaaatataaaaattagccgggtgtaatggcgtgcgcctgtaatccgagctactcaggaggctgaggcaggagaatggcttgaacccggcaggaggcggaggctgcagtgagccgagatagcgccactacactccagcctgggcgacagagcgaaactccgtctcaaaaaaaaaagaaaagctttcagaaagttgcctttttatttgaaaaaaaaaaaaaggtatttggaggattttatgtagtgcaacaactgttttagtgttaagatcatgaaatgctttggtctcctgttagtgttcccaagaaaggtgctgtaagtccttaaaccacgtgaaaactttttttttttttgagacctcctcgttctgtcgccctggctggagtgcagtggcgtcatcacatttcattgcagcctcgacttcccaggctcaagccgtgctcctcgcaattacctgggaccgtagatgcacgccaccatgacttagctgatcttttttttccctttgcctcgaagaggctggggtctcaccatgttgcccaggctgaaactcctgggcccgagcgattggcccgcctcagccgctggaaatgctagcattacaggcatgagccactgcgcccagcctcctgaaaactttttaaaatttattcaaaaatgtttcctgacctctttattgtcatagtgttttagagatacactgggattacaaaacagaggagctccctgcattcaaggggtttacaatctaatagagaaaaagattgagaatagatacatgccagggagtggtaagtgctgtgaagaaaagaataagtggggtaaaaggggttagaggtgattgaagaaggcccctgttgatcagatgaaggaacctgtcttggagaagagcaggagaggaacacataacaagtgcaaagggcctgagggaaacggattcttggcttgttagaggaggagtcagtgtggctggagtggcttgaacaaggg

SEQ ID NO: 2300 - DNA, 4001 bp, Homo sapiens
ggcaccagaagagtggctgcagagaaaatagggttagctggtttggctggcagcaagacagtcgcagggactatcacataattacaagttaaaaatagagtgaagtctacaaacttgttctgttagtgtagccagaaaacaaatggaagtagaacccgaaacctattttaggctaatcctaaaactgtggtcattttatattctggtgtcctaggatggggtaaggtaagagtacgaagggacaaaagtgatccatctgacaaactattcaccaaatgccataaaacacatagtctgcaccccaattaacacctaccagcccacctcaccaagctccagagtaactctaaggtacacaaagcaaaagctgaggtccggccaatcatcatcacctattctaggagcacagcatgggttactggaatgtagtcaaaatgatctggatttaatactcagttctgttacacacttaccaactgtaggaccttggcaaatcacataatattgctgagcttgtttccccaattaataaatgggggcgaaaacagggcctgcttttctgtaagagttgcaagatcgaaggagatcaagaacaggatctatgctgttatattcattctcctgtttctccagcacccagtacaattattcactacacgaatgactgaaggaaactgtagctgcactttgtaaattgaaagggtttattgctattgctatattaggctatatattaggtactatattaggctaaccgggttaactgttgtactggagtatttgctattgcattgttatattgctctttgaccttccacggtatttgagaaggctttccttttcatctgctcaccgagggatttgtcttgacacctctttgtaatctgctcttaagctacacctgatggagtgtcccatctttacctatgagcctggcagcagaagtggcagaggttggctttgcaggtctgacacctcttctctacttccctgtcgttgcacaggtcacacaccaggccctggccttccccacgtaggctctccagcatcacatcattcacggccaggtggtctatggttaaagccttcactccacccatgggcaggtccacctgagcatcacatacaggacaaaggatgccgatctgcgactgcagacttcgtggcttgagttcctggaatattgacccctcagagcttgtgtcagagtctccccctcggatgtccactactgagaagggctccagctgctccagacacgtggtgcaaactgtatgcaaacaaggcaagagcctgggggctttgaaaagccccaagcacagggggcagtgagtcttgcctgagttcccaagtgcagtcccactagtgagtttgcttacaaagcccagcagcggttttctgttttctgacatactcctcacgtttgtgaccaatattagaaagggccctgggcagttctacgatttagtagcaggtgattaagcccacccaaagagaaagtctccagaacttgaacagagaccatggggactccctcgctgacaaataaaagggcagacgggaagacgaggcgtcctcgaaggaatcacccacagatctactcaggagggccccctcctttccactgcatcccacaccagacacgcccacgccctcctctgccccgcaagtcctccccggatgcgcttccaggtctagctctccagctagtcctgctgccaacaaagtcacccctgcacctctcgctccctccactgccacccccctcccgccgcccgccccactgcgcgccacacgcgacaagcgccgaccccacccgcgcacgatgaggtaggggccctcttgctccttccctctgcgaaaggcgcgcgccgggtgagggaattgcaagccgccggcgggcttctcggtgtccaccgcctctcccgcgcctcggcccgggacgcccgcgggctctggcccctcctcacaccaatcccagcccggtctactccggcgagtccaatcaccgtccgagagcggcggccctcgccgctccgggccccgccgccctccagagtgacgccactaagcatccaataagttttggaaattccacatcttcgccagtccactcacgcggggggcgggacctgacaaggccgtgggcggggcggccgaagggcttagagtgcggcgggaggaaaaggccaaggctcggagcgagcggcatagtgtagtcagcgtcaccgtttcacagggactgtccctctctctgtggtgaccagagaggcctcaggacctcttaaaaagccacgctgatttggcgccgggacggccttctttctgccctcggactcgtcccacgaacgcagactgggttctcccattggtggatggcactgtcagttggctctgcgctgggagtgggagacgtttttcgggctcccgaggtctcggccgctcgggggcgccagacgtttctcctccacgcgggtttgaggctgcgaggctcccctctgtcctcaggcgcttactgtagctcacaggtccctcaggcctagcgtgctgggtacaagcactcccgcggctccccgactttgggtatttttcgggggtgagggcatctcaggctcgcgttacggggaccggttcgggagaccgtggagccgaggtgtcgaatggagggcttacttcggccgggccagggagcgccaccctccttgtcgggctcgggaaggctttgttttccggtccggggggagtgcagatgacctaaggagttgaatgtcacccgggattccacagtcctgtgtaacagaaacgagctgagcgagttggacccgctgtttttatcagtcaatcacggagggctcctgcctggtcacagtgagacaatggacggtggcaatgagggacaagccctttgtgggcttaaaactaattgggaagatgaacacgtccgacccctttaactttataattacacggccaccttctctggccttaccaggcgtctcctgattctccaaaattccaaaaatggaaacagctgctcctttcccctccacctgttgttatctccagttgcgtcagcttgtctactgggccctcactgctttctttgttcatgaccttccctacttaatttgtacccagtgggcgactgtttcacttgattccttcattatctgtttcatgctataggcatagtgtctggagcctaagcttttaaaagtatggaatctgaaaaaaagttaaccccaaaatatgaaaaaaaaaaaaaaaaccattataaaatataaaaatgaaatgtttggccatttccaaaatataacacgccaatgagtcaaatgccacctttatataaaatgtgcaagtaatttccaaatgttaagcatatctccaaagatttttaaatagtccttacctagatttttttcagcctcttgtccttcttgcatctactctcaaaatcggcattcgcctctccagtaggctggaggaagtcacaaaaactgtgtggacttgggtttgctatatattcttgctttgaacttcacctttaccctccctgctgcttggctgtgctttacttcatctcttgttcatactgtatcacatttcttgtggtagtagtttcaagcttctcttgtttcagaagtacttcataatttacacgtgcaatatctcatttagcagtatctcatttaacctttaacaatattgtaaggaaatggcctcaaagaggtcttgccaggtcttggatggccagcccaagttaacatatctggaacttgaacacaaccttatgatgccatatctaagattatattcgggctacctctacctttccctttttttttttttctttttttgagattgagttttgctcttgttgcctaggccggaatgcaatggcaggatctcggcacactgcaacctccacctccagggttcaagcgattctcctgcctcagcctcccaggtagctggaattacaggcatgcaccaccacacct

SEQ ID NO: 2301 - DNA, 4001 bp, Homo sapiens
gctctcattagagcctgcgtaagcagtatctccaccccccagaaagacagacagatgcctctgaccagtgatggacttcttccatcttcctgatgaatagctcagcgttcccatccccaccctacaggccccagtcccacctgacttaagcagccggtccaggcggtctggcttggggagagttctgcgggagaggcgggggctgcgggtggaaggggtggaggcaggagaggtgggctcggagctggggtccccaccatgtcctatgtagccctgctggcccaagacctctcgggcacaggcctggcacacgttgtgggtacagggcagcaccagtggctgcttgtacatctcttgacacactgggcacagcagttccttctccatgttcttcatgctggtctgtggagggaccaggaggctaggtcagcgcttggacacttaggcatacctcagcagccccttggctgcccttggataccctaggggtctgaggaaggagcaagacaagctacctgcagcttttccagagcacctgccttgggctggttcacagaccttcccagacctctgtcccttgcttctctttccccgctgcagagctaaaggcccagaggagggacggttggagcttgtgcctgctccagcctcaagcccaatccccatttctccagctgcagtagccccagctggcagccccctcacctgcctccatcccccatctctgggcagcttgcccctggcatttttctcaaggacaccgcccattctgcagctccatgcagacccccactcccttctctagcagcacccccatgccgtgattcctcccgatagccaggcgaggttggcactccatcctgctcgctccatacgtcctcctgccgcagctccggcctgcggccactccagcctccattccccatccttcacttccccatcggtcttaccaacccattccccttcgcccccatcaggccctcccgccctctcccgcagcgcaacccggtcagcggcacccccttctccgaactagcgggggaatcaagagccccgcctactcgccccctccccaccggaagtcccctccccctcttggtggcgagagtgggggtcctcaggctatgccccacccccacacctcaccttggtccctctcttcgcagccatcccggtcaggggcgcagctgacacaaaggagggaggaacaaggagggggggaggaagtggtgggggggaacacggttggcaccgcccctgggagagccaggcacgggttgccatgacaaccgcaggctcggaagcagccctgagtgggggtgcgtggggtggggtcttggggaggggtccaaattgggaactgcactgtggggcggctcctacatcatcccccacctgtcctcagttttcttggaaaatatccaagctcacacgtccctcttctcataacagggcctttcccctgaagccccagccccggtgcactgctggaggccaccccagcccacccgctgcgtctgggctgctcctagctcctcctcacgctccagcacaccgacgccttcacggcactcacctccgggctgctcccgggattaccctctcatacctgcatcccgaccctcccagccgtttctgccatcgctagccccctgtctacatcccagcatcttcctggatccccacctgttccaggtcccagcttgccccagaaccctatacgccccctccccttccctcgaccccaccttaactcacactgatgcggaccagtgcgtccatgatggaagtgaaggtctgcatatcctcaccctctgccatggccctaccgtgcccgcccgcccctgggtgcccgatcccggctgcggctgcgaaccccgggcttaatgcaggagcccagtgggggtgtgaggagggctgggggttgaggtgtcactgcgcatgctcccgggaccagcctcgaacagcgcccgtcggggtagggggtgggaaatagttctccccacgtggttctcgaaagccggtcggggggttggggaatatggaaaggtatttgacgggggagccatttcttacattctcatttttcattggctcctaattttactcatataaagcgggggattagtttcggaggaaaatgagttcctggttgggagcactaaattttaggttgggagatgttgaggcatggggcagggaggtttgaggaacgtgcactagagatgaaagaaatggcaaagaagacagagatgggatagatgccacaggcatgggcccaatgacttaaagagataagtgcaccttgtacagagtggcagcagacgcaccaggtacgaggaaagcctgaggaccagggcggtggccgaggatgccccctcgacgcattatttcctccctgtcgcaagagggcgctgcgtccaggcactgagaggaagaaagaggagaacgcgaggagtagcaagtccgcggtaagcgctgacgcatgcgcatagctaaccgcacccggttcagctcgcctttcttggccagaggcgccggttggactcacgggcggggcatgatgggtaacaggaccggtggggtccccaggaagtcctagagggggtcggggtttgggtggacaagctttcctcgtcctctcccgacagagctgacgtgtcctgggttccaccgggagcgggcatttccaccggacgggagggttcggggtgtccggggctggggaatacgtaggggttgccgcgcggtgtggggagttggggcgtgtggctgcagtcccgggagttcttggagggggtcggcccaccgagcttccggaccggctgatctgcccgtagcttgccggagggagggcggagcctgactctccgtcccttctcccatcccctccagtggtgggtacgggcacctcgctggcgctctcctccctcctgtccctgctgctctttgctgggatgcagatgtacagccgtcagctggcctccaccgagtggctcaccatccagggcggcctgcttggttcgggtctcttcgtgttctcgctcactgtatcctccctgcagttggagggggcgggccacgtaggcatgtgcccttccccttccccacacagctctgtccccgttgcacaccctactccttaactccctcaaccaggccttcaataatctggagaatcttgtctttggcaaaggattccaagcaaagatcttccctgagagtaagtgaatattggagcttgagtatttgaactttctcctctttaacctcctgaaacatgatattgaatttccagatgcttaggtgaaaggttgttaaggagaaatatatttactgaagctgtctgaagacagatgacgcttttcgattctgcaccttgtatagctcctggagttggagctggaagagaaggcctttgaaagcaagaaactttggtaccttctggccagctcccagggaaggtttgaggggaacaggcaaatttgggctgatgttttgcatctattcgctgggaggcggtccttgttcccaccagaagaagcagcaggaccaagttcactatggagttctgatgtgaagttaactcaatattagagaattctacttatttgagggaattgtgaagagcctaaatactagaggcaccaaatatctatggcagcaggaatcctgaccaaatcagaataactgttagattatttcctgtttggaataattcttgttcaattgctcatgtaatcaagaattgatgattcagttatttatggagaattaagtttataaagcaaattaagtgtcaaggccagattacttaaggaatgccacgtgctcagaaattcacagcagatgcaatctcatgtaaaaccctcatgtggtaaaacaaagatctatcatggttgcccttaatcttttctcttttttttttttttttttttttgagacaaggctttactctgtcgcctaggctggagtgcagggatgtgatcactgaagccttg

SEQ ID NO: 2302 - DNA, 4001 bp, Homo sapiens
gtctccgggcggtgcccatttcaccagcattgcacctcccttcatctctctcattgggatatatggtaataacagtaataatgatgccaattaatctttgcctggtagttaataattaaccttgtccatcttgtttactgctgtatctccaacacctagaatagcaccatgcacataggtgctcaataaatatttgttcagtgagtgaatgcacacagaccttttcagtgtgcaggtaacactttttagtgaacaaacattatctcacaccatcctctcagcaaccctttaggtatggacattgcagggcagatactaccatccccctacagggatgtaaatgagatggaggcccaaagttgttgaatgatttgtccagtgactttgtgacagattacagagataggtgcttagcattggaaaacccttcccacttccttttggaaacccacaatgccaggcacccccacccacctgcagcagcatgtccctccctccccaggccttggaagggctggctcaccttgggtcggaaggagagggtaggcagggtgggctcatgctgggccttctgggtgccccaggggtggaagagcttgaagcactcattgcagaaggtggcgcggcactctgtgcagcccttggtggcctctagtggtgggggcttgcacaactggcacaggatggcacctcccacactcacactctggcggtaccgctccaccacacgctccagggtcaggttccggaaaagccctgccagaccccgctccccaagctccacatcaccttggcaggctgggcacgggaacatgatcacttgggggtgcaaagcacctcgcttcctcccagggtatgtcccaaagcctgtgggtgaaccagggaggtagaggacatgagagttacagctggctgggtgtggggaagcctgtttaattaaattagattttcattgtgccagagctcagctctcattagagcctgcgtaagcagtatctccaccccccagaaagacagacagatgcctctgaccagtgatggacttcttccatcttcctgatgaatagctcagcgttcccatccccaccctacaggccccagtcccacctgacttaagcagccggtccaggcggtctggcttggggagagttctgcgggagaggcgggggctgcgggtggaaggggtggaggcaggagaggtgggctcggagctggggtccccaccatgtcctatgtagccctgctggcccaagacctctcgggcacaggcctggcacacgttgtgggtacagggcagcaccagtggctgcttgtacatctcttgacacactgggcacagcagttccttctccatgttcttcatgctggtctgtggagggaccaggaggctaggtcagcgcttggacacttaggcatacctcagcagccccttggctgcccttggataccctaggggtctgaggaaggagcaagacaagctacctgcagcttttccagagcacctgccttgggctggttcacagaccttcccagacctctgtcccttgcttctctttccccgctgcagagctaaaggcccagaggagggacggttggagcttgtgcctgctccagcctcaagcccaatccccatttctccagctgcagtagccccagctggcagccccctcacctgcctccatcccccatctctgggcagcttgcccctggcatttttctcaaggacaccgcccattctgcagctccatgcagacccccactcccttctctagcagcacccccatgccgtgattcctcccgatagccaggcgaggttggcactccatcctgctcgctccatacgtcctcctgccgcagctccggcctgcggccactccagcctccattccccatccttcacttccccatcggtcttaccaacccattccccttcgcccccatcaggccctcccgccctctcccgcagcgcaacccggtcagcggcacccccttctccgaactagcgggggaatcaagagccccgcctactcgccccctccccaccggaagtcccctccccctcttggtggcgagagtgggggtcctcaggctatgccccacccccacacctcaccttggtccctctcttcgcagccatcccggtcaggggcgcagctgacacaaaggagggaggaacaaggagggggggaggaagtggtgggggggaacacggttggcaccgcccctgggagagccaggcacgggttgccatgacaaccgcaggctcggaagcagccctgagtgggggtgcgtggggtggggtcttggggaggggtccaaattgggaactgcactgtggggcggctcctacatcatcccccacctgtcctcagttttcttggaaaatatccaagctcacacgtccctcttctcataacagggcctttcccctgaagccccagccccggtgcactgctggaggccaccccagcccacccgctgcgtctgggctgctcctagctcctcctcacgctccagcacaccgacgccttcacggcactcacctccgggctgctcccgggattaccctctcatacctgcatcccgaccctcccagccgtttctgccatcgctagccccctgtctacatcccagcatcttcctggatccccacctgttccaggtcccagcttgccccagaaccctatacgccccctccccttccctcgaccccaccttaactcacactgatgcggaccagtgcgtccatgatggaagtgaaggtctgcatatcctcaccctctgccatggccctaccgtgcccgcccgcccctgggtgcccgatcccggctgcggctgcgaaccccgggcttaatgcaggagcccagtgggggtgtgaggagggctgggggttgaggtgtcactgcgcatgctcccgggaccagcctcgaacagcgcccgtcggggtagggggtgggaaatagttctccccacgtggttctcgaaagccggtcggggggttggggaatatggaaaggtatttgacgggggagccatttcttacattctcatttttcattggctcctaattttactcatataaagcgggggattagtttcggaggaaaatgagttcctggttgggagcactaaattttaggttgggagatgttgaggcatggggcagggaggtttgaggaacgtgcactagagatgaaagaaatggcaaagaagacagagatgggatagatgccacaggcatgggcccaatgacttaaagagataagtgcaccttgtacagagtggcagcagacgcaccaggtacgaggaaagcctgaggaccagggcggtggccgaggatgccccctcgacgcattatttcctccctgtcgcaagagggcgctgcgtccaggcactgagaggaagaaagaggagaacgcgaggagtagcaagtccgcggtaagcgctgacgcatgcgcatagctaaccgcacccggttcagctcgcctttcttggccagaggcgccggttggactcacgggcggggcatgatgggtaacaggaccggtggggtccccaggaagtcctagagggggtcggggtttgggtggacaagctttcctcgtcctctcccgacagagctgacgtgtcctgggttccaccgggagcgggcatttccaccggacgggagggttcggggtgtccggggctggggaatacgtaggggttgccgcgcggtgtggggagttggggcgtgtggctgcagtcccgggagttcttggagggggtcggcccaccgagcttccggaccggctgatctgcccgtagcttgccggagggagggcggagcctgactctccgtcccttctcccatcccctccagtggtgggtacgggcacctcgctggcgctctcctccctcctgtccctgctgctctttgctgggatgcagatgtacagccgtcagctggcctccaccgagtggctcaccatccagggcggcctgcttggttcgggtctctt

SEQ ID NO: 2303 - DNA, 4001 bp, Homo sapiens
gttaagacaagagagctatggaaacataacttagggccctagaaagctttcactgagaggctcaggagtttagataatatttatttggtatttaaccgaagaactactgaaaatatggagaacacctttagaaatattacactagaggctgggctgcctgtaacaccagcactttgggaggccacggcggatggatcacaaggtcaggagttcaagaccagcctggccaacacagtgaaaccccgtctctactaaaaatacaaaaattagccgggtgtggtgacgcatacctgtaatcccagctacccgggaggctgaggcaggagaattgcttgcaccaggacccgggagacggaggttgcaatgagccgagattgcgccactgccctccagcctgagctacagaactagactccgtctcaaaaaaaaaaaaaaaaaaaaaaaaaagttactaccaatcctctttctggactttttttaaaaaggcaagaacattccagaaaagtttagctagaaattacctagtactagtacctacatctcgcaaatgacaacgaaaatcaagaagaaataccaagagagatattggtagagaaggaaggggaaaatatcctaaaccttaatttaaaacaaacaaaataaataaataaaaattttaagaaagtatttgcaatgcactacagcgcgactgacagtcctttggttaaatctgtcagtaaagacgacttagacctcctctgtgctggcagttgttctacatgctgggattcaagtgtgttcagaaaacatccaagaacttttgaagggcaccagtaggaagaaatcgacacacaatttcacagatgccactctggggaccaaatactcccattttgtttttcttctttctctttgaagcttcccgggctacaccccaaatgaagcacctcttcattgaggatgttcgaatcctaagtccccaaatccctgctgatggagagccacccgctcctacttcaggaggcacgtgcacctgagctttggaggggtcggaacccgtacccagctcgacactcttcttaacaacgcccaaacccgagggttgctttgctgacaacactcatttaatgtaaacactgtgcaaaagcaaagcattgcacaaatgagaattattatggcaagtttacgatatagacgtacaattgttaccaagaatgaactggaccacacagccctcccgaccagagcccagctgagggaccagactatccgcatcgggagaaaccagcccagcgcgagttcgacgacaggagagtgcttgggggaggggcggacggtgtaaaataatgggtgtgtgtcgcaaagggggttaccacagccaaggcaaagagacccacactgagtgagccgcgtgggcgggggggacggcgcgcggtggggggagcggccgtgggagccgctcaggagacgggtggcctcggcggctccgctccggactgtcgcccgcttcccggtcaccgcagcgcccgcagcccccgccggggggcgcctcacctggtagctgccggcggcctcctgcagcggcgccgtgcggtgcgtcctgtgctcggggccggcgtcgcacacccagcacagcgccgcctcgtcctcctcgcagaagcggctcaggtcctcgccgtgccgcgcgcatcgccgcgccccgggccccgcgcccaaccccagccgccgcacgctctccaccaggcccgccagctgccggttggggcgaaagcccgagggccggaaggggccccggcactgcggacaggcgtagacgccgccctgcgcgccgtccgacttctcgcagaactcggagatgcacctgaggcagaagctgtggccgcagtccacgctgaccggctcctgcaggaaatccaggcacaccgggcaccgcgcatcctcgcgcagccgctccccgggcggcgcccaggccatgacccgcctcccggagggctgcgctcccggccgcccgcaccgtctcccctcgcggtctgcacagggggaggagcccacgccccaggaaagcaggcgccgacgggtggtgtccgctggcttcagttcaagagctcagacgagccacacccggtgaaaagccaccactcaggcgctccctatgtcggggataaaattaacgttgtggttccccgcccccgtcacacacacacccaggaaactgggcatttctaactggaatccctcctcatatgctattttcactggcagtagatctggagaattgctaaattccctccttccttccatctttgtttgtttgtttttgtttttgtttttttgagagggagtctcgctctgtcgcccaggctggagtgcggtggcgcgatctcggctcactgcagcctccgcctcccgggttcaagcgattctcctgcctcagcctcgcaagcagcagggattacaggcgcccgccaccatgcccggctaatttttgtatttttagtagagacggggtttcaccattttggtcagcctggtcttgaactcgtgacctcaggtgatctgcccgcctcgacctcccagagtgctgggattacaggcgcgagccaccgcgcccagcctccatcatcattatatagatttagtgcagatttctggggtaccagtgcagttttgttacatggagacactgcataaagtctaggctttagcgcaggcatcgctgtgatagcgtaaattgttctcattaggtgatctctcatccctcgcccgccttccaccctccgagccccttccattgttactgagctactccatggtcctctcatgccataatcgtttcttaaaaggctttccccctttatatggcataatcaatttttaaatgtttttttcaaacttcatttttttctcttgcactaattacctcttgataaagaaatgagacaccgcctgacacgggaagatgcctgcataggtgtgtgtaactataggtttacagcccagccaaaaataattctaaatatttaaataaatatctggcctagttcaatgaggatcctacaaggaatacacacatgttgtaggattgttgcaaagccagtcttggagatgacaaagctatagagatactcatcagaggaataattcaagcttagcctctcagtggtgtacctgtcagatgggggaggctgagacaggagcaaaatgatttgacagagtatgttacttcatccagtggaaggctgaatcaggataaagtacattaaagtctctaatgtcgtccagaaagtcgacaagtctgaggcagtgtctgcatctgtgcaaaataactttagtatggtcgagtttgaagtgatggtggggtgtacctgtggcaaatcaatctgtccctgagcacacattgtgtctgtttgtagccaggagtctcagacattgcaccgggtactgaaaatacacatgttaaggaaaagaggtgggaccccatttctccaggagccttaagatcaactagaagaggtggatatgaaatcatgcaaacatataattacaaaccaataactgcaaggaaggtcgctcaccagtcctgcaggaatataacagaggactctgaatgaggctgcagggtcgggggcagacacctgaggtctctgagcaaacctctgataggtgaacacaagctggccagcgggaaggggggctccgcaaggccgtgcccccagaagccatgaaaggtacaaggtaaacttcagcaggtgggagcaagacatacccagatgacagtgagaagccaggcaggctggcaagctgggccagaatatggtggcagcagataaggctgcagcaagaggcggggccagatgactcaggtccttggggatcctctggggtttgtgggtcttcattataaggacaaactcttgggctggatctctggcgacaggcagagcagaggatcttgaggcctaaaggttaagtgcgcaattaaagcgaatagattcttggagaacacacatggatctgtatta

SEQ ID NO: 2304 - DNA, 4001 bp, Homo sapiens
gttgagtaggagtttgtcagtgaagacaggaagtcttaagggagaccgattagagttctatgccaactatgctcaggtcactctgcatgtaccgtttcacttagtcttcaaaagtcctgatgtgggggacagagccaaagaggtcatcaaaaacctctagagactcctagaggtctagcccctcccttcttgaatcaccttacatctgggccttattctccaaatctttacctttaagtcctggccccactcaacctggcctctactctggcttaaatctaaacttgttgtagagtatccggacctgatctcagtcttaacccctcatacaccttggcctaaccctcggtactcaaacctgccctctcagcactttggcaccctaacttataccactctattaggtttcaccctcacctgtccagcacattctagcccccgtactcctcttagtcctgatgcacatctgatccggtctccgcccccacagaacccccagcctgccagagctcagctacccggtttaatacagacccatcctcgcgacctcgccctcagtctgacagtggccctgcctttgcccaactctgattccggttcgtccacaaccctgccccagcccagtatctggtccagttctgatctcacttgtttccgccatcccatccgcatccccgacttctccctaaccgcggaccagccggtactccaggtctgtctcagatccctcagggtccggactgcccaaggccccgcccccacggccccgccatgcggcggccccgcccctccctgccccgcgttactcctgatagggccctgaccttgctggcggccccgccccaggaccattctgactgggcctggcccgcggtccagccctgaccccaccccccgcccggccccacctccagcccggccccgccccttccccaggcaggccgggtagcgcacctgcagctcgtcgaaggcgtcgtcgatgccggtgacctgatgctgctcgtgcagtgcaggctcgtcgcagaagaagcagagaagcgcgcggtccgtgaggcagaagagcttgaccttgtcgtgcgcctggcagggtcgcgcggcgcggcgcgcgttgaggatggcgtccagcgggaaggagctgtagcgctccacgatgttggccagcttgaggctgggcgccagcgcgggctcggcgaacgtgcgccggcactcggggcagtcgcgggcgccctgcgcctcctgccgcacccagtgctccgtgatgcagcggcggcagaagtaatgctcgcagcccaggctcaccgggtcctggtagatgctcaggcagatggagcacagcagctcgtccttgaggctgcacgccatggcgccaggggcagcagagaggggggcccgaggggcaggggggcggctgagagagcgcggcgctgtcggaggcagcaccgagggctgggcgcggggacgaggcccgcacaggcaggggtaggagctaccggagaagggagggggtgctgtccggaaggagggtaacgcgaggaaggggtgcgcggctgagactccgtgggacgccagcccgggagggcagtctagaggtagtgggcagctcaaggcgatgggcgctgggaggaggctgtgagcggctgagggacggagatcctgacggggaggttctagggggcggggcagtcctaagggataggagctgggagaaggggatcccggagcggggtggagcccttaagggggtcgaaatcccggggtgggggcggtgcggggagggcgagaagctggggatggggaatcctgggggagggggcagccaggccgagccgtacattggctgtgaccggcagagaagaggaggggtgccggcccgctcagctgccggatcccggccccaaaccctggcccagcgcgaccccttacccccgcgagcttagcagccaccgcttcggtccagcgcagcctctcaacccggaaccagccgaatccgagctgccggtggccgcggctgcctccccgcccccgtgggcgggacccaagcaactccgcccccgcagcgggcgggggaggggcggggccaccagccggttgaccccgccccacccccaccatcctccagctcccagggaagcgaagcccagctgttccttcggggtgtgtacttggaactgcatccaggtctcgcttagggtccccgcggcgaggcggagcagctaatttgagagcacaacaaataaacaaggagcatctttctggatcatcgatttgaagatgtagaaaaaatcatattttgtattaaaacgaacaagaatatatttggaatacaacttctgcataaaatataaagataaaactcttgaaatgccctgcttgcttagagcgagttcaaggccctcacactcctaagccctggggtcccatttcctcttcactttcttaaggagtgcttggggagaagtttggaaagccctggctaacatctggccccggaggctgcctccattggcaaacaattctggagtgctgtatttgtgtgtgtgtgtgtgtgtgtgtgtgtgtgtgtgtaaggcggtgaggggtggagcaggagagagggagaaaaagtaataggagaacttgtcttgtgtgccagatggagaggggataagggatttctaggcagaggagacagcctgtgcaaaagcatagaggcgtgaaaggggagggcgcagtgaaggaagtgctagtaattctgtactgttgggggtggggtggagaaggagcctgggtgggctggagggcattgtgggtcatggtaaagaatttcttgaaggcatggggctttcaggcaagggaatgacctggtccgattgggtttcaggaagtcttggagataatcattataccatctgcaaggtgaagaagacagggagcttttccaatgtgtctgcggatgcacagcactcagcacacagtaaaggtgtgtagctgaataaccgcatcaacgccctgggttgcaggaggaaggaaagactgggcacccctaaggtgctgttgtcatcgtgcctgcaggaggtgagacccgaactggggcctcagcagtgggtaaggagagaagactagggtattgcaagtacagacacggtgacatttggtgatggttggatacgggggtgagggaaatgagccatagagggtggctaccagtttctgcctcctccagaaatatcttcattggtgttaaactttattgaggtacagtttatgaaaaagctctcagtttagttctctatggttaacactttctccatcacaccctcatctggcccagaatctccatcattgcgagaaaaatagttggttgctcatgcaacagcagtttctcaacattttcttatgggcagagccctgattttggtcaggtggcccccttccccaagtgacccaaggaaggctgaccccagcccatttccaggagtgagtcttgtttggtccaagtccattatggtggtctcatggagtgagtcttgtttggtccaagtccattatggtggtctcattcctcttgccagtgacggtttgggcaggtccagcctgaaaaactaaaggggaagcctatggcagagaggggttttcaggaaatggtctctttactttgcaaaacagtctgccccctttgctgggatatgtttggtggcaatgcttggaattgcaacagccatcttgctcccagtctgaggatgcagcaaatacagaagggagggcaaggccaagagagtcctagggaagagaagcttttattctgatgcagagtctggacttcaggatatgtgagatggtccatcttattgcataagccagtttaacagtagtgcattgtcactttgcaacccagagaatcccaactgatatactgacgtgcacccctaatgagggggtggggaaagtgaacagggcagagtctaaattattgaagcatttgaaatgaaatgaaaaaaaaaaaggcttgatgatggatgaaa

SEQ ID NO: 2305 - DNA, 4001 bp, Homo sapiens
cacaacctccaccactcacacattctgcctatgaatgagctgctattttattagcaggaagactcagagctagattgactgggtcaactcccagctctttcacttcccagctgggaaaccttagctaattgatttcacttcttgagcctcagtttcctcatctgtgaaatgaggataataaagtcatgcctgattcacagagttattgggaggtacttagatgaagcattcccagtgcctgacgctgttcctcatggcacacgggagagtagctgttgctatccttatagacaacctggctgtttctcaccgggcattttctctgctgaccagagccacttagctggccccagggcctttctctccctctcacatctcatctttcccccagtctctgtcttggtattgcctggaagggcagcctaatgtctgggccccttcccatccgctgagcaatcctgagagctgggttggggtgtatgggtctccagtcctgtctctgaatggcttgtgtagctagtccagctagaggcctggatcctgagcagatgaaggagggggaaggagcgtgggggatctaggcacagcatggctgggaaggagggcgggcccccagcaggcacgagaaccgacctggagcactcctgtttgtagatgtcgatgatgttctccaccagcaggttcctctgcaggccgtacactccgtgacgatccatgatcacctcgtggcggcaggtggggcagcggaaacggcctccagacatggacactgagctgccccggctggtccagtagggatttgcagcctgcaggtggcaaaggtcaaggtgaggcctgggctccctacttagcccttctcttttctaatctcctcttatcctttcctctgcctatccgaaccacccccgtcaaacctaacaacctggagctctgcagactgtgatgagaaccagtcctcacacacagagcacctgagaagcagctaagcaatcgtcaggatggggaggcaggagacctgggttcaagtcatgtttattctctgagtgattttgggcaagcaaccttatctgtgtaggcctcagtttgcccacttatgaaataggtattacaatgagagcaagctcctaaggctgctactttaaagataatatcgtgaaagaacattttgtaaagtgtccatggggaacctcgcatcctgcctcccagccaggacatctacccccttcctttctcggggagttggagccccttctgcccccatatcatagggaacagcctcaaaagggaagatgcctctactgcccactgcctccctgacaccctcctcccaaagctctgggcctcttgccaccaggacctggctccagccccaggggtctggtttctctctcctgtccctgcctaccccgcttatcacttgaggcatttgactcttgattggagagtcaacagcagtgctcagggcaggggtgggggagctgtgggcagggcagggaggggaaacttgtgttatggagaagaaccgcagcagccagagccgcctcccagccccctctcagccctgtccagaggcctctgcaggggttcacttccaaggggaaagaggctgtccaggttggaagtctaagggagaagggtttcatcacagggaagccaagtagccacctggggaccccaaatgaagctgcacccggcacttacctggaagatgtcattggcacacttccggcacaggttgtgctggcacggcaagatgaccactggcttggtaaacatctccaggcagatagggcagatcagctgcttctccaagttctccatgggattcccatcctggatcaggctcgacttataatccattctgtgggaaggaatgagagccacgcctagctgcctcctctactaactttgctctaagtagacctgggggtcttgcctttgtcacaaaacaccgggtcggatcctgttggcttccttctcctggtgcccgaattctgtcttggtctgaggcccctctgatatttatagctagatcttggtcacatgagccccaggaggggaccagctgagcattccgatgccaagcggctggtggggcttgagtttcctccaggcctgaaagactggccctctcaaatcacatgcagggatgagcaatcactattctgctgggacgggggtcataaacaagaacagcctgttcagaggcaggcttagggcaagactgggtacccagagcttcctccagaaattggtctccccccggcaccaggctagtgggtcagggatgggacccagcaagtgagccacggggattcaaggggttaatagccaatgctatgatgaaaatgttcgatgaatgaattttattcattcatcagacatttttctgagtactagtatatacatcaggcaactagtatacatcacaacgtgacagatggatgagtgatctgtttccctgccccgagaaactcacagcccaggaagggagatagaaaggattgtgcagtggcacgatctctgctcactgcaacctccacctcccaggttgaagggagtctcctccttcagcctcccaacctcaaccccctcccagccccacgcaacccctcactgacctaaatcaattccatcccctcctctggagtcctgggcagctcctagatggaagggtcgggcagcccctctctctgagcccatccctctgcctcagacttcagcacagcattttgctggagatgatggagacccccactccaaccagcccatcctccatccctcggccacttatttcacttagtgctgaaaagcctcctttgaaacacagtccagtcccctcatcttacagattttgaaatgggactagagaagaaaaggattatattcaaagtcagttggaaagtaagtggcagccgggcgtggtgtctcacacctgtaatcccagcactttggaaggctgaggcaggtggatcacttgaggtcaggagttcgagactagcctggccaacatggtaaaaccctgtctctactaaaaacacaaaacttagctgggtgtggtggtacgcgcctgtaatcccagctactcaggaggctgaagcaggagaatcacttgaacccaggaggtggaggttgcagtgagctgagatcgcgccactgcactccagcctgggtgacaagagtgaaacgccatctccaaacaaaacaaaacaaaacaaaaaagaaagaaaataagtggcaaagacagaaattttattcattcatcagacatttttctgagtactagtatacatcaggtaactagtatacatcacaacgtgacagatggatgagtgatctgtttccctgccccaagaaactcacagcccaggaagggagatagaaaggaaaaacccagagggcacagtgactcacgcctgtaaacccagcactttaggaggtcgaggtgggcagaccacgaggtcaggagatggagaccatcctggccaacatggtgaaaccctgtctctactaaaaatacaaaaattagctgggtatgatggcaggtgcctataatcccagctactcagtaggctgaggcaggagaatcgtttgaacccaggaagaggaggttgcggtgagtcgagattgcaccaccgcactccagcccggtgatagagtgagactctgtctccaaaaaaaaaaaaaaaagaaaaagaaaaaagaaagaaagaaagggaaacccctcatgcggtgccacaaagccctgcctggacacttagaaggcgtccctcagctcgctgcacacattttaacttttctccatgtattttaggacatcttccacgttggcaagtagaagtcattagagcagttccagtggctggtttttttttttttttttcccgagatgtagtttcactgtgttgcccagaggctggagtgcagtggcgccatctcagctcactgcaacctccgcctcccaggttgaagtgaatctcctgcctcagcctcctgagtag

SEQ ID NO: 2306 - DNA, 4001 bp, Homo sapiens
aaaatgttaaattataataacaacgtatgctcattatagcagataatactatagagtaactatatatgaacaacaaatctatataggaatggttagtctcttagtctcttcctctcatctgtgctcacctttttgcttatttccagttggatagccttggccaattactttattttcctcctcaattcaaatatatatttctggctgggctgtgtggagacctcttgcctctgcggtgactgtttactggtaagactacaaggaataattggtgtctgaagttccagaggcggttaggggtccttcccacaagattctaactctgccaggcctagttcattgacctctggggaagtgagtccaattgctcatctttggcatttggatgggaaatttaggtgaatgttagaaaaaccaactctagtcttgacttggggtctgatcaaggacctaaccagattttgatggctcctctctttctcgcagtatcagatacaaggacacattgccagccataagttgctgagggtggcagaggggaaaaggagatcctgcatgccttaactcaaaagggaccatcaaggtaacttattagtcagacgttgggagtaaaagagccctgtgtctgcgttttgggtgccctgtgcctacataaatcctaaaacctcgggtgggtggggacctaataagtcatctttccatacccttcccatctccagcatccagtccaaagtaccgggagtcccttacctgtttgtcaaatgactatctgatggaatgaatggctaatgagtgaggtaattcctgcctgaccctctgaccgactttctgtcagctctccaagggagaggccaaaagcctttctcctcgtaccctcttccctggcacctgcactcccgcgtcccgcgggctcaccttgtgctgcttccacatggcccccagcggcttcacctcgtgcttggcgtgccggccctcctccaggcacagataacacaccggggttcgacagctcacgcagtacatgctgtagttctccatttcatgctcgggacacgtggggaacttgcgggccgtgctgcccccagtcgcccccgcccccgcgcctcccgggctcttgcagccgccgcctccgctgggggcgccctgggcggtgccagtgggcccggaggctgcctcggcgggcggcggcggcggcggcggcggctgcaccaggcgatgcttggcgaagggtccccgggatggatggcacttgagctggcaggcagagcagtagaggacgtcgcactgctcgcagagcgtggctgctggctctggcggggtgcggtcgcacagctggcagatggccaccgccgcggctgcagacgtccccggcacggccccgcggccctgctggtaccgctgcacgatggcctcgagcagccggttgcgctggaagccgcgcaggccgcggtggtccagggatgcgctgcggtggcactgcgggcacgtgatggagctcgaagacgaggacagcgaggagcaggcggcaccccgagccgccgcagccgaggagccgggtggtgcgggcaccatgggcagcacgcgaaccccgttgggggacttgaggctcggggtgtaggacccgtagccgctgtctgtctcgctgtacaagctgagcttgtccgcgtggtctccgccacctcccgcaccgccgccgaggccgccagctgcactcccgcctgcaccgccgcaggccgggccagccgcagcgtcgtgctccagagaggcagcggcggcggcgcccgcctgcagccccgatccccgggaaagcaggagcggctggggcaggtgctgctcaccgtccggggtctgcaccgcgatggtgcgagcgcaaggcaggcagacattgtgggaacagggcaggatgataggctcccgaaacagagagccgcacacgggacacttcagctcttcctccatcgcggcgccggctgccagcgctgctctgcgctggggatgaatggccggagctcgggagactggcggaggaggaccagcgcggtgcgccccggtgagacgacgggcgggggcatcacacgggcatgcccacttcacagccgaggggcacgcccctctctctgtcctgtagccaccgccctaagatgattgaggggcgagagaagggagggggtcctcacctcctgcccgagggtcccgcaccagcggcttcaacctgcggccagattccggagccggtcggctgccctcgcggtggcctgcgaggagctttaggtgatgaatcagcaccagcgccgccgccggctgcagcgcgcgcctcctctccaccccaggaccagcggccgggctgctgtgcgctcgctgcttcagcccctggctccggtgggcggctaccccgaggccccccttctgccccggcccaactccttatcggggtgatagcgaggtgagacaggcaggtgcgaaggccgctcagccgtggggctgggatcagcaccacgaggcggcggacagcgcccgggagccgaaggtggggctccagctgcctgctcgccgacccctgggccgccacccgccgggtcgctggggccgcggccacctcggcgggacccgaccggcccggagacagccgctcaccctactcctgggcggctgtggacgccggctgactgcgccctggggctttctccctgcggccgggattgacccgcttccctggttcccagctgctgctcctgcggcgcctctgaccttgggccgcgcgacgctgcagccggcgggcggagggcgagcgtccggctggctcgggaatcccctccccgcctccctcccgccgctgccgctgcctccccgcgcggcgcgccgaggagttgtaatttccagagcagagagtaatggggaggaggggggaggaggcttcagctcagcgaataagggctcgcctcttgctgctagggaatcaaggggcaattttaagggttttgcagggaggatcattgttaataacaatccattatttggatggagattgtatcttgaatcagtacaacgacctgccccgccccgcccctgccatcgtctccctgggccactccagttccacaccccacccccaacccaccgccatagaagggtgaaaacgggatcctaaaaagccagtcgtttagaaatggataggcaacatggcctgacagtcgcttcctaaaactacgataaagcaaaaaaatccaagtcccaaaatgtcgggcagcctgaagtccaagggtgaggttttatttatgaattgaaccacaagccattttgtctcttcctttcaaccaagggtgctcatccgcgctccaggtcaactgtgtgcacggactgagagaggacacgcggtgccgctcacaaaatggggtttcctgagaaaggcgagagcgcgcccgggtagacccctgggaacccagcgcccccagacccagccctaccccgctgcggatgtggcggtgtgcggcggacgggaaggcggcaagcggagacgttccttttatgaatgggaaaatctccacattctccaacgccagccacgagctgcgggaacagcctcccacccgcggccccggctgtttggtctgctcggctgttcttccccgctgctgccgagggaaggctgggtgggggaggcagaggtgggtggggacgagcagaagaaagtgctggcagcgcagccggctctgcctacagaagtttcacgctggcatgaaacagatacaaattaggaaatcgtttatttaacaacgatatgaatattgaagtcatgcctccctccgtcccaggttctcccgtgctccaaacaaagactaaagaccggagtcgtagcgccaggcgcgggcccaggcttctgctagtccccgggtgaggaggcgcaggctggcggggtcaggcagggggaagctgcagcctgcgcccagggcttggggctctgtgcctaggggacaggaacccctgcagggggacccttgggg

SEQ ID NO: 2307 - DNA, 4001 bp, Homo sapiens
acacactatggccatttcaccttctaaatcttcatcttcattcatgttccttttttttttttaagactagtcatgtacagtagtgagaaagggccaaagagtagaaaagggagttccatctgtaactgactgtgaacaatcaactgagacaactcaatacctttggaccagcttcatgttctttcctttaataagctttttcttctttcttacctatccaaacttgacctatttttcaagccctttttcagagagctttccatactaagccagccttcgataatttctcctgtctcagaaattctataatacttgtcataaaatctagcatctgtagtctctctcctcccatcatcttgcaaatccattaatatctctgtccaaacatttattagctctgccttgttttatgttcagctggactaaaactcaagggcagaaattatgattttgtctctccagtagggcctcgcagaagatagcagctgctgtatttttagctcttattatgtgccatatattgtattaagtactgcacatactttatctcatttaatcatcacaataatgttgtgttattgatattattcttcctactttacagaagaagaaacaaaggcatgaagaggttaggctatagctgcatatcttggaaaagacagctgggatttgaggtaaattgtcttctgaagctggcacaaagtagactgcaaacaaattattttttgaattatccgatcgtttcatgtgtgctgatggtcttgtcatgccacataaactaatgaaagcagaaactatgcccactggcttctgggtgagttggggaaaggaactgcccttctttgctgagtactcatcaggtgctatgttcagtgccaggcatttcatgttcaacatctcatttactctgtgaagactcataactgtaaattctcctcaacaaatagctgctgtagttcctccatcagagatttacccaaaatgtcacccactacccactcttaatggagcaaaatgctcccagatgtgatgtacaccccttctgggcctcccagttcgaagaagaggacaaagccccttcaactttaaatcagccattatgatttaaaacctctacttaaaaaagcatttaccacaagtctggccttattccggacagggcactctgttcttcgttctaacgctcatgatcccatttattaagcactataaccttgtgcggtaggtgacattttcctcacttcacagatatataaaataacgtccaaataaacgacattgttgatccgaagtcacatggccaatggcagattcaggactagaatccaggtctcctgactgtcaaccctattccactcccccagcagacaccataggtggtatccaatttatcctgatctcgctgggttagggttagagttacaacaaaagctctggaataatttttattcaaaagatatttactggatacctatctgtcgaccttgtaggttcaaataccatgtcttccacttattcgctatgtgacatggaaaaaatcgtttcacctccctaagccccaattcctttctccataaaaggagataatagtatctaccaaatagtaacgtcgtgagaagttgatgagacgatgataagggaaacatctggcactgtgtctggcatgcggcgggtgcttagtaagtatgggctccctttacctaccccctccgcccctacaagcctcggggttcaccctttaagacctttgccacagggtgtccacgcggcctccggggtccccaggcgcccgggccagccgcactgccatacctgcatggagtcagcgctgacgatctcaccgccgagccgctggcctagctgcaacgccagcgtggatttgccggtgcccgtggccccgagaatcactacaagaggtagggtccgttgcaggcccctgagcccactgcccacgggaactgctcgtgcagccgccacggacgccatcttatggcagtctgcgcttgcgccggagcagctgtccccatggcaaccgtctatgcgcctgcgcggatctcaggctttgtagcgaggttgcttagggaggagggagcggcaggacccaggcgacgtgactgcagtcaactaactggtgtcagaacctcaactacccgccgtctttttttttttttcttcttatttggagacggggtctccctctgtcgcccgggctggagtgcagtggcgcgatcttggctcactgcaacctccgccttctgggttcaagagattctcctgcctcagcctcccgagtagctgggactacaggcgcccaccaccatgcccggctaattttttgtattttagtagacacgaggtttcaccatgttgcccagggtggtctcgaactcctgagctcaggcagtccacccgcctcggcctcccaaagtgctgggattacaggcatgcgccactgcgccagaccacctgccgtcttaaatggtagatggcaaccctatctaaatagatccgtccctattattctttcacagcactcaagttatttttctttacagtacttattacaatataaaattataaataggtctcttgtttttttgtctgacttattgggacaaattctgcctagatcattgctgtatctccagtgtctagcacagtacctggtacccaagagacacccaatacttgttcaatgaagaggagaatgacctgccggtctagtgcccggggcagtaagctcagaggtgtggcattctccagaatgaggtctgcccagttctcaggccagggcagctgctctaatattttcatcccatagtacgacctcatactcaatcacaaagcaaacctttggcccggcacagtggctcacgcttgtaatcccagcatattgggaggccaaggctggtggatcacctgaggttaggtgttcaagaccagcctgactaacatggtaaaaccccgtctctactaaaaatacaaaaattagccgggcgtggtggcgcattcctttaatcccagctacttgggaggctgaggcatgggaaccggggaaacggaggttgcagtgagccgagatcgcgccattgcactccaaacctgggcaacaagagcggaactccgtcccaaacaaaacaaaacaaaacaaaaaaacagaaggcaaaccttttcatctccttggccaaagaatgcaacatgtggagtgagaacagagaaaaacaagcaagtaaactacaatccgcaaaataggaaagggaaaaggaacgcaggtagaaaggattaaagttggccgggagccgtggctcacgcctgtaaacccagcaatttgagaggctgaggcgggtggatcacctgaggtcaggagttcgagaccagcctgaccaacatggtgaaaacccgtctttactaaaaatataaaattaactgggcatggtggtgcacacctgtaatcccagctacttgggaggctaagacaggagaatcacttgaaccgggaggcgtaagttgcggtgagccaagatcatgccattgcactccagcctgggcaacaagagctaaattccttcttaaataaataaatagccaggcgcggtggctcacacctgtaatcccagcactttggaaggccaaggcatgtggatcacaaggtcaggagttcaagaccagcctggccaacatggtgaaaccccgtctctactaaaaatacaaaaattagccacgcgtggtgatggcatatgcctgtaatcccagctacgtgggaggcaggggaatcacttgaagccggaagccggaggttgcagtaagtcgagatcagccactgcactccagcctgggcgacagagcaagactcagtctcaaaaaaaaaaaaaaaagaaaaaagaaagaaaggattaaagttgtagcaaccctgaggttaaaatggaggtggaaaaaattaggaccagagaggaccaaaattccagagaccacaccattttaagaaaggcctttggagtcat

SEQ ID NO: 2308 - DNA, 4001 bp, Homo sapiens
cagggggctgtcctgtgatttgtaggaggtttagcagcatttctggtctctatccattagatgtcagtgatactcctcagtttgacaaccaaaatgtcttcattttgccaagtgttcactggaggcaaaatcagtcccagtcgagaaccactgggtaaaaatgagtggtgtcatcacagctatatatgacacttagaaaaaaagatggaaacacaacatccagttacatcataaattacagattcaggaggatagccacaatttaaaacgagatagtagtcaataaaagtgtttccacttgatgttttgcggtctctcttcaagtgtctaatgacaatatgtcgttcctctataggaatactaatcagcttgtaaggatttattcatattctactatcatcactatttgttttcaccttccatatatctggataaggtggagtctaaatccttctcctatcataactctcattcttcaacaagggatgtttgccagtcccctcaaaaccagtcaatagactatgggcataattcagagttcccacaacaaatcacgtctcccatattccaaaacaagaatgtccttgtttcagtatgcttcacttttggtaaatgccagtcaaaacaaaataggaagtagactacaactatgatggagagtggcagatgaagggggtcaggggactgatctgcactggatattgtctagaagaataaattccttaagaaataaaataatgcaaataatactgaacattcagaagcatgaaatctgatgctgatcgctttggtttattctttatagttctgtggaactataaggacatgctctcttcctatgagcattttgctcctctggtttttattttcccatctcatatatatcctaaagtaatatacatatatacaaatataaagtgtttgatagtacatttatatgcataattatcaaacaaaattgtatgctttgttctcaattgtaaaaggtcaattcgtatatatttaaaaatctttccttcccattccagcaaagttgcattcttaaaaactgtaagtcgaaaaaaatttttttttcttttttgagattcagtctggctgtcacccaggctggaatgcagtggtgtgatcttggattattgccacctccacctcctgggttcaagcgattctcctgcctcagcctcccgagtagctggggttacaggctcgcaccaccacgattttcttaattttagtagctcgcgccacggctgattttcttatttttagtagagagagggtttcatcatgttggccaggctggtctcgagctcctgacctcaagtgatccgcccgcctcggcctcccaaagtgctgggattacaggcgtgagccaccgcgccgggcctcaagtctaaatttttaaaagaaagtttcttccaaccgcattcacgagaagtgcttctctttcatgaaataacaattagaacacaactagtgaaacctttgggacttcaatcactactttttctaaactaccactttccagcaggaagacggagcggtagcttggggtaaaaattaaaacctagcattaccatgagttaagatcgagataaatagatcaaaataaatgggtcactgctggcgctttacttagaaaaataaaaaatttctcatcactagaactcataatcgctccgcaaggagggcaaaactgggtttattaaagtgaaagctggagaatccaggggacacaagcagaaagctgtcaaagaggggaggggccgggttccagcaccgacaggaccaggatacttatttccgactcttgagagagtagggcgataccacacctccgcggctccagcgtgttcaccacaaaatcttttccctgcggccaccaccatcctgcagaaccgtttcttcttttccacatagtaaccgcatctaccctcagctggaaaaccaggcgcgtgcggcgacgtcgcggaggtcgccataattctagggctcgcttccggtgtccagcatccggcaaccagaagaaaagttagaagcttccttcgggtctccttcccttaacaaacatggctgcctcagcccccgcgccacacaggttaatacccggaactaccacaaccgtcttccctttatcctccgcagaaccggaagaatccgatggtggctggcgagggccaagtctcttacgccttcccctcgtttctccctccccgcctcctccgcagaagccgagcgccaaactcaaactttatcaggacccggacctctcaggctaatcccgagggccgggcctgttgggcttttctgcacaccagccgaggcagcgagccaacatgagccaagtgctgttccaccaactagtcccgttgcaggtgaaatgcaaagactgtgaggagaggtaaggtccgcgtcatccagtgcccgcgggtggcggttggggtcaggccaatggggaaagatggcggttctggcccgtgggatccaccttgcacctaggtgtcgagtcggcccccctaggaagcggatagggaacccagagggcccggtggttacctctctcaccaagtcggccgttgcagaggggactggaggaagggtgtgaggagttaggaagccggctcacatcaagttaatgtcaaaaaccctacctgtgcacggaatcgtgaagattatagccctactcttcccttttgacagataagaactctggcccagagaagttaaaaaaatttacgtgagggctcacagccagttcatggcagggtcaggactagaactcaggccttggctccgagcctttccccctcgttctcttttgaagtatgttggcagtaaagttcaacttttaaaaacctaccaatttggtggcgtactttggctcttcacatcagttgctttaaaaaagtaaattacatttaaccgactaaaaatgagaaaagcagaaacgtcattaattcattcaataaatattgcctccttgtaaaacaccttactgggcactgggaatacagtggtcaggaaaaacagtccttttcttcatggagtttacaatcactggaggaaataaagaccagtcgcacagagaagtgcaactttgattaaggaggtggtattattggggcgtaaatagatttgaccagaggtcaggagacttactttttttttctcagttctaacactcaatggttgtctctttttttctctgaacgttctttcctcatttgtaaaactgatataacatgcgtattcacgtgtttgtaatgaggatcaggtgtgaaatcttttgcgtattcacgtgtttgtaatgaggatcaggtgtgaaatcgtatgtgaaaactaagtggtgtacaaatgtaacataaaaaatgaagacattgccttattgagttgccagtaatgtcaaactgtagtatatatagttcagaattcggtcaaaaatcaatggcaagccggtcaaggagatggtcccaaaaccagcagctgcatatggagatctgtaggtttagttgatcattcttttaatgctgtccagtatggtagccactagccacatgtggttattagacatttgaaatggggcttatctgaattgttgtgctttacatatgaaaatgcacgttggatttttaagacttactatgaaaaaagaatgtaaaatatgtcaatttttatattatgtgttaaatggcaatatttttgggtatattgggttaaatacaatgtattattaaaattaatttcacctgcttttaaaagtctttttaaaatgtgacttctagaaaatttaaaagtaggctaggtatggtggctcacacccgtagtcccagcactttaggaggccaagacaggaggattgcttgagcctaagcttgaggttacagtgagctactatttgtgccactgtactccagcctgggtgatagagcgagatcctgtctctgaaaaaaaaaaaagaaaaagaaaaaaattaaaattacatacctggctcacatttgtgg

SEQ ID NO: 2309 - DNA, 4001 bp, Homo sapiens
gtcctactaatgcattttcagtttcccatatagtataccttcttcaaattacatatttgtaaattttggaatatatagataagtcttttctatgtttaacatatttttgatggtgaggaggtagagaatgcatgcatttcccaaagctgctgaaccacttctgactaatataaacaaatacaacttcgaagtgaggtaggaggctacttaggagggtggaaccctctcagctccccatgcctccccgatccctacccactgtagttgaagaaacaactggccttattttgtacctacaagctctgatcttatataatgagaaggggcttacctgaagcattctgacttttgtctttcctgtgattagccctactctgaaatctataacaatttgtatgttgtttcaaaactgcaaaataatcctatctataactatctaaccttttataaatattaaactcaaaactggcctagaagtagaaaaaataatgaattaaagattattttaagttccaattcagaaagcacataaaggtcaacttatgaccacaaactaaatgttaaaagaacttaaattatgtctttcttagaccttacattttaaaatgttagaagatccttaagaaagtgttactcatcagtcttttaaattcctatatggtccaataaaccaccacttagaaaacatgcaggcacattcagaagcacaataatatgggccattaattctcaacagtctatttctgatggaatggagtacaaaactcaattggtatttatgtatgggggaaaacatccgtaaatttagtcgactctttcctaaactactactcagcctcaaaatcttttcggaggcaagctgctagcgggggaaaagaaaactgaaatgagaaaaactcatctccttgtggctgtcgaagcagaaaagctagttgacagtaatggtttagaaatgttggcagctaggatctactaccgtaaacaggttgcctcggttactatgtcacatttgaaagaacttagttaaccatggcagactggactgcgggaaactaccaaattatgtgtaacttcctatttttgtaccttaaaaagactcccttttaagaaaaagcccttaacctcattatttccttctatctgcagcattcctgctctccgcatatccctcaccgtgacatcctcgaggcttatgaagatgccgtctcccattctgtaaccctgctttagccgctacacgggcccctctttcctccccaccattttcctaaacctgccttgccccataaaaaccatcccggtgaagggcctcccctacttcccagcaaggcgcactttctctcttctgcagcagaaagatctgggccttctgcacttactgcttttagcctcctcaggggcagaggctagggacggggacagggccggagcctgggccagggcaggggctggggctggagccgaggccggagtcggagccgagtccagagccgaatccggggccggagctgggaccccagccgagtcccgggccggggtcgggacctggacctgggccacctccacctcctccttctccaggggcagcagctcctcctccgccatattctccatagttaccgcctccgtgccaagcccgcccggggacccggagcggggctcacggcggggtcagagaactgacgtgaatgcccacagggctggatccaaggagtggggaagcaagtggggagggcgggatgcgtgcaacagacaaaagatgaagaaccagtgaccaaatcctgttagtagaaaacagaaagccagaggcagcgattccagatgcccgtccgcttccctttccccgaggcgttacgacgccaccacaaactgcgcagaagcgtactggggacggcgtccaattgggtaagagggttcggtttctacggtgcgtctccggcccaccggccaaccaccaaaccgaacaaagactacagcacccaggatacactgcgcagtctgggggcggggccggagttcaagcctcggaggaagtaaatgcaaatctaagcgagcgctgtggggcggtgagtaggtagtgcggatgcgggcgcagaactacgtttcccagcaggcatacagttggtggggcggggtgtgtgtgtgtgttgggaggcgggggtccctctcctttggcttggggctccggagttgccactgccgccggcgctggtaaggtaggaactgcggggtgcgttgacgttttgctgggcaggttccccctcgtcccccgccccaagtatactggcgggcgggcggccggccggactggggactcaggagtcacacggacctgggcggggcgactctgtgggcgggtccggggacgagccagctccgtggagggtgtggttctggcccggcttgcctccggggctgccccttgcccggtgttggggtctggtcggttcgtgcggagcccgcgggcccgcggcggtttactagcagctgacgagcttgcctgtccatccagctgacttggaattagggtctgttcttcatttcgcaccctcacctacaccgtgacccgaacactcttttcctttgtttttatttttgctttagtcttcatgttgccagtatcagcagttctgcggtgtggccagtggatagaaattagttgttttgctctattttgctttgttttcaggcttttaataaccagagctctgagtgggtagagcttcggggcatttaattttgatgcgtttcagatccccaaaacatatgctagcgagtcccctgtcccccgtacttctctccccttcactcttagtgcctacttgacattcgagcctttcttgtttctttcttctgtccccccgcgataaatccactgggacagaaaggagaaaaacgtgaactttctggctgccctgcttgggcttggtccgaaccttctaggcatcagggcaggagagggaagcccaatttagtctcaagaacaagacgcgcgcttccagttagcttttcttagttaattaagttgataaacgccaatcttcttggtctatttgtttcctacttgtttcagaaccccggggaagagatagcatgattatttggcactttgaagcactaactggaaattaactcctccccctatagttaagaagtatatatctggaggggtgtgtgtgtgtgtttaacctctccccagtttaatgggaacagattatccctgtggagcttctgtgagttatagtcctaaatcccttttactgatcgtcccgtacagcttttatctagtattcctgaatgtgtagttgactcatggctcaacagtcaattaaaaatgggataacactgactataacttacagaaatgctaactatatctgtgcatcatccaataattcttgttctcatttcttttttttttttttactgtcgttcatgatgattttttatttctaaatgactagatggttaactgaaagctagattcagtatgttaatgtcatttaacaccagctggaaaccagattaaaagggtcagattttagtgtctggattctgtgggaatttttgtaagaatttctaagcatggtctgtgcttgtaagacatcctgaagaaggaatcgtcaatgtttgaagaattaaataatgttattcatctattgctactgcataagttataccaaaacatagtagcttaaaacaacagtaaacatttattactccacagtttctgtgggtcaggaactcagaaatgactttctgggttgatctggctttgggtctcctgaggttgcagtgaagatatgtgccagggctgctgtcatgtcacttgattaggggtgcaggatcatcagcttcaaaggtaacacactcacatgcctggctgttagttggttctggttgttggcaagatgccagtagttcttcccttgcgagcctttccatgggctgtttgagtgtcctcatgacactctgactttccctagagtgagcagtccaag

SEQ ID NO: 2310 - DNA, 4001 bp, Homo sapiens
tagttatgactgatttcaaaggactaactagatcaactaaaaataatgtttaaaatgtgattaatatatgtattagttctaatgcatttcagacttctcaatcattacatatttgtcctactaatgcattttcagtttcccatatagtataccttcttcaaattacatatttgtaaattttggaatatatagataagtcttttctatgtttaacatatttttgatggtgaggaggtagagaatgcatgcatttcccaaagctgctgaaccacttctgactaatataaacaaatacaacttcgaagtgaggtaggaggctacttaggagggtggaaccctctcagctccccatgcctccccgatccctacccactgtagttgaagaaacaactggccttattttgtacctacaagctctgatcttatataatgagaaggggcttacctgaagcattctgacttttgtctttcctgtgattagccctactctgaaatctataacaatttgtatgttgtttcaaaactgcaaaataatcctatctataactatctaaccttttataaatattaaactcaaaactggcctagaagtagaaaaaataatgaattaaagattattttaagttccaattcagaaagcacataaaggtcaacttatgaccacaaactaaatgttaaaagaacttaaattatgtctttcttagaccttacattttaaaatgttagaagatccttaagaaagtgttactcatcagtcttttaaattcctatatggtccaataaaccaccacttagaaaacatgcaggcacattcagaagcacaataatatgggccattaattctcaacagtctatttctgatggaatggagtacaaaactcaattggtatttatgtatgggggaaaacatccgtaaatttagtcgactctttcctaaactactactcagcctcaaaatcttttcggaggcaagctgctagcgggggaaaagaaaactgaaatgagaaaaactcatctccttgtggctgtcgaagcagaaaagctagttgacagtaatggtttagaaatgttggcagctaggatctactaccgtaaacaggttgcctcggttactatgtcacatttgaaagaacttagttaaccatggcagactggactgcgggaaactaccaaattatgtgtaacttcctatttttgtaccttaaaaagactcccttttaagaaaaagcccttaacctcattatttccttctatctgcagcattcctgctctccgcatatccctcaccgtgacatcctcgaggcttatgaagatgccgtctcccattctgtaaccctgctttagccgctacacgggcccctctttcctccccaccattttcctaaacctgccttgccccataaaaaccatcccggtgaagggcctcccctacttcccagcaaggcgcactttctctcttctgcagcagaaagatctgggccttctgcacttactgcttttagcctcctcaggggcagaggctagggacggggacagggccggagcctgggccagggcaggggctggggctggagccgaggccggagtcggagccgagtccagagccgaatccggggccggagctgggaccccagccgagtcccgggccggggtcgggacctggacctgggccacctccacctcctccttctccaggggcagcagctcctcctccgccatattctccatagttaccgcctccgtgccaagcccgcccggggacccggagcggggctcacggcggggtcagagaactgacgtgaatgcccacagggctggatccaaggagtggggaagcaagtggggagggcgggatgcgtgcaacagacaaaagatgaagaaccagtgaccaaatcctgttagtagaaaacagaaagccagaggcagcgattccagatgcccgtccgcttccctttccccgaggcgttacgacgccaccacaaactgcgcagaagcgtactggggacggcgtccaattgggtaagagggttcggtttctacggtgcgtctccggcccaccggccaaccaccaaaccgaacaaagactacagcacccaggatacactgcgcagtctgggggcggggccggagttcaagcctcggaggaagtaaatgcaaatctaagcgagcgctgtggggcggtgagtaggtagtgcggatgcgggcgcagaactacgtttcccagcaggcatacagttggtggggcggggtgtgtgtgtgtgttgggaggcgggggtccctctcctttggcttggggctccggagttgccactgccgccggcgctggtaaggtaggaactgcggggtgcgttgacgttttgctgggcaggttccccctcgtcccccgccccaagtatactggcgggcgggcggccggccggactggggactcaggagtcacacggacctgggcggggcgactctgtgggcgggtccggggacgagccagctccgtggagggtgtggttctggcccggcttgcctccggggctgccccttgcccggtgttggggtctggtcggttcgtgcggagcccgcgggcccgcggcggtttactagcagctgacgagcttgcctgtccatccagctgacttggaattagggtctgttcttcatttcgcaccctcacctacaccgtgacccgaacactcttttcctttgtttttatttttgctttagtcttcatgttgccagtatcagcagttctgcggtgtggccagtggatagaaattagttgttttgctctattttgctttgttttcaggcttttaataaccagagctctgagtgggtagagcttcggggcatttaattttgatgcgtttcagatccccaaaacatatgctagcgagtcccctgtcccccgtacttctctccccttcactcttagtgcctacttgacattcgagcctttcttgtttctttcttctgtccccccgcgataaatccactgggacagaaaggagaaaaacgtgaactttctggctgccctgcttgggcttggtccgaaccttctaggcatcagggcaggagagggaagcccaatttagtctcaagaacaagacgcgcgcttccagttagcttttcttagttaattaagttgataaacgccaatcttcttggtctatttgtttcctacttgtttcagaaccccggggaagagatagcatgattatttggcactttgaagcactaactggaaattaactcctccccctatagttaagaagtatatatctggaggggtgtgtgtgtgtgtttaacctctccccagtttaatgggaacagattatccctgtggagcttctgtgagttatagtcctaaatcccttttactgatcgtcccgtacagcttttatctagtattcctgaatgtgtagttgactcatggctcaacagtcaattaaaaatgggataacactgactataacttacagaaatgctaactatatctgtgcatcatccaataattcttgttctcatttcttttttttttttttactgtcgttcatgatgattttttatttctaaatgactagatggttaactgaaagctagattcagtatgttaatgtcatttaacaccagctggaaaccagattaaaagggtcagattttagtgtctggattctgtgggaatttttgtaagaatttctaagcatggtctgtgcttgtaagacatcctgaagaaggaatcgtcaatgtttgaagaattaaataatgttattcatctattgctactgcataagttataccaaaacatagtagcttaaaacaacagtaaacatttattactccacagtttctgtgggtcaggaactcagaaatgactttctgggttgatctggctttgggtctcctgaggttgcagtgaagatatgtgccagggctgctgtcatgtcacttgattaggggtgcaggatcatcagcttcaaaggtaacacactcacatgcctggctgt

SEQ ID NO: 2311 - DNA, 4001 bp, Homo sapiens
gatccacccttctcgcctcccgaagtgctgggattacaggcatgaggcaccgcacccatcctccacaattttttaaatgaatggcataagagttaagggccctcatgagctttcaggatagactcgaattcaagtcctgacttgttatttattataactctttttttttttttttgagacagagtctcagctgtcgcccaggctggagtggagtggagcgatctcggctcactgcaagctccgcctcctgggttcacgccattctcctgcctcagccccccaagtagctgagactacaagtgcccgccaccatgcccagctaattttttttgtatttttagtagagatggggtttcaccgtgttagccaggatggtctcaatctcctgacctcgtgatccggcctgcctcggcctcccaaagtgctaggattacaggcgagagccactgcgcccggctatttattgtaactcttcaagttattaagcctcttcataatagtatttacctacctcagaagtttctgaggttttaaggagataatggatgtaaactgcttattactcagcagatcgtaatctgactatacttactgagcatatgctatatgccatacactgtcctaatgatgaatgtgaattaactcatttaatcctcaccataactctaggaggtaggtgctgttatttccatttttatactcaaagtgaatgagacagagcagttaagtaacttacccaaggtcatagagtagaaatagctttcaaacccagtctcgcttgagtcctgcgttttttgtttttttgttttttttttttttgagacattgttttgctcttgttgtccaagctgaagtacagtggcacgatctcagctcactgcaaccttcgcctcccgggttcaagtgattctcatgcctcagcctccggagtagctggggttacaggtgcctgccaccacacccggctaatttttgtatttttagtagagacggggtttcaccatgttggccaggctggtctcaaactcctgacctcaggtgatccacccacctcagcctcccaaagtgctgggattacaggtgtgagtcacaacgcctggcaagtcctacccttaagctacatgccatccttccactcattgggacctcaaaatgttagctgttataattttacagtgactattactaggggtagtgagaagccatgactacgatgtttacattctcgtacatgacagctgcaacgagatgtattaagagagacctgagatgagacttacccagtgaggcggtttcggataattttgacgctcattacggtctcccccatggtggcaaaggctctggagatgaagttctcatccatgtagggttccagctgcgtaaaaacaagagcacagcggctcaggccggcggccgggcttcccactccgggttccagagcccctcccgttcagcccagggctggctacgcgccgctgggggagcgaggggcgaggttcgcctccactgagcggcctgaaaccccagctcttttggttcaagcttgccccgctttagggagcctccccttggacctagaaaccccactcctccggtcccagaacagcgcgcctcagtccttggattgctcccattctatgtccccaaagcaccacctttccctcccacgaacccaggtggggccccaggacccctagcctcacggactcagcctcttcacttagatgctggaacccgcttctgtgtcaccaaaaagaacccccgtcacacgtctcccctttctgggatcccaagtcccctcccactcagatccttcctctctcgcgaaaccgagatgcttccttgtcttcagaccccggacggctgccctcactcacgtcgcccatccacaggctggccgccatacccgcgcaccggggtggggctttgcgggcggggctctgcgggcggggctcgaaggcccgcgcgggcgccaatcctggctgcggagaccgctacagagcatgcgcctccgacggcttctgcgcaggctcccgagcgcagcggcccgggtcgggcagtgtgttcagctccgggtttttcctgcaacccactgggcgctaggcttccggatcgcggtgggcggagttcaggctggaatggggcgggccagataccacctggcccaggcggctgggttacttgggtttatttctgactttatatatttagaaaacaaacaaaactacacacacacactcgtctgactttatatagaaaacaaaaccacacacacacagacacatataattacaacattaatatatgctcgttagggctgggcacggtggctcacgcctgtaatcccagcacttgaggaggccgaggcgggcggatcacgaggtgaagaaatcgagaccatcctcgccaacagggggaaaccccctctctactaaaagtacgaaaattagcgggcgtggtggcgagcgctggtagtcgcagctactcgggagactgaggcaggagaatcgcttaaacccagggggcagaagttgcagtgagccgagatagcgccattgcaccgcagcctggtgacagagcaagactccatatatatacatacacacacacacacacatacacatatatatacacatatatacacatatacacacataatacacatatacacatatatacacacatacacatatatatacatatatacacacacacacacacatatatatgtatgctcgttacttgggttaatttctgactttacatatttagaaaacaaacaaggccgggcgcggtggctcacgcctgtaatcccaacactttgggaggccgaggtgggcagatcacgaggtcaggagatcgagaccatcctggccaacatggtgaaaccccgtctctactaaaaatacagaaattagccgggtatgatggtgtgcacttgtagtcccagctactcaggtggctgagacaggataatcacttgaacccgggaggcagaggctgcagtgagccgagatcgcgccactgcactccagcctgggcgacagagtgagactctgtctcaaattaaaaaaaaaacaaaaaacaaaaaacatacacacgtacacacacacacaaacacacacataattacaacattaatatatgctcgttgtaaaaaactgcagatacaagtgcatccaaaaaagtgaaaatatccctccggacaacccggttccactacctccctattgttaccaggggttcttaggctctcaatccaacagaaattaacatgaggccaaaaaagttttcccagacaagtcttcattggagcttatgcctgggtataagggaggcagcacaagagagcgagaattccctgactctccgaaaagagctggttgagatgttttattgggcaaagcacggaaagtgatatcaagtgtagggtttacaggctgggcaggacaaagctcatgagggtggggtatgaaggtcagcatatcctgttgtaatgattatctttttttttttttttgagacggagtcttcctttgtcgcccaggctggagtgcaatggcacaatctcggctcagaatagctagaatctagcctcctgggttctagctattctcctgcttcacctcctgagtagctgggattacaggcgcccaccaccaggcacagctaatttttgtattttcagtagagacggggtttcaccatgttggtcaggctggtctcgaactcctgacctgaggtgatccacccacctcggcctcccaaagtgctgggattacaggcgtgagccacccatcgcgcccagccaatgattatctttagtactgggctacctggtagtttggctgtcagcaacaaggctgtaaatgaagttttcagcatttcttcctgagatgagacattccacaaccttggttggataatttggatctcctaaggccagatcctagaattatttttattttatttatttatttatttattcagttggtcag

SEQ ID NO: 2312 - DNA, 4001 bp, Homo sapiens
gagccaagatcgcaccattgcacttcagcctgggcaacaagagcgaaacactgtctcaaaacaaacaacaacaacaaaaaaattatctttccatgatttagtgaggaagaagaaggacctctgccctgggttaacgtcaccacagcccctctgggaggttaagagatccacttcgcagactgataagtgagagtgaaattaactcagctggtgagcagcaatgtggtagccaggtcattcacagtggggacagaggaatgggagactgaagggcatctggacaggaagagaagcagatctcacctcagatctggctctttaaggcccccctttctggaagctgataccacacctgcccccttggggcctgttaaagggtatcacctggttccaacctggccgagccatcttagtaacaggttgggagttaagcctctaggttctgctatgtaaggatccctgggtgagcaggtgccagacatcctgtcctggttatgtgagtcaggctgtaatttttgcgaacctgcatgacggcataagaaaagctgtctcctagaagaagaagggcctaagtatgaagagaacaaatcctaaacctctctgggattccgtctccccaaaggtgaaacaggcctagagggggaattcagtggtacagccctgtgccagcctccaccccatcctggggcctcattattctgtcctcccgaaggcacggagctgggcggcgccaggaagcagcatcctcaagggcaagactgctcacagctccgaggggcccgggaaaggccacgcaagtgggggtgaggatggggggtgctgcatccgtgcggcaggttccaagtggtaaaagtttgccgccaacccgttcctgggatctgagccccctcaagagtccaactcttataatggagacttgatgctaccacctctcactctccagatggtcgggagaggcggcaacagaaagtggcagctttactagggacccagcagacgccagaagctccagggaagggagttcccgggccctggaccagccccccacacgccatgaccgaccctcgaacgcaccagccgctaagaccgcacctcagcctcctctactgggcccctggcccccaactgcctcttcctgcggatccgtagtccttccagccggcgtccgcgatcagtcggtcggtcggcacctcggcgaagcttgtcggggtggccaggggtccgggcgtggaggtcagcgctgcggggaggcggggccgcggggcgggctgcggcggaagggcgagtcgggctcggggccgtggccgcgccgcagtcgcccggcaccccagggcacgcagccgcccaggcccagcgccgaggccagcagcgcggggggtcggccgcggcggccgcggcgcgggcccttcttgaggcgcgacccgtgagccgccaggtagagctcggcctgcgccacgccgccgctcaggcggctcaggctctccgcgcggtgcgccaggcgcagctcggccgccaagaaaacgcggtgcagctgcagcacgcggctctccagctccgacaccaggcgccggcggccctccacctccagcagccgccgccgtgcttcggccagctccagcgcgcggccccccgcccccgcagccgcgccagagccccctccggggccggcgagccccgcgatcccgctagcgccctggcgccagcgctgcagctcctggtcctcggccgcgcctgctgaagccccagctgcgtccggcagcggcggggactgacccggggtcggggtaggagtcaaggtcggagttgggggcgggggctgagaggacggcatgggatcccagggcggcggcggcgacctctgctctgccgtcccctcctgggcccccgggccgcaggcgctgatgcggcagcccggcatcccccgccccccaccggcggtctgcggctgtaggtgcgcagggaggatgaccacagcacacccgaacagctagacacggccacagcccccaccccagaggcgcgcccgccgtccgcgcatcttatagaacacggggcggagcgacgggcggcacagccaatcagagacaggcacgccctgaatccgccccgccccccccccccccccccgcgctctgcacattcagggcattccccaaacccttcaggtcctgcccttcgccggattctgctccgctagggcatccggtcccctttcgcctctccccaaattttgggtgcaaagggagcctcatcttccctggtttggcccctcagagtcataagctctggtagctggtgtttagaaattcacggaatccggtctccatccgggggagggtcttgcctaaggcctctgtgcgaagagagcctgggctagaacgcaggaggcttgactccttgtgccgtgctcctcccacacctcatgctgcccttggccgaatcagttctgcccggtctctcctgggccatagggctctcaaggaccccctttcccacctcactagggcagtggaagggttaacgcagaggggcgactgccgtcctggtgggacggggatctagctggactgattccacgataggtagagcgctttattcgcagaacaaatacctcagcgctgccgctgagcctgcaaaccttggtggcatcacagaggagccccggaccccacggtgtgcaaagttctttccctgccccggctcgtgtttactcctcccagccggtgttcctacacattttaaagagggggaaactggccgggcgcggtggctcacgcctgtaatcccagcactttgggaggtcaaggcggtcggatcacctgaggccaggagttcaagaccagcctgagcaacatggcgaaaccccatctttactaaaaatagaaaaaaattagccggtcgtcgtggtaggcgcctgtaatcccaactactcggtaggctgaggcaggagaatcgcttgaacctgggaggcggaggctacagtgagccaagatcgcgccattgaactccagcctgggcgacagagcaagactccgtctcaaaaaaaaaaaaaaaaaaaagccgggggcgggaagggggaaggggggtgtgcgggggcggggaactgactggcggggcgcggtggctccgccaccactttgcgagcccgaggtgggtggatcacctaaggtcaggagttctagaccagcctggccaacatggtgaaacccctgtctctactgaaaatacaaaaaaattagccaggtgtggtggcgcacctctgtagttccagctactcagcaggctgagggaggagaatcgcttgaattcgggaggcagaggttgcagtgagcagagattgtgccactgtactccagcctgggcgacagagcaagactcagtctcaaaaaataaataaaaataaaaaataaagaaggggaaactgagaccctgaagggcagtagtgctttgcccaatgtcttattgacgactggtggctgaatccagatttttgaatctggacagaaatgcacgagctcagccattcatgccctctgggggctcagatacctgggtctagtcctcttggtggagggacgttctttatgtgggactttatctgacacttctcatctggccctgacaaaatgatagaatggaaccctgcccacttttcccccaacagaaatgaccctgccataccaaacactggctcagacaccatgggcctgcctcagtttccatctacttgaaggtggcatcagagatgggaggtctctgtggtgggtgggggcaagggccaggggtccagaaaccagctctgaacccgattgggaaggactgcagcagaccctgggctcaggaggacctgcggaaggtatggccagtgtgactgctgaagcctgaagaggaggcagatggcgtgcttgcatgatgtgcaggatgatgatagagcctcatcctccccccatgaacacatgttctctaactgctttcaggtgtcttagagtgagtgagactga

SEQ ID NO: 2313 - DNA, 4001 bp, Homo sapiens
agtcaaacacatttgcagattattcctttttaaatgaagtcaaagctgacatatctatgagagtgcatgacaaatgtaaagaaacaacaatagaaaattgggcccatgatagaggtttgtttacccatgatacaggtatctgaatccactgatcaatgtgatgctataaaaactgatgaggaaggaactgtggcaaaaatgacagcatgctagtctgaggggagctgccaactggttgccacgtggtatggaactagtagttgccagatctcatttttctcaaagacccagaaatctggctttttatgtaaactctcaggattaaacgttaacataatgaaaggcatcttaacccccttctctgcttacttctagattgtgccaaaggctaaattttcagtttggtctttctacaataggtaccatgttaattaagttgggtatcaagtacattttagttttgatgtattttgcacagaaaacattttcaagttcatagcaatattacagattaaaaaaaataccacaaactactttgggctctgatgccaatcattctggactctgtgcctcttaaacttttccaataaagtatctcaaggaaatatactgtacagaatcctcctagtctccaagttgagggcagagtttccggagataaacttcaagaaagttacaaaaaaaattttttttaaaccaacacttcatacaaattttggcttctaccccatagcgtactcaggctccttttaatacaaaagctgctctgttgcttccctcaataaaatttaccacgtttatttcatggcttcacataatctgtagcacaaggctccctaactccagggcacaagtcacctatttgagaaggaaggagtcagagttttacccactaaaacattttttttttctggaagccaaaggtctttcttggaatatgtagcttttaaggagtaaatatacacttaacgacttcaatatactcttaaaaactttaatcttaacactatagtattctataagagcctgctgaatgagggcaatttagtaaatatttagtaaatatttggtttaactcatcatccagttttagaaccattccaaatgtttttagattaatacacgacatttgttttcaacctaattttcccttgacgcaccgcatccccttccactagtctagcagccccatggacaaacctttctcctctccctcgttattcctctgtgataaattcaccctgtcttcccacaaagatccttcttccaaaacccagatcccgggcgacgcctctccgcgcagaagccgcgggagaaggaggagaaagaggaggagtaaagcaggccctctcgacgtcggcctgtggggagcgatgccgacaagcaggagcggtcccggcttcggaaagggcccaccctgaggaatggtccggccgggcctagcgaggatgtccctaccgcgatgctggttccgttacccagggtggacaggcgcggaagcgggacggggaagagcgatagtttcgcggcgtttgcccagcctcaacccctgggatgcgggtgagagacatggaggactggtcagaatttgcgcgtccctggggccgcacaaaaggctcccagccggcctcccgcaatgtcctcacctgtacctggcagccgaccccctggatccgcagcgccgccaggagaagtcctgcgcagcgctgggaaacgacaaaagaaggcagcctgacgggcagcgacagccacagcaacagcaacagccccactgccgccggggattccaggttcggttcccgggaacgagtcctgcccctcttcttttgccccgcctccgccccagaggggcgaggatcccggatgttgcctcctcggcgctgtgaatcaccgccctttcttctcaggccccagcccttccgaatccgctacgggtgctgcaaggcctgggaagagtttcgatgtctctagggtggctagagcgtcctcccgcgctcagtcgcgctgcaggtgacggcgcccggaggctgtcgggaagtaggcggggtgacgtgtggttgacgagctcggcggcgggtttgctgagatctgtggccggcggcagctggtgcggggggcagctgagagcgagaggtggatcggggcggtgtgtggccagggccatgacgggcaatgccggggagtggtgcctcatggaaagcgaccccggggtcttcaccgagctcattaaaggattcggtgagaaccaaggggaccgtcctgggcctggggtcacgggaggaggcccaagctgggcatggagtggttccctgcggccaccgccgccccgcgtctggagaggtgacttcaggaacctggagtccgggtgggggaaatgtagatgttctgccctctcctcagctcgagacagtcgcgtttccacagtaatttgtagagccacaccacgagggcaaggatcgtgtcagtcttgtgcctgctgcatcctcaggacctggcacccaaatcctgtaattgacttgagggccctcgctccccaagctcttaagcacgtattgccctttgcactgccccttctctgcggcgcgcaccttatcccgggctggtgaggtcaagtgcattgctcaggccattagtcctgcagaagccaccctagggtgcgccttctcaagggtgaggtgtctgcggctcaagccgcccaggaactcgagattctggttattcaaagcagaacgccttgaatgtgtgaatagctcttcgggacgtccacacacgctgactgcgtgggcctgaaaggccacttcactggttccgctctctgctcatttctggcttccggtgaagtgagttttcttgagctagtgttctagactagaggccacatgctttcctcacagtttctctctggctgtatttagtgcctttcgtcctaaataatcaacacattttactttttatccttccctatttatcttgttcttagtctcttctttggacagtacgtttttatctatttcccaagtgttattgactctacgatgttaaaacttttacgcgggattaacaattaaacgttgatgtagatattgcctgttgtacacagcttaatatttggaatgtcatttatcaagcatatgttgttcatcttctatatctcaggcacagtggtaaggattgggaaattttcttttttttgtttgagacagagtctcgctctgtcgcccaggctggagtgcagtggcgcgatcttggcccactgcaacctccatctctcggggtcaagcgaatctcctacttcagcctcccgagtagctgggattacaggcacgcgccaccatgcccggctaatttttttttttttagtagagacagggtttcaccatgctggccaggctggtctcagctcctgacctcgtgatccacccgcctcggcctcccaaagtgttgggattacaggcgtgagccacgcgcccacccaaggattgggaaattttcatgtgaataaaccataactgctgtttcgaataattgacagtcaaactataatatggtgtgttaattgctatgttagagtatatacaaaatgttaaaagtacacaggtcatggaggagcacagccagaaggaaaagcataaacagtagtgatgttaaagtatatgggttagccaacagctagcaaagtgactagaacataatatagcagactggaggaatatttatttggatctgaaactgaaaagataaactgaggacagattgtatgccatgttgtatagtttgaattgccctgtagtgactggggatttacctatcaaatatattttaatgctgaaatgacattattttcataattaaggtttattgtgcttttaagtgtgcagggcaggttggaataaagtgagagaagctagacatctcttaaaatggttggagtccgagatgattggctaaactagtgggttaggaaggaggagttagattcaataagtttgctatatttaaat

SEQ ID NO: 2314 - DNA, 4001 bp, Homo sapiens
gtagctgggattacaggcgcctgccaccgcacccggctaattttttgtatgtttagtagagacggggtttcaccatgttggccaggctggtcttgaactcctgacctcgtgatccacccgcctgggcctcccaaagtgctgggattacaggcgtgagccacggtgcccggccaagcatggccgcatattaaattggttgtggatattttatacaatgtccatttctctacttttaaatttaatttagaatgcaaaatcaggaaatgctagtaacacacattatataatagcacttgtttcacaatcatcagaactacagcatatacagtatcttttatcagtactaatgtgttatttccaaggaatcctacatttttcttgaatttacacatctcaatatcttccaaagtctctttataatttatttgaaaatgctgcctttcatctcaagaagtcaaacacatttgcagattattcctttttaaatgaagtcaaagctgacatatctatgagagtgcatgacaaatgtaaagaaacaacaatagaaaattgggcccatgatagaggtttgtttacccatgatacaggtatctgaatccactgatcaatgtgatgctataaaaactgatgaggaaggaactgtggcaaaaatgacagcatgctagtctgaggggagctgccaactggttgccacgtggtatggaactagtagttgccagatctcatttttctcaaagacccagaaatctggctttttatgtaaactctcaggattaaacgttaacataatgaaaggcatcttaacccccttctctgcttacttctagattgtgccaaaggctaaattttcagtttggtctttctacaataggtaccatgttaattaagttgggtatcaagtacattttagttttgatgtattttgcacagaaaacattttcaagttcatagcaatattacagattaaaaaaaataccacaaactactttgggctctgatgccaatcattctggactctgtgcctcttaaacttttccaataaagtatctcaaggaaatatactgtacagaatcctcctagtctccaagttgagggcagagtttccggagataaacttcaagaaagttacaaaaaaaattttttttaaaccaacacttcatacaaattttggcttctaccccatagcgtactcaggctccttttaatacaaaagctgctctgttgcttccctcaataaaatttaccacgtttatttcatggcttcacataatctgtagcacaaggctccctaactccagggcacaagtcacctatttgagaaggaaggagtcagagttttacccactaaaacattttttttttctggaagccaaaggtctttcttggaatatgtagcttttaaggagtaaatatacacttaacgacttcaatatactcttaaaaactttaatcttaacactatagtattctataagagcctgctgaatgagggcaatttagtaaatatttagtaaatatttggtttaactcatcatccagttttagaaccattccaaatgtttttagattaatacacgacatttgttttcaacctaattttcccttgacgcaccgcatccccttccactagtctagcagccccatggacaaacctttctcctctccctcgttattcctctgtgataaattcaccctgtcttcccacaaagatccttcttccaaaacccagatcccgggcgacgcctctccgcgcagaagccgcgggagaaggaggagaaagaggaggagtaaagcaggccctctcgacgtcggcctgtggggagcgatgccgacaagcaggagcggtcccggcttcggaaagggcccaccctgaggaatggtccggccgggcctagcgaggatgtccctaccgcgatgctggttccgttacccagggtggacaggcgcggaagcgggacggggaagagcgatagtttcgcggcgtttgcccagcctcaacccctgggatgcgggtgagagacatggaggactggtcagaatttgcgcgtccctggggccgcacaaaaggctcccagccggcctcccgcaatgtcctcacctgtacctggcagccgaccccctggatccgcagcgccgccaggagaagtcctgcgcagcgctgggaaacgacaaaagaaggcagcctgacgggcagcgacagccacagcaacagcaacagccccactgccgccggggattccaggttcggttcccgggaacgagtcctgcccctcttcttttgccccgcctccgccccagaggggcgaggatcccggatgttgcctcctcggcgctgtgaatcaccgccctttcttctcaggccccagcccttccgaatccgctacgggtgctgcaaggcctgggaagagtttcgatgtctctagggtggctagagcgtcctcccgcgctcagtcgcgctgcaggtgacggcgcccggaggctgtcgggaagtaggcggggtgacgtgtggttgacgagctcggcggcgggtttgctgagatctgtggccggcggcagctggtgcggggggcagctgagagcgagaggtggatcggggcggtgtgtggccagggccatgacgggcaatgccggggagtggtgcctcatggaaagcgaccccggggtcttcaccgagctcattaaaggattcggtgagaaccaaggggaccgtcctgggcctggggtcacgggaggaggcccaagctgggcatggagtggttccctgcggccaccgccgccccgcgtctggagaggtgacttcaggaacctggagtccgggtgggggaaatgtagatgttctgccctctcctcagctcgagacagtcgcgtttccacagtaatttgtagagccacaccacgagggcaaggatcgtgtcagtcttgtgcctgctgcatcctcaggacctggcacccaaatcctgtaattgacttgagggccctcgctccccaagctcttaagcacgtattgccctttgcactgccccttctctgcggcgcgcaccttatcccgggctggtgaggtcaagtgcattgctcaggccattagtcctgcagaagccaccctagggtgcgccttctcaagggtgaggtgtctgcggctcaagccgcccaggaactcgagattctggttattcaaagcagaacgccttgaatgtgtgaatagctcttcgggacgtccacacacgctgactgcgtgggcctgaaaggccacttcactggttccgctctctgctcatttctggcttccggtgaagtgagttttcttgagctagtgttctagactagaggccacatgctttcctcacagtttctctctggctgtatttagtgcctttcgtcctaaataatcaacacattttactttttatccttccctatttatcttgttcttagtctcttctttggacagtacgtttttatctatttcccaagtgttattgactctacgatgttaaaacttttacgcgggattaacaattaaacgttgatgtagatattgcctgttgtacacagcttaatatttggaatgtcatttatcaagcatatgttgttcatcttctatatctcaggcacagtggtaaggattgggaaattttcttttttttgtttgagacagagtctcgctctgtcgcccaggctggagtgcagtggcgcgatcttggcccactgcaacctccatctctcggggtcaagcgaatctcctacttcagcctcccgagtagctgggattacaggcacgcgccaccatgcccggctaatttttttttttttagtagagacagggtttcaccatgctggccaggctggtctcagctcctgacctcgtgatccacccgcctcggcctcccaaagtgttgggattacaggcgtgagccacgcgcccacccaaggattgggaaattttcatgtgaataaaccataactgctgtttcgaataattgacagtcaaactataatatggt

SEQ ID NO: 2315 - DNA, 4001 bp, Homo sapiens
tgggggaaaaaaatctcaaagcaccacagggaatacttttttttttttttttgagatggagtctcgctctgtcgccaggctggagtgcagtgacacgatgtcggctcactgcaacctccgtctccagggttcaagcgattctcctgcctcagcctcctgagtagctgggattacaggcgcgcgccaccacgcccggctaatttttgtatttttagtagagacggggtttcgccatgttggccacgctggtctcgaactcctgacctcaggtgatccacccgcctcggcctcccaaagtgctgggattacaggcgtgagccacagcgcccggcggaaatacttgggaaaatattttagataggataacttaaggaaacgcaagccatcaccctccggtactgctcacagcctcactgaaagcatttcctaagaagggaaaagtccacatacagccattagtccagaggcgataaaccacaactcccagtgtgcccggaaaaaggctgcgcagtccggcccggtaagactacaactcccacttcaccctgcgccaagccggcaggtctttcccccatgtgctggctggagtcccgcctctctagtccacctgttgctaaggctagaccaaaagagtgggaactgtgaagcctttcttagccttcacggtccgataggagccgagtcgcaatacacagtttaacgacctcacctgcggtgttaaccgaaagccgcaaccccagcacccaaccctagagttgacacacatgcgtagtggtgtgctggccaactgccagagccttggcgcctgcgccgacgttcgcgctgcacgcggccgggagcggccaccctactgcgcaagcgcctgtgccctcccagtgccttcgtcgtgcgctctctgtctaacttgtctggccgttcttgcgtagggggcgggactaaggctgtcaattggtctgtttttgtgccgatcaatgagatgggtgcggtgattggcgactaccttgagagtagcgggttgaggtgtaagccctgaggaggcagcgttttctgggcttctgtctggttctctctctccagaaggttctgccggttcccccagctctgggtacccggctctgcatcgcgtcgccatgatgggccatcgtccagtgctcgtgctcagtgagttctggggatgccaggaaatggacccccttttcgccctcttctgtccatacttttcagtgttgccccagctccgtcccccactgaccgggccactgagccttccaatcatcgtcttcattttggaagcccagtgtcccgctttcctctcttctcttaacctgttcgcttctctgcacaaactcaaactggccttattctcgccgagcctctttccttgacgtgtgctcgtcttgggaagctctttcccactccgcgttctgtccctcagcccccacgcttcccccgcccctgcgccctttctagcctgattgtcgctatgtagctgcacgaataacgtttttttttgtttttttttcagttaggtctagctttatattcttggcccatcccttagtagcggtaatttaaatgtttcaatctgtattacggagttaacagtatttcctagtagaattgtgagaattaaatgaggtaagtcggtagactgcttaaagagggtctggtaaataggtaatatccttggtcactttacgttacatttattttcagtaacagtctcttgaacagcaatcccttttcccgaagtaaccgtacttgcctcactgatcttagatgtaatcgttccctccgtgtccccggcgttgtactctttcccactaaccagttgggttttcccagatttctcgactggtcaccttttccttttggaagatcccttattttttttctttttatattttgagacaaagtctcgctctgtcacccaggctgggttgcagtggcgcgatctctgttcactgcaacctctgcctcccaggttcaagcgatcctcctgccttagcctcccgagtagctgggagtacaggcgcgcgccaccacgcacggctaatttttgtatttttggtagagacggagtttcaccatgttgaccaggctggtctccaactgctgatgagctcaggtgatccgcccacctcggcctcccaaagtgctgagattacaggcgtgagccaccgcgcccggtcccttatttttttctgatgagcaccacctccattgtcttcctttggtatgtttccattctgtgtgtaacttctgtacctcatctgcagagcctggctagccatctcccctcccttaccgtcttctgtatactgactgcctttcagagttattattcattatctctgtacctgggaaataacttttaaggaaaaaaataaaataaaaacgctattttgaaaaaaaaaagccgccttctttctgatggattgtaggtccatgcaggtttttggttacagctccctgagatagatgtaaatcctaagcattgtgggtgttttggtttgatgggactggattgaaagatttacagacttaaattgtaaaggaaggtaatttagagagaggaaggaaataaacattatgttggtttggttataaccactggcttgtctccactgacatggcctgggggtgagtggtgtatttgcaaagctcctttcaggtctgcattaatctctggcattagttggctgtgaccgattagcctcccagttaaagtatgtagtcagttcttagtgatggtaaatgggttactgaggccttcttattacatccaattatgaggtgactatataatttatcttgcaaactgttgagtgtgttctaaacagtatgctgtgggggcgctatcactaattatgctggacctgttagagtatgatccccctatccaagcagaaaaatgtgaatccccaaactctttccctgcttacgcaaagcaatgaatggtcatttcttagggtcaccagccctttgagaatctgataatagttgtggatcctctttccggaaaaaaaaaaaattgcagtatctctcattttctcacataatctcagggagttcgctatcccactaaggcccattcatagatctcaggttatgaatccctgctgtaaatataggaatatttggttagaagaaaagtattaaccaagattccaaagttatttcttaatataccaaggattgaaatacagaaggaagttaacagccataaggacatatgtttacagttttttgagatatggttgacatataataaactgcacttatttaaagtgtagagtttgataagctttgctctgtggatataccatgaaacctgcattcttatttttcaaagacggggaaataaatagcttgtgtacgatggggcagtcctgggctgttgacttgtgtttttgtctattttaggccagaacacaaagcgtgaatccggaagaaaagttcaatctggaaacatcaatgctgccaaggtcacaaatcttttaagtgtttatggtagtttgcctccagctatctttcctggtatttggtcatagccatgtgtcctgtgcatctagactttatagagtaggcaaataggcagaggaaaagttgacctctttcagaacattttcctgatgatgttaggggaaaggaagccctccccttctgagttaggactgataatcttctcgtattaacttgtgcattattctgttgctgtgtattgttttatagtattctatttgtgtttgtctcccatactaaactgagttacttgaacataagtactttattcccttttgtattcctagtgcccaccgtagatcttggatagatattcggtaaatgtcttttgaatgaaatagtgaaatagccttatatctgatttaggatggtgtagaggccaccgtcatggaaagaaatactaagacatggacttctagtaattaggactgctgggaaacaagctctgggagccatttcccccttattcttgtgaa

SEQ ID NO: 2316 - DNA, 4001 bp, Homo sapiens
gaattctgaggctgcccagctatgccagcgactaggtggatatgcagggctaatgctgagttgaattattagcagacctgcatggggacaggtctaaagtcacattctcccatcagcttcactgtaactgtacaggttcaggaggacaggggttaattagttgtcgacttcaaacatgttttgaaaataacacccaaaacataattttgagccaggttacaaggctttggtggtcaagctaaacatgtgattttatcagtatggaaacactgaggatttctaagcaggagaataataaaataaaagtgtgtttggggataataaatctggtaccattttactggatgaaactacataatttttaaattaacagaaaggtgaaattggaaaaacaaataccccctattattttattacttgttctttttcttttaaaaattaatttgatccttcaagaagagaaatcaaaaggggagatttgatggtcaaggtgtatacagccattaacttgaaaaagaaaacaatctacaagtatataaactgaataacaccaccaaatctagataaagtcttaaaaagttgttactggtgtttcgcttattaagtacttatatagtgctttctgtatgttgaatggcttacaaatattcattaatttaatcctgtaacaaccgtataagtaagtatggactattaatatccccatttttcaggtgaggaaactaaggcataataagatcaagcaacttgtcccaaatcacaaggttgataagtgacagaatcaggatttaaactgagtctgattttgagttcatgcgcctaaccaatatgctgcctctccatgctattgtttccctaaaagggcactaaataatatttccatgctattgtttctttttctcaccttttgggaggatgaaggggacagagtaggaagataaaattaagcaagagaagctgaaaaaggttaactcttcaaacttataccttcaaattttttcttggctgtttttagatgattatgaattattgctctctagcagaagagtgcaattctgttaaagtaccgtagagactagtttttgagattcttacaaaacccacatctccattcactgtctattcactgcttggaaccgtacttgtacaaggcagtaatgtctcaagcagaagtaagcagaggactatcttgatctcgcctgctgctaatctagaaaaatacacgcaaaatgtgagtagctctgctttgagcaagaacctattcaaactttcgaagaaatctgaaatattaggaatctgcaccttttcaaaataaagatgcattctgggcccaaggctaagtgtaaacgtgactgtgcttaaatctttatcactatggacccctagatcttatccatcgcccacaaattgtcttgcatggttaccgtgaggattaaataaatttatcccccaaaggggatttacctagacagcaaaactagtggagcgcttattagggatctccggcttgagaggggcggagttactgtctggctctcagttccaaaatggctttggctgggggattgagatagtgcaacttgtttaaacaaacaaaaccgatgctgcctgaggctggcagttgtgcacaccggtccccctcggtgagggtggcgcgcgtcctcagtctcccactgaggaagaaagaaagagagctgcctgggagtgttctgcctgggttaggggcctggacggcgccctgctcctctcgcgcctcctgaccttagggtgagtgcccatccaggcgtcctcaggggcccacgaaggagctccaccgccgtcgccaaagccgcgaacaccgcccggacccaggccgctgcagccgggggtcggctcggaatcgccgcgctcctccatgccggccggtgcggcgctcccgtggtgcaccacgacccgcgcccggccagaagcagcggcgcgcgcgcctgtgggttccgcttccccgaggctcgcagctgcagtgcgagagggctcagaaactgggaggaaagttgcatcagcccctccttctgaccaaggtagctagaacctgcgcgaacgctctctagtttcgctctgcgtttattcaaatctgagcaaattctaacgtgaaaaatattaaagagtagcctgcgccctgaagctcttaatcctctttaagtcagtgctgccgataactctctgagaaagttgggggatacatacgtcctctttgccttcagcagtggggtcctggtttctgattgctggggacgggaaaggccttactcagtgccctgacatagaactttaaagtagaaccatactttcagggtggacccacgtttcaggattagaggaaacacgagttgctgaacgagtgttcagaaaggtaggatacaaactagcataagcatgtgatctggaagccaaggatgaggagtttcaaacaggcagagtagcacattttaagtattttttaatttactgtgagtgaaatgggaagctattggaggctcctggacgttttcataggatcactctgactgatatgttgaggatagactggagggagcaaggacacaaacagagactggttaggaggctatcgcattgaccaggacaagggtgactcaaaatccaaagtcccaggcaggacataacttctgttttcaaccatgatagactaagaccctagtggaccatcccccagcagaaaacaatttggacacaatgcaaaaagctgaatatactggaatgtgaatagtggactggtaggaagggcaagcttgcttgaagatcaggaactacacttggacacaatacaaaaagctgaatatactggaatgtgaacagcagactggtaggaagggcaagcttgcttgaagatcaagaactccacaagaaaattctcctctctttggcatttagcttggggcaaagtgcagtccagaagtcaggctcagcagtaccagggatgcatgtataaaacttatcagttattcttgtctggggaagcagaaaagtgaagacagaaaattttgaattctgaagagattaagaaatcccaaggaaggagtcagagagtggatccccaaactgtcaacccacatctctgagagatcctgaaccacccaaaacagaatcacagcagctcagttaaaaacaaaagatctgaactgagaccagagctgtctccaaaagggagagagttttcagttaaaatctagccgggaaaattacctactaatacaaaggaaataacactcatcagagaagaataatagaatccagactctccacttaacactcacaaagtccagagtactatccaaaactatctgacatatgaaattcaaggaaatggatcgcatactctagagatcaaccctgagatgaatcagatattgaaactgacagataaggattttaaagtgactattataactatcctcaatgaagtaaaacatgttttcaatgaatgaaaatctcaggagacaaatagaaaatctcagcaaagaaaaagaaaaaaaaagatttttaaaaccaaatggaaattctgaaaattgaaaattataattttagaaataaaaaattcactgggtgaatttaacagccaaaaaaaattacaaaagaaaaagtagggaacttgaagatagagcaatagaaattattaaaagtaaacaacaaagagaaaaattatctttaaaaagtgagtagaccaacagagatttgctacatgtcagacaatccaacatgcatgtaaacaacagaagtagaaaaaaaaagggacagaaaaaatttttgaagaaagagtggtggccagaatttccccaaatttgatgaaaaacacatttactagtacaaaatgctaaatacatagcaactaaaataaacacaaagaagtctacattgtaataaaactattgaaagtcaaaaaaataaagagaaaagcttgaatgcatcaaaagaaataacacatcatacacagggaaaagaagggc

SEQ ID NO: 2317 - DNA, 4001 bp, Homo sapiens
aaccccagagggaaatcaaggtgcagctaccagaagaagagacatggatgctaagcaggcagaaacggcaggtagaaggagggtagcagaagtagagaaagtgagatagagttgtcttataagtggggattaaccaggagagataagcaagtagggaagaacccaacagtgaacagtagagtggaagttaactttataaaagaatttttattgcacttagactcagacagttcaaatccttgagaaaactttttcagaatccatgaaggcatttgtgactagtccctgttagatttgaacattagactttttatttattaaagatctgtatttgacatacagtttaagtggtatgcagctttaaatgtccatgttatcagctgatatgagaacacaaaaccctagattaatatgtggagaccacacaaataccaatttcagatattaaagtaaaataatgtgagttctgacttttgtatgtaaatacacatctattccctccctgttgtactaatccatctacaggaccccaccactaccaccaccaccctcctcagcccaccccatgcactatcaatcagcatacagacatttacagtatgcctagctgaatttaactggtggctatagaatacagcaaaggcaactggccctgctgacaactgtttttcaccttggtggggcagtgtgaatgaaaaggaatggacaaagagaggatatatcaactttttgagatcaagtctacagggcactgggtctgtctcacgtcaatcatctgttgaaaccaaattctcatgaaagagtgtctaaggaaggagaataaaaataaacagctgcttaccaagcacatttaccagaaaacagtgtttcaatattgatgaaggtttagattagaatttagaataattccactctctcaaatccctttgcactctcccccatccctaaaaccttttattgtcataccagtttttcattacattaaaagtcaaaacagcaccagttacttttggtataaatgctgaaaagcatctcctattacttgaaggcctacaaaggatttagacttccacatgtaaaatgatcgtggcctcttttctaggctttgtaaactgactttttggggtataactttcataggtcacttggtgcaccagagtaattaattaaagaaaatagttcctagactcttctgagtttgggtggagttttatccagtgcatttgaatgaccaggaataaagcactccactgtagattccacatgctccttactccccacctccatgccagccctgcttctagcctttggaagtagatgtctccagtatcctgacaccatgtgttccttcagcttttgatcacattactctctcttcataactctgtagtcatcccacattcactttctatatcatagaaacctcctggccctctgttaggagagactgttcaaggtgagctttttggcatttcatatccctgttctccattttaccaccactctgctctttcacgtgaaaaccaaccttcaactgagcccaaaaggtccattcattcaccttttcttctaaaaccacttaagctctctaacgcctgtgtaggtatgggtatggattaaatagtactcaaaatgaacagaagataatgtgaaacataatatttttattagctttatttcaggcaagcacatttaaccaaattgcaaattatatcactattagacagaaaatcctaccagataagacttctgaggtttggtacagtagtttgtcttgatggcttcatgtatgcagtcactatagtcagtattgcacttgccacacttacagcttaaagcaacaggataggaaaaatagggagcaacatggagtgggcatcctggtatttctacagtcctgtagatgaagtctctatatgtgcaaacatcctgggacagagcatatttgggaagaaacagtttgccattgatatcctggggaaagaacagaaaagagagcataatgtgacaggactttaggaaacatatagataatagaaacataaaaataaattcacttatattccttcatcacaaatacaactgggaaagaattgcttagccccattctccaataccaacttaaccacgttgaattctacagagacaaaagtgagaccctcctctctttcatcgttgatcatgggaacaagataaggtttaagtaaagctgggacacaaaactgttataaaattatgcgtatccattgtgctgagtagattcacataatattgtaacctgtgtactctgcttctaaggagccaataaccattagatttgggaaatgaggttgtgatttatttcatttcctttctatataggaatggacttcttcagggcttatataatttacagccaaaagaagtgacatgaactacatacccgtgtcatacaatatccagcacagatggtggtgttgatggttaggcaataagcacactctctcctttcgatgtgcattgtatactcagttggaatacaaaaagacatcgcttgcccacatgtaaggccaaaaagcatggacatcagaaagagagcagtcatgctaaatcaaagataaaattaaagaacctatttgttaaaatcagaaagggcaaagaaaccaagaaaaagtataaccaaacttcagtaccatcccaatgcatatgatcatgcttataattctaccatttggtcaaggaagacaccagaaagataaagtccaaaaaaggtcaactgaaattacaactggtgttaaggggctaactcagaaatctaggaaccccctgatcccacttccaaacccttaggatatccctttaaggtggaaatatgtacagctgggacaaattaaagattattttacacagaacaggtatgtaatttgttctcaaaaagattaacaggcaaaaaaaaaaaaaaggttgacacaattagaagaatacaatcaaggatgacagctccattatgggttagccaggaatattaaataatttttggatgcatggaagaaaatagaggatccacagtgcctcaggcagaaacagaacatgcatctcaatagagcctgcgtgatgaagaacttgttcaatatcaattggatatcattatcaatatgtattgattggatatagttatattggatatgatatcatattggatatatcatatcaatatgatattgatatgatattgatattgatatcattatccctctggataatgttatgacataattattttaggtctactactgaggaagggtaattaaatttcagacttttgaatgtaagttgatcaccttgaagattaagaagaatttttttaatcttacaaatattgtacagctagctagatgtgtttggatttttttccttctcaagtatcattgtcagtaaagaaaatatataccttaatggagtagtattgtggtctatgaacataaacttgtttgcttgttctattaaataaaatataatttactaaatattttgttcaataatcagaagtaccaagatttccccaaatctgtcagttatatcccaacagcatctttaagctatatacactaaaacctctgtaaactgaaacctcataggttcggccttggttaaccaggatttttttttcaatcaacttataagaaaccatgaaaaccacattacacaggttaccagggatttattttaaatgtcaaattccagagatcagtggtcatttcaatcaaccttctattcctagaatgagaattgtagataaattagataaacatatattgagcatctgaaccaggcactgacaaacacaaacggaaaagctacggtcctttacctaaagggctgactgtccagtggaggagctaatatgaacacaaataataaaaacgcagattgttctagtgctctgaaagagtccaaattaagactttaagacctacaattatcaaagatttatgtttactatacttcttattacacaagaa

SEQ ID NO: 2318 - DNA, 4001 bp, Homo sapiens
tatttgagttaaggagcaaaaacatacaaattccttactcatggaatctggctttctcaagcgcttctcaaatgtgagctccctctatggtacagagttgcttccagtattttagagatacagaacttgatgatcctctgtaggatcttaaaattactaactggtaaattatgtaaaatgcttacccatcatggccattatagttcttgcttgtttagacagccagctactgagttttttctataggaaacaactaacttcacatattttaacttttagctctataattctgtataaaatcaatgtggtgacctggtgatgaaaatattggtctaaaaattaagaaacagaattcttccataaatctatgagaacttgactaaaatatataatctgtttgagtgttatttccccatctgcaaaatagaaagtgacaagtacacctgaccctttttaaaatgtaggatgaaaatttgttttggttttcctattgtcatactaactatggatactctatatttttttgaagtttctcctataaatgtagaactctaaactaacaaaagtagaaaatggaagtgctgaattaccagccacagtatctgtacaactttgtgggcataaagaaagcaagaacttttcttttcctttacttctttattgcgaatagtaaaacttcacccacagaatctttctgggcctcaactttctcacctataaaagcagggcttagagccagaagatgatcatgaaaatcttcgcagcacaaatagtctgtaattctatatgataaattagtgtcagatctgattgattgattaagagttagtgatctaaattctacttaaggatttaattgtaattgtgtgcaactgagcaatttaatatctttgtgccttcatttttccatatgtcccttcctaaaatcataaaaagaataaaacaatacatgtgaaacacttggctctctatataagaaagatcacatagctgtataacactgtacaaatccgcgttagttaatcccttcctctgtgatatgccacaatttcttcctcattgtcatctgggttctcatctttgccacttaattgcttattctgaaatcaccatgaataatttgttgggtacctaaacatagaaggcatggtttcaggcagggcctaaataatgagatgccttcttcagatgcatggacatatatgtccctactttgaacgtattttcttattccaagatatgttctttcctttgcctctttcctctctttttttctcttatttttgctcccaatgcttcattcttaataaacactttcctctctgctctgctaatttccttcattaatttttactctccaaatcccttactatgaaaagaactaattgcccatcctatgaataatcctggaacttcactaaagcagtatatttttctagaaagcaaaatgtactatacagcagctgtgtgtgtgttgaacactatcaaaggaggtttagctattaaataactaaaaagaacttataatacagagtacattaccccagcaggtactcaaaaatgaatttgctctaacattcccggaagtacattttcataaaagatggccattagtacagtaattgagaggatttaatacacacatcattaaatggacaacaatatttaaatcaaaatgaaaacagaagaaagccatgaatatcaaatatccttcattagggaactaatcagttgtttctctttctttaagtcaatgaattttttccttatccttatgtaggtagttctctcacctccatctactactaaacaatttggagcagtaatttaagatattacagcctgttgaagcaaattatctttcagcatttgccactttctaaaaaatgataaaatggtgaaagtgaaaaaaaatagcttaagaacatatcatttcacagagccttctcactatagacacctaccttactttgcattggtgagcagatgctgtggtgacccaaactaaaagctcttggttcattttatacccttcaggataatccctctgatcttcttgtttatacaattgcatttgatttactgctttcttatctgaaaagcatctattgaaaattcatactgaattccaaataaaatgtatttagacaaacaagctcacaatatctttacctggaaactgacattattaaagcatgcattttcctctcttctgtttcaaaataaaattaccttttaaatatattctttattaatatttatttattaatattaataaaagatagatacagaatgggaaaaaccaaattcaaaaaacactctaacatcatctaaataagtcttgggaataaaaatttatttggggcttgagggcttcaagttttacctaaatgttcatgtaaagatatataaaattattcctcatctaaaaattttgtttagaacaaaatgtgtagttcaaaatatttttgggggattttaagatattaagtaaaatttacacatgtgaaagaatgactctgaggaacatggccacatctgacaggatgtcaagctgacctgagataaaattttggccctgccatttacttgccatatgacattggcatgcttgacctcttcagtttctattaaaaggtaatatcacttctctaatgatttgtggtgtgagcattttttcatatgcttattggccatgtatatatcttcttttgaaaagtgtctgtttatgtcttttgcccactttttaacggggttcttcagtttttgcttataaattgtttaagctccttatagattctggatattagacctttgtcagatgcatagtttgcaaatattttctcccattctgtaggttgtgtgtttattatgttgatagtttcttttcctgttacatcaggtaacaaaagtacacgatcctagagagatgggaaacaaacagggagaaactgcctggagaaagtttctgggccataatgcagaagccctttagttaaaggtcccatttgtcaacttttgttcttgttgaaactccatttgtcgtcttcgtcatgaaatctctgcccggtcctacatctggaatgatatttcctaggttatcctcgagggtttttacagttttaggttttacatgtaagtctttaatccacgttgagttgatttttctatatggtgtagggaagggatccagtttcagtcttctgcatatggctagccagttatctcagcaccatttattgtacagggaatcttttccccattgcttgtttttgtcagtttaattgaaaaaagaatgattgtcaaatcaggcagccctcagaatcagaagagattcacagagctctgctcctcaatgtgggcagacagcatttatggacagaaagtagaaatgagatatcgaaacagcttgatttcattatacatcagcacttgccttacttggacaaagtctgatcagctggctgcctgtaattgactgaagctcagctgctgtgatgagctgaaattcagctgtctgttacaaaagtatactcctaagttaggctttcaggtagtgtacatactaagttaggttgcagttcattatgtaggaactcacaaaacagaggtatcctcaggccacatttagtttaacagatatatacctagaaatggccatgccagggtccaaggtcttgggaatgtgagctactatgtagtaagataattttgaaaacagggaaactggaaatgagtgtgccaacctaatttcagacaagatgctaacacaggaatatgataaatggaagaatgttggatgtgtgtttctaatggaattagtgcctcctttgtataaagcattgattcaggaactcattttctagcggatttatatacctatccctgggagatatatgtatgtatgtgtgtgtgtacatatgtaatggacaactgatagacacttggcctgttactaaaagaactataataaataccatgcatttgggtagtgattttct

SEQ ID NO: 2319 - DNA, 4001 bp, Homo sapiens
ctgcaagctccgcctcctgggttcacgccattctcctgcctcagcctcccaagtagtggggactactgacgcccggctaattttttgtatttttagtagagacggggtttcaccgtgtactttattagagtcagggtttcaccatgttggccaggctggtctcaaactcatggcctcgtgatccccccgcctcggcctcccaaagtgctgggattacaggcgtgagccaccacacccagccgcaactccaccttctgtatcagtacgctctttattcaattacggccagctgtcttaaacttctgacgatcacagtagatactgtggtggttttcaaatatatccacaaataacctgagactcctccctccaaagggtgggacataacttccttcctcttcaatgtgagacagtttttaaaactgcctcccttctaacaaacacaatgtgacaaaaatgacagtgtctgatgtctgagattaggacatagagattgtggtttcctccttgctctcttgcactctctctctctgaaggaggccagatgccacaccaaaggacatccaagcagcacaagaagttcatgtggacaggaacagagagctggttgcaggcaaaaggcctaaactatcaacagctgtagatccttcagccccaatcaaggcttcaggtgattgcaaataggaatcaaccagctaagcccttcccagattccttaatcacagaaacgtaaggtacaggatagtggatagacagggacaaaaggaagaggattttgttttgtgtttgttttgaattgaggaataacttgtccaagttaatatgctgagaaaaggggactgtgaaaatatgtgtatatagatatgcgagattcactaatagatacaagctcccactctgtgctaagtgttacagttaaaacaaagataccgtccctgtcttcaagtctagtagaggaaacaaatacacactaaatgaaaatatattttagcatataacagatgagtaaatattatcaggtacacaattcttgagtatgtgacatgtcaaatattaattaatgtttactgtttcttgtgtttaagtcatgtttacctgattactaatatttctcttaatgggacataaaagtgaaggcctttgtaatccagacttttagggtacatctagcgccatcacaaaacctccagctaaagtttcacattaaattcttagggactgttttcttgcgcataaccatggctaaataattttgttctctccccttcttcaacttacattgcagagaacttacatttaaaggccaacatcacgggtgaagatgaattaacatccttcccttctcttctttggttatgtgggaaattgtcatgcttccttttcctgaaccctcctgatccttatatagagaagaaaaaaagagagggatcttccatcaccaagagtttgcaaaacacaacatagacaaacctactccttgctttaaaaccagatacccacagggccctcgccttagaggctttctccgcagactgacagagacgctgcccaggcctttccaagcaaatcatccaagtttccaccaactggtgctatgatctggcattacagcaattactgaactaggataaaatcacacctcaaaaatttaagaaaaaaggaggtgtaaacagggccgatctggccggggagagaaacagaggggccgcccccgagtctacaagggacgaaggcatccttcaagggtgaaaaggggaaaactgcatagaaagactggagaacctccccctccggataaataacgccccgtgttgttaaggacgccaccttctttgttgctcatgtcgtcacagcctacggtgagacgagcggagactgaaggacctggagcaagaggagtgcgcgaggtacaggccgagggaacctgggaaaacagcctgcagaaaaacgctttgcagccgggccgactacaacgcagtggccggaagtctcctctcacgtacttccggcctgcgtccggaggggaggggaggccgtcgccgctggctccgcccaccgcgtggtccaaggaccaccacccgccaccgccgcgcgagcgtactattgcggccgccctctgctgcgcctgaagagagaggcgactctacaagcctcacagcatgcactgttactaaaaagacgatgcgtcctcctggacctgagatctgtgtgatcgtgggaaagcgacgaaaaacgtacgtaatttttttctgaaggcaccttcgggacaccttacccttccctcaggggggcccagcttcgcgcgcggtgctgtgggggttgtagttcctccgccggagcgggacctccggtgccccgggccagggatgtgagaaagaagcgagccctcgagtttcctcggggcatgtgggaaggtttttttcaggatccaggcagaaccttacagagctgggagttttttaactttccattcctggcagtgacgccaggagctttaagtgatggaaatatgcgagtcaatcagtggatggtgttagtactgttttctcttatgaagatcaagcctgcccttcgggtctacttccaccttttccccctgcccgtctcccaccgtctccctcctctccactggctctcagaagccggacagcctgtgttcaacttgcctccacggagtggttgtgtgaccttgatgaagcacgcaacttctctgcctcagtttccttatctgtaacatagggatagaatagtacccgccttgtagggttatttgaggatgaaaggagttaagtctcgtgaaaacgctctttcacatataactgctcaattaaatattaaataccatactcctctcccaccagggctctcccaaacaaaatgatagacaggtgagtaatagcagctgtgttccactaaactgtgggcatttcattatgagcaggtgctgccaccatatctagactttgtgccgccccttagccccagtgcttctcagcgctgtgatccggtcccatgtaagcttccgtcaatgtttgttgaagaatcatgttcctggtgtcagaataggtaactagatggcaattcagcaccgtctagagagaaactcaggccaaggcttcataactggggtgccctaggcctagtacagaaaacacaagtacattttaagctttctctaaataacctctctattgtggtcatgtgttgaacacacagtcttttctccttgttaatttaggaacaaaggaacagtaaatggagtaacttggctagaatatggcagtaactacaaggcatgttctgctctggcacgaaggtaaccaccactcatacctctccagccctgtgaatacgtcaattgactaagcagattccttgaggataaagtaggctcctggggaccttgcttgttgggctacttgctttgtggatgttaaacagataattctcatgagtttgagtgacgtctgatctaccagtattccccctactctgattagaaatgacttgaccatgccaaaaagaataaaagacagctctgatacaaatgtagccattttaatgtgactccctctagatccaaggaagccagtacttacgaacattttcagagtcaatacttactgtactgtaccatagtcgaggaaaagggtatttttcctaactctcctggagtagcacatcccaagatctcaactttccaaaacctggatcaactatatttcttttctttctccagccaccactcccctagcctgttcaactacagctatgttacctgaactgctttccactctttcccataaatgtaatgattagaacactaagtttcataacctgtaatgacttctgaaagtatttaagggaggtgaatcccaggagcactttcccagcacttatttgcatatgcatttaccccaggcctccccaggtgttccaacttgtagctactcctttgtcaggaaatagatttcaacttctgtaacaacctgcatccctac

SEQ ID NO: 2320 - DNA, 4001 bp, Homo sapiens
caggcttgagccaccatgcctggccaacaatatatattaaataaggtgtctccacacataaaatcaggttatatgtatagatcagttgacaaaaatattgtgaccagagggtttcaggaacctaaccttgcatttaccctttgttcagtatttagtgtttgtggcgactttatagaacattactgggaataatgagaattgactgtatataaataggtataatgatggcatatccttgtaaagtagctgagattaaatgagataacgttggtaaagtgctcagcacagtgtctggcacgtagtaagtgctcaaaaaacattgttaatattgttactatatggataagtgagaaagtgaggaagtgagttccgcctctagggcctcttttcccaaggggccaaactgaggctgtctggctcttgggctggcttttaggccagacccaataaagaagattgtgaaggagcctgacccatgaggaggggccagggcccacgacttgtaataaagggccctgcccttatgcagactttgtatgtcatagaggcctcagctaccctggccaacagcaccccccaggcacactgcagaagctccctgtgcccatggggccatctcggcttgtccgtggccctcggccccagggcatgcgttccccctaccgcaggccaggtatgggctggcccaggccccgatttcccaggatgttcaagtgtagccgcagaagatatcaacagggtctccgaggtcgaactgccagcagtgcagccatcaatcctgccaccagggccatgggtatcaacaacacccacactgacaccaccatagtgtggatcttcccacctcaaggttagccagggggcctgtgagccagggtggggttttaaaaaacagagccactaggctgggtgcggtggctcatgcctgtaatcccggcactttgggaggccaaggcgggcagatcacaaggtcaggagatcgagaccatcctggctaacacggtgaaatcccatctctactaaaaatacaaaaaaaaattagccgggcgtggtggcacacgcctttagtcccagctacttgggaggctgaggcaggagaattgcttgaacccgggaggcagaggttgcagtgagccaagatcgcgccactgcactccagcctgggtgacagagctagactctgtctcaagaaaaaaaaaaaaaaaccagagccagtgaagatttccctacctggttctgtttaggcacgccaaaggatgatctctgtgaaatagcacccctacatatatgggggactcctgatggcaggcaccccaaagtgctgacagccttaatggaggatggattggctggaagcagagggtttggggaggggctgaatccaagaggcagggaacttccagaactgcttccttcctcaaactcttccctctccttcctctcctcagttctcagacatctcaggcaacctgggatttttctgatcctctagaagtgcccagaagctagcccagaagcttggtttgccctggacctgcatctcctaggggccgtgtgggtggtgaacaacaaatacagtcattctgctcaaactgccttattccacacagaggtgttaaccagctgactatgcagggcgtgaggggagggttatggctgaatacttacagggaaaggcttcagtgaccgcagcagggatcatagtttaagacagcaggaggacaggacaaggtcagcaacatagaccatctttggtctcagctcttgatctgccccatgaagtaggggctctcttgccttacactcctaactgcacagggagaagggtctctgtaaacatcttggaaggtattgggaggcacagatcagagagggataggatgaaagactgaaccctgagagtacacaagtatgaggtggatgtgaggtggatgtgcctctgtgtgcctgtgatggtcagcgtgtaggtgtagctgctggtgtgtgtgtctgaggccgggagaataggagtatcagtagatgtggctgaatgtgcctttgtgatttaatgtgcctctgtgactgactgtgagtgtcaaggagcgtttgtgagggtatgggtgtgccggagaggacatcagccctggtaagaaaagtgaaggtcaggagggggatggggaacagcctaaaggaggagaacatggagaagggtgagattctgagaaaggcatactaccttcggcccttcaaccattctctgaggtcagtgttttccagaactggcagctgagctggggtgcttaggggtggggcaagactgagtttgagcccagaaagtagggagggtgctaagctctctggcctggggattttccatttggatttctgagtgtgtgctcatgtgtcactggctgtaaccgggtttctgtggggttgtgtcttagtcgctgggaacattttgtaggactctgtctcgaatatgttgcatcatgcatgggctaatacgtgttgcaccggtccgagatctggctgcatttccaggctaccttcccaaggggctagggaagggagtgaaccctgagacctttggtggcctggccccctggggttcaggaagtgtggctaatgtcctttgctgcctgtgaagggaaagtgaattgtgcttatgtctatctaccccaactcttgccagagactgggaccctgaggggggttgaggcagagaattcactgacacaccatgcccagacggtgctgggctcctcaggttatgggatgggggttgctgaacatcagtcaaagctagaaggtgcttgggccatgctcaagggcccaagaggggccatacatataaagatacatgacacagttcacaaacacatgcagacatgtaaatataagtgaactcatagacacatactgcaacaaccacacacatgcatgcaagcacatactataagcagatatacgcagacacaaatgcatagatccccacacgatatatgtaacaacacatacgcatgcctctaaatgaacacagacagaaacatgcatgcacccagacacaagcacacaagcacccagatgcagacacatgccttcacactcatgcaaacccaggcacacacagacatacacgcatgcagacacactcaccagacttccctgcccctgcggccctgggacccagaagcctccctcccctatatgagtgtgtagtatgtgtgtgtgcatgcactcatgcccacacttgtgtctgtgtgtatctgtgtctgtgagagtgtgtgtttgtgctcgagtgtgtgtatgatgggggtgctaagctgtgggaaccagatgacatcatctcttccagctatttttagctgtatctgcgatgatggcttcttcactgcccctcccccttcaggttcctaattctcctccccatctaggctcccagaggcagcagcagccagagggcacccaccacctcagtttaggtggctcccggatgagcgggtgcagcccactctctcccaccctgccagagttccctggtggctgagaacaccaggctctcaggctggaagggcctgggttagctgagctgacctagatggtctccaccccttaaggtgcctctgcttctgcttttcaatctgcaactctgtgtcagtcaacagtgcctgctatgtgccagggatggtactaaattctggagatacagcagtgagcaaggcagtgggagttctttcccagaggaattatagctcagtgagaggcacattacacagattacacaagctcttcattaaatcgtgaggaggtctctgagtacttgtaacaggggctccgtttgcgatgatgttctctgcctctctctgttcttccttctcccataggtgagataacctgaggaaatcagagggaatacagcccttaccttgcacccttcatcctaacaaccatatctccagaattccacagagcagtgcttccttctcacaccctaggctgtgctcccaacatggcactaacac

SEQ ID NO: 2321 - DNA, 4001 bp, Homo sapiens
agctatttgggcggctgaggcaggagaatggcgtgcatctgggaggtggagcttgcagtgagtggagatcgggccactgcactccagcctgggctacagagtgagactccgtctcaaaaaaaaaaaaaaaaaaagagaaggtaggctgagtttgaataccatccctgccactcactagctgtgtgatcttaggtgacttaaccaatttgagcctgtttcctcatctgtaaaaaatggggataataatagtatatgtatatcaggactcttgtgaggattatgtgtaataatgaaagtaatatgcttagcactgtccctgacacattgaaaacattcaatgaatccttccagctatcactggaaaggctggtacaatatcagccactaaataagcactgaacccagcttaagaattcctcctcaggcttaaaacttcataaggctttgaattcataagcagtgagaatgaaggttgtcactgtggcgtgacatctataattaacagcttctgaaattaagccagattcctaaaaaatacaacataaagggtcttcagaaacgcctctccctatagtatgcttgatgtaaatccccacgtgtacaaaggccatgtgtctctttaaagttcaggggatgtcgaggaggtacctccttcacaccttccactgctgaaggatactgaagagcttggagttgctgaagtcacccaggcatctgggctaatggattgacagacaaaagaggagcccatcattcaataattaattagttgcaatcatgggaagacaacgtcccccagagcagataggacagccacctcctccaacctggtagtttcaaagcacccaggccctggctgctctcaaacctctttatccaatgtttcccctcagggtctagctgagcagttacactggctgacattctcttaagaaagcccaagaggaaatgtgcagaaaagacaattttcagaccttgtctcacagtcctgcaggccctgggacagggtatccagggatgtaggtctggtctagctgtatccctgtctcgataatataggagacaagggtcaagatcctatctctctgtgaaccatgaatcctgggaacgctgtcagttcaatcaaaccctgcaaagttgaatgagatcatctctgggagaattagtatttagcagaggctgcggctgggggttgtggagagctgctgctgccctttagaagcccttccattccccatccccttctcagaagagaacccaccacctcctctcacccaggggtactcttaccctgatgcccagaaaaaggacgacgcccccccaccacaattttcactcctatctccaatttcctaaacaaaaccatcacagccaggtacagtgtccacacactcgaatggagcaccaccccaggcagccccagggcaggggtttctctcccatcaccctggccaggccctggttccagctggtaggcagagtgaaaagggggtgtgtgcacgggagactggaggggaacagggacccaagtcctccggaggtgaggagaggctgggtccccgcacctggggtcactagctgggagataaaaaccaaggcaggtgggggttccttccaggaaagagccacacggtgtctctccccttctcaccatttctcattgatcaaccttctgtcttcccgttctctcccttccatccctcccctccctctttgtttgccttctcctcgcctccgcgtttgagcacccagccctccccacgagcgcgactcggacgccgcagtcagcagctcggggaccccggccccgcgcccgccacccggccccctgccctgaccggccctcccggctcctggtctcacccagaagagcaggttgaagccaagcagcaggtacttgatgcaccgcaggcccccgcggaagcgccccatgctgcggcccggcggcgggatccccagtccccaggcccgcgctacgagcgcggggagcggcaggctccggcggggagggggcggagcggggaggaccggggcggggcctccggggggcggggcggggcccggcggggaggggcgcgtggaccccaagcggcgtggctggcgacgggtgggggcgccagcgggtggagatcgagcagcccgagggagcacgttcgctcttctcccggacccagggaccaccttccttccctccagtgggcgcaccgccgccggctatcggagcacctgcagggcgggagcgcccaccggggactggggacccatttaatcagcgccctgtgcggagaccggtttgaggcccgggcgatgcttgagggataagcacttggtctcgtggctatggaaatctaggaaggtgacctcgggtagaagagctaagtggggtcggaggttgccccgaagctggcaggaccagtcgcggggcacctgactgagtgtccagggctgcggctccgcggcgcggagcaagcacacaagcagcttctaggggaccctccctccggcccctcccccctcctcgggggactcttaccttaataggcaagaactgagagagggtgcgggaggcggcgccctgagtcctgtgggctgccctcaacccagccggccagtggagggagtctgacttctcatgtcctgccgggttccactgatcggagggcttggaaggatcccaaattttcgggatcttaattatgatgtggagatgggagaaaggggaagggggcggtttttgttttgctttgtttttattaagttaggctgttggcaggaaaatcagactcccacttccattgactaagtgtctacaatatgtggtgtcagacagtatgggggagacaagaaagcaaaattcggagagcttatgcataaattcagcaaaactttgagtgcctattataggccagacatagtagcaagccccagggactcaacaatgaggagacagccaggcccagaaccacagtctctggtgttggagacagatctgtaagcaaatagggtgaggagagaagggctgggtgctagacaggtgtgcctggcctgactgccttaaccagaaaaggcattgctaaggagaggggcctgatctggtctagaagacggagcccaggcggaaaagatcagtccaggaagacagcatgcgcaaaagcacagagctggagagaacaaggcctccaagggagttctgagaaccgcagttagcccgagtgaagcctggtgggggcagagtgagtcaggaaggcaggagccaaatcacagctttcagtcggctgaccaatgtgccaaactgtcattggccccgagtgtccccacgtgcaacatggaggtaatagtactcccctcatagagttgtgaagataaatgagttagtatttgtgaagtgcctagaacagtgcctggcacagattaagtactgcataagggttagtattattgtatcacactcttatcagtcaaccattcagtttctaccatgttgccatctttgcctacctctgtgtctttggacatttgtttgaatatcgactcatttataaaaacgagtcaaagacagaaaaatgaaagtgctgattctagtaataaacatgtctccaacaatgaaataaagacaaagatggaagtcattaggtatgcagagagaagtgaatcattagcttcaatcaaacacttatagttctatatctgtcacctctgttttagtataaaggaaaagaactaagttaaagagtagtgtctggtacatagaaggcgttcagtaaatcaactgaatgaacaatgatattatactttaaatatatcgttgaattttacatctctaagacaaaatatgtctagagattatatagagggaagagaacccctattgtaacatatacatctattgtttgtttttttcatgctacgattttagcacacatgtattagagacagatggtggttgcctgtccaacataacagtttcagatctttagtatagacttgcccagtcgcccttt

SEQ ID NO: 2322 - DNA, 4001 bp, Homo sapiens
ttttatcaagtgcttgctagccatggatgccaactaacttcttcaattgaaggccggaggatcatatcgggttccaggagcctcttgagcaggtcctggcaatcggccgagatgctcagatgagtggggaaggacacccccttctgctgctgccacagcatcttggggatgtctgtgtcgtcaaaaggtaggctggcacagagcatgacatacaggaccacacccatgctccagacatcaccttttttgctatcgtggggaatgccctgcagcacctcgggggcagcataggctgtactgccgcagaaggtctggctcagctcccggtgtgacttgggcaacaccttggcaaagccaaagtcagtcagcttcaggttgaagccctgcaacaaggcgttctcacatttgaggtcccggtgggccacaccacagccatggcagtagcggatggcctcaaccatctgacggaagagggccttggcccggctttcaggcagtggccccccattcagcacgcagtcaaagacatcccctccctcagcgagctccatcaccaggcagattttcccgtcggcagactccagcatctcatacacctggatgatgttcttgtggtccagggtacggacgatttggagctcccgagggaggaatctctggataaactctgaggaagtaaggggaggagagatgggctggcagatcagaaaggcccacctcctcacacctgtctcctgccttccaacttctgcccaccttgtctgggtcttatttcttggctttcttaatggtcttaagtgtgtctagctgcttggacattgcaaagaatgttcacttctattatttttgtcgttagtatatcattcaaaagaagcactccccaccagccttgtggactgttgtgagcagtctgtgagactggatatcaaggtgctttagggacttttagacaaagccacagaatcacaaattataaggcctgatttgtccacagggtggtgagccagctcctcccgccactgtcccctgaccccacaattctttccatgagccctgtcttcctttttcccatctccacgggccttggcaccagcccctgttctctaccagccctggttgtggcctctgccagtctctgttcccctgccggaaaggaaagcctggctcaggttttgcctctgaggatccttcacctcatgccactttcatcttgcattctgggggggtgtaatgttcctggactcccagaacccctctgttccccactgacccactccagagctgccatcgggcttgcttggttccaggccagcgggagcagggaatgatcgaatgatcgttctaacaaacaggaggaagcacccacccacctcagccagtcctccctccttccctccaaaggggccccggctcaccttctggccctcccatcttgtctataactttaattgccacttttctttggtgttttttggaaaatgcttctttgacttttgagtaggtcccttccccaatggtcttgcccagctggtacccattggagagcagaaagtcctccatgctgtctagcgccgccttcctatcaccctctcagctcatgctgcctctgagaggcagctctactccaccatcgcccttggcctgctccttttctccccaaggacttcatccgcagccgcccccagcgttagaacattctctgtctggacacagcggcgggtggtggggagggacagggccagacatttttaaactccggtgcaattgtgatgtagatgctgtgtgacccttggccaaaatgggcagtgcccctacctgccctcactaccaccaccaaactcagcccggattaagtcaccgccgagcccgcccccgtgccaggcattgagttgtagtcccgcctgggagggcgctccgccgcgtctgtgtggaccgggaatgcgcggctcctcggcgtggacgccgcctcgcggcgggttgccctggcctgctgcgcccccctcgggtgtccggggtctgcgcgaccccgtctccaggcgccatggccagaggcctccagtccccgattctggcccgcgctgagtgccaggggcggcagggggcaccgttgggggttctccagtgggaggaacgtgctctgtgaggtcagcgcgccgcggcccgggtcacaatgctgccctcctcgacgcccgggcccgggcacgccacagagacctgcccggctccgcctggaccggagcgttctcccgcggccagggctccggcagctgcttctagcctgggaccggtctcaaccgccgggaggtgagcgacggcccagggggcgggcgcgaggcggcggcgcccggcgacccgggagaggcctgaccgccactccccgcgcagagcgccccggggcttggacatgagcgcccaggagcccccgcagggtcggagattccccattgaggccggagactcccgtggccttgccgccgcccccgagtcccaggacagcccggaggcggtagcgacggagcacaacccggtcaggtaaggcccgcgccccacccccgcctccgcccgtcccgcggccccgccctccgtcccacttggcgcccccagcagtcaggaccccgcatccacgtccggacccccggggaccccaggtgcactccctgggtgcgccccacaggatgggccaagcccctgcctcagcggcccctgtcgcgcgtcaatttccccaggccgcttcgtcgctgccctggatgccactgcctgacgctgctgcacgtgcccatcgacgtctacctcgccatgggcgggagcccccgggcccgcgccacgtgagtgcgcctgctccctgcggctccgcgggagctgggcgggaacgaggcccccagcgggccaccacgctgaggtcgcatgcgccgagcacgagacaatgatgcacattttaaaataaaagaatgatgcacattttaataaagcacagcacaaactgttctttccactccgggctggcagtgtatgtctatccgtcgggcccaccagctgctctgcccagtccaataacactttcccttccgcagcctcctcgtttggacccagccttaggggcccgcccttccgcctttcaacctacgccacttcactcctctcgtatcttgctggtcctgacccctcctgggcagcctttcccttgggccctgccctggtccatctctctaaccctctggtgattctccggtgaaattcacatcactgtgctggaccctggcaacccacagaagcggggaacaggaggaagaggtggaccgacaagtaacatagaatacagccataggccacccacaccaggctatctatctatcttatctatctatcatctatctatctatctatctatctatctatctatctatctatctatctatgagatggagtctcgctctgtttcccaggctggactgcagtggcatgatctctgttcactgcaacctctgcctcccaggttcaaacaattctcctgcctcagcctcccaagtagctgggactacaggcacccgaccagacccattttaatcctctcgagcgagaagttctgcgacaaagttctgcgacttgctctttgtggccctaggtgcctgggaccttccttattggaagggtttggagctgccccagtccatcctgagccttggtttctcccaggactgaagtgatcataaaaagattggggaagaggccatttgaaaaatggtggcttgccaggcgcggtggctcacgcctgtaatcccagcactttgggagaccgaggcaggtggatcacaaggtcaggagttcgagaccagcctggccaacatggcgaaaccccgtctctactaaaaatacaaaaattagctgggtgtggtggtacgcacctgtaatcccagccactcgggaggctgaggcaggagaattccttgaacccaggaggcagaggttgcagtgagctgagatcatgccactgcactccagcc

SEQ ID NO: 2323 - DNA, 4001 bp, Homo sapiens
aacccgggagactgagcttgcagtgagccgagatcgtgccactgcactccagcctgggtgacagagcaagactctgtctcaaaaaaaaaaaaaaaacgaaacctggttttggtggcacaggaaaggctcctcacacctgtaatctgtgcatgacacatcagtagggatgaagggttccatccattccctcacccaaaggcctgggattgccctttcacctcctcaatccatggacaaagcagccatagacaataaccaaagttcacagcagcacagccagttggggccatagtttgctgacctctggtctacagcagtggtacctgcttctggctgtatatgagaatcaccccaggggcccataaagccactaatgctcaggctccaccctccatattctgaattaaaaaataaaacaaacaaaaaaacctactaggtgattctgatgtgcattctgggctgaaaacagctattctagaagaactgtacattgtagcctctcaggaaactgctagaatgttgcatgtggggagtgctagggggaagcagatgaatgctgcgaaatgatgatccagggctgaattgaggtctagataaagattagaactgttttcagtccacctgacacattaagtgcttccaatactttgattaaatgttctttatttgatgcttttgtgtgcacaacactataaggagttgcccaattcaccaagtcagcccgttcacacccttagttaaggtggccattaaggggccagggggtggcaatcagtaagctgcctcctgcctaactctctttctccaaccattctctataggctccagcgtagttgcgagccctgtggagacaaagaagcgtgagagactgacaggaatgacaggcagtccccatcacctcccagctagcagccacacctccccgtacccagtgtatccaagactccgggccagctgcgtggcctggaggccccgcttgcccatctgacagaagaaaacgagatgctcatcttccagctttggcttctcagcagaatataaagcctggaaggcagctggctccatctgcagagcactctccaactcggacactggaggagtggagagggtagaagggaaagccagcaatttggcactcaggttcggaagctgggcctggaagggctgggtcctgggggcccccaaacaacatatgataaccatcccctacccccaccccaatttcaaggaacagaaaccgacaacttttgaatgcaagccactccctaagctgtgaggaggcggggcgggatgccccctcaggcgtccagatttggggaggtcaagagaagctggtctgcccctctcctctccgcctgctgtcttctcaaactggatgggccagttccgatgccaagatccgccccccatcagtccttcctacggaagctgagggctggctcccgggaatgcaggacccccataatcagtgccttccccattccatcctaaatgaggtcccattggcaaagaacctcctgaacggtctctattccaccacctgggcgtcccctctccaccctatacccgggatgttgagcgcccctgggatggtcccagctgccgcctcctcgcgagagcgcacgtcgaagagccgggcccgtccggaggctaggagtgaacggagttcaggaagcgagaccgtgggcgctgaggaaggggcgcgacagccttcaggaagagggggcctaggagtcacggccgccatggcatcccctcacctggcagcgcccctcccggtagggtgtgcacgaagacccctcagccacgccccttcgctccgccaccccactccctgccacgcctcaacccagaggaccaagagaaccgcggccccaggaatcccccgcaggtacctccagccatggtgcgcgtagcaaccgcgagtctccggagtgcggccctggcccgccctctcggcgcctgcaacatctcccgttccctcccagagctgagaccggatccggaagcaagggcaccgcctcccgcgccgcccccgcagcacctgttcgcggcgcctctagcaccaacccaccgcagaagcccttaacattctctagcttgggccaaaaacgacacaccggtctggcccaggaaccaggactccgggtaataaatgcaggagcagcaccccaccctgaacttggcacagcccttactggtcgaagagcaatgtgcccctcccttccagcccgtggcccacaaaaggaagaaaaacagacaactgtggctttgaacaattttatcttaaaaaaaaaaaaaaaaaaaaaaaaaaaagaaaagaaaaaaaaaaaacgacccccacaagggggaaggccccaagtgggcccctgcctgttgttctctctggctccagagatgtctgcataggcctcagcttctcactggccaatctcctcttcatgggcaccagccactgctaaacatccttccctcacttcttgtgtaagcttgctcccctgagccacaggttgcacatctaaacctcagctccagggaaaggaagaaccaatggaagtgccagagtcctggggcaagccagagcatcacctgtcagcaaacctctgctgggcactctaagcaagcacaggacaagccccagagtttagtgtgtccagtatccagcatggagacagcacatgcattgtgcgagaggagcacaagggcccaggggctgcatggtgggggtgggcaaggctgtcagtgcacgtccacattgtgtgtttcacaccactgcaggccgccatatcacagggcctcagttcaaggacacaccttctgaacttccccctgtcccatgccagaagtggggcagtgaaggaaaggggcacgggattaggctgttgctcctgggctatctgcagttcttgggcccaaagcccctgaatccccatagttagttgctgtcattcttgatgacgacctctaatccgtggtgccgcaactgagctcgaagcagcagattcttgtttttaagatcttccacctgacatgggaaggaggcagtaaagggaatgggtagtaaagctggcacttccaagcccctgaatgtattcagacatccactggtgagggggaaaagatgaagccttctccatggagaacaaagtagagggtgtcaaactgggtcagtggctagcagaactgagaagggctgcactgggggtaggagtctgacctgttgtcgaagcacgtcattgtccagctgcagttggtcaagtccctgcagttcttcagacaagcggtggttactctgccgaagctcctggatataatcacaagctttggatagaatcccacctttactctgcaagataaggtcaacaaaatgagaactaggatttcagatacccagcttgctttccaaaagtaggttcacactttggacctcattttcatctaaggaaggtggtataatatctcccagggatacaggaacctcagggagagataagactactgtcatgtgtgcccctctctctaccatttctggaaacaataccaggaggcagaattcaggcatcctgcccactaccagggtctttccatgacctggccagacttggtgctctccatagagcagtctgggattatcttggagagctgcacgatccagttgttgatcttgtctcggcggcgacgctccactgtggggcaaagtggaggacaaggtgactcagtgaaaactcgccacaagtcccagggtaaaattacctaatccctcctcccctcagacatcactgctgagatcacaccagacagcttctagctccacccagatcatacctaccttcattatgctgagccctgcgtttctcatcccgagtcgtccggggagcttctgacttcctgacaacagagcccagggtggccagagtaagaagacaaaatacatgattgaagtttggggttaaggaattatacaagatttagcaggtattaggaccacttatggtagctag

SEQ ID NO: 2324 - DNA, 4001 bp, Homo sapiens
tatcatagtattaatcgatacataccttctactgtctaaacgctggggctcctttagccagtgagcaccacatgagcaaaggagaaagggaaatttacccaacatgcaccatatgcaagtaaatacttcagatgtggtttgcctacctacaaccacttaatggttaggacaaaggctttgtctggagcccgacttcatgggttcctcctttggcagctgtgggatctcaagaagatgacaatttcactatgtttcagtttgttcatctgagaaaatgagccaccatctaatgaggtggttattgtttttctgatagactaatatactaggctcatagacctaaagcacttataacagcacctggcatacagcaagcactcaatatatgtcggctacttctcatttccctcacagcaccctcgtgaggaaaataaaaccccacaattaggtgaacagtgttttccacttacagaggaggcattttacaaagacaggtaattcacttgctcagagatacagaaagtgacagaggtaagtaaatgccattctttctccaccgtgcaaggctggccgtgttacttacgccgttaccagctaaggcctaccgcaaaataaaaaagtcacaaacctctcagtgagtgacacttcctcaaggaagtcagactgtactaaaaggaaatcagattgtgctaatcttgacgtctcatctcaactaaaaaaaaaaggtattgttttcccaggtacacaatgccgaagaaaaccactgccaagtcttaaaagcaaccatctcccagtgggttcggtagaccccggtccttcccaaagcaagccataagggaactcacatagagaagggggaaagagaaagggaggagattgatgggtaaaaagacccacgacagaacttcaaaacaaaaaaatgtacacacgtattttgtcccagaggcatctgctatgatttattaaactgaagccaatagcgcccattcttaatgaatgagctggcgtagctccaatacacacacggcactgacacacaggctcaaggcctgcaggggccttttttccctctgggagacacctgacagatcgcaggttgatcttaaacaactggaagcaagatgtcaacgagcagataagatgggcttgctctttttttccattccagggatccaatttttaggaactgttgtatacgagacattaacccgggaggtcaggaagcctgatttccaggcctaagatgtgccaggcgtctccctccgggggcgggctccgcaagccgccgggctggttgctcgtccgcccgcccctccctcgccccttcggcatcctcgggaggccggcggcgggaacagggctgccccgggccacctgccatctcctccgccacccttccaacagttgcttcagactcaggagagaggccgccctggccccaggagcatgctgtcagctcatttctcgactcgccgccctgcccaaaggcggctgcaggagggcgcgcggcggcgtgggtggcagcggcgggaagctgcccgccaggacccctggccgagccggctcccgcggatcgcgcgccgcagccggaggcgtgaggcccgggcgacccgtaccccggcccgggaccccagccccgctgccccgccgccccggccgactcggacgcccgccgccgcccactcaccgccgcactcggcagagtactggtccccccagtccccggactgcgggctgcagccgccgccgcccgccggggcctcctgctgctgccggtgctgcagctcctgcttgagcagggagagcggcgagtagtgctcggtggccagggcgcctggccgcagcccggcggacaggacccccagcagcagcagcagcaggacacgccgggcggcgcccgcggcggccacagcgccgccccagaagcagcagcagcagcagcagccggcaggtgccatcttccctcaaggcgcatgcgcgacagcccttgcccggctctcaggcctccccgcctctaacctacggcgggcaggtggaccgtggcaagggggcgggacaaggggagaagcattgtgtgctgggaatggtagtcccagctcggccagcccggggccgccttgccggtgccgggactacgaatcccaataagcccgcgcggcgcaagtcttccggtctggcgtctgacgtcttaccctccacagaatcggaagttctggactgcagttgagtggaaatgggcaacggcgggcggagcggcctgcagcaggggaaggggaacgtggatggggtggcagcgactcctactgctgcctcggcctcctgccagtacaggtgcatcgaatgcaaccaggaggccaaagagttgtaccgagactataaccacggtgtgctgaagataaccatctgtgtgagttgtcaggtgtggggtgcccttgagaagaaaatggcgcggcgggatttggggaccgcgaggagcagggtcctctgatacagtctttagttcggtagttgacattcccgcccgggatctttgcatgaatatctgtactgatagagaactcagctacccgacagcgcttttctcatactggggcatatttgggtgatatgacctaagccggcgaacggaccggaccgacagacagaggtagatgtgggcattttgcagagaaatttaaagatcaattaggttgacattttggttcatgccaaagctacttccttctagctcttctccctttgacagagagatggtaccatccttaccctccacaacccatgttgaattcacctacgatgctttttaaaggtttcatcaattgtcgttattggatgtctacggtgtacaaagcactatgctagacgttggtggtacaaaacccaaaagtgaggaagtaaaaattctcatttcaaggtgttcgtagaataccttgaactttctgatgattttccatctcagagttaaggcccgaatccctgaactggcttataaggccctatggagtctcctgctactctttcccttctttattttacggcagagagaataatcttatgtttaaagagtctacaaagttggaggttctttgggggtattaattagcaaagaacctgtcacagaatagacagtacatttttgtcccatttcagatcttgtgattttctaatctctttagtaaattatggtctgtagtaatatacaagagaattgacaaactgagtgtatacctgtataatctgccaaccacataacgttctgatgcatacaacctcaatttcctgttcctctctcaagtactttccctcttttgtcaaaatgtcaacccttgttaaatccaacatattgcctggtcttgtccctgtacccatgcagcagtacgttgctggggaaaaacaaatttgtgacgattaacctcatataggcctttcatgatttctggcaatcttatttcggttttttttttctttctttctttctttttgagatagagtttccctctgtcacccaggctggagtgcagtggggcactctcagctcactaaaacctctgcctcccaagttcaagcaattctcctgcctcagcctcccaagtagctgggattacaggcctgcaccaccacgccgggctaatttttgtatttttagtagagaccaggtttcaccatgttgaccaggctggtcttgaactgacctcaaatgatccacccacctcggcctcccaaagtgctggggttacaggcatgagccactgcgaaaacagaagagaacttccaccaggtttgcaacaacataaacccaatactagcatttgttatttctttactgtactgtcttcttctgccttctgctggatcattcccaccagcatgcatactgttacttcttccatcaaaaaaaaaaaaaaaaccaacaccaccaacaaaatacacttgctgccacttccccctttagcttctgctctttttcttcttaattagaaagcagaccttctaagatatgt

SEQ ID NO: 2325 - DNA, 4001 bp, Homo sapiens
tcactggggaatccccactgtggccgtgttcccagagagggaagagccagcctctgatagctacccctgaatcactgctttcctgctcacctcctccaggaaggcttcccccagtgaacggcctcctaagagcaggaaagtgcctcagagaccatgtagcccctgcttcctgcacccctttcacagatgaagaaaccacagcccagggagaagaaggccccactgtgggtagtgttgcagctgagacaagaacctaggcctcctggctcctagcccagggctcttcaggcccctctctgctgccatgacctgctgtcatgaccgcattcaacacatcaatcttggttgtgccttccactgaaggtagcctggcattcagggccacaggctcaggactgaaacaagagacctgggttcttgttgacctcatgcaatcagtggtcatgtctacacccagcttaggagcagaggaagctctcccagccggggagagggaggggtcatctgtgaccctgctcatccctgtgcaggctctttctaggtgctttacaaatattaactgttaattatgacatcaaccaagtgagggatgtccctgttttacagatgacaaagcctatgacatatgtaacattactatctccatcttacagggaggggaaaggagcttggtggtgctaagcactgatttgaagtgagtgagcacgggggagctggaatttggatccagaccatctaacccagggtcagctctcttaacccctaccctgcatgctgtccttaagtcaggtccatgccctacaacctgtactttctgaggtcttgactctcacatcttctcttactgaagccatgatcattcatggaaaaggcactgaggggagtgtgcggagcctttgtgaagggagctgtgcttccctgtgctcccttcacatggaggtgagggggagagaagaggtgggaatgtgcccaagtttctggcaggatgcctgactgtgccttttacttaggtgggtgtgcacaggcgcaggaacaggcacttgctgggaggagcaaggtaagaaggatgaattgtccaggttgggcttgtgctgtttccaaaagagaggcttgggcaggcagtcccactaggaagcggttccactcccaggagagagctacaggcctggctggggcaggcgggggatgcacattggaaaggcatttgggaggccaaaagaccatggttgagagagagtcaggggtaccggggcatctctgcagacagaagggaccatgggaggaccacagtcctcccagagggaggtagggagacaggggtcacctacctgctgcccgtagcctagcgccttgtcgtagagcgcgatgcctgccgccagcccccgcgcacgctcctctgggctggcgcagccgacgtcgaagccatgcgcgtagccctgctcggccaggcagcgagcggcgcggagctgggggtccccggcggcctcgggctcctctgccaggcccatgaggtcggccagccgtgcggcgcacgcctcctcctcttcttcctggcccagccgcccgtacacgtgtgccagattggcccaggcattgaggttgcccgggtgctcgtgggccacctcgaggaagcactcgcgggcctcgtccagctcctccaggtagaatgcgaaagcgcccaggaggtgacgcacagcggggcgctgcggggcggccgccagctggagctcctgccgcagaccctcccgctgcagcttcaggtcccgggcgcgctgtggggccggcgagcgcggctcgaagttcaactgcatctccaggtgaaagtggcccgggaggtagtccaggtcgtcgatgagggcgtctagatcgtcggccacagcctccagctccgccatgactgctccctctgctcccctggcctcacccttgtccctgaggctgtggagggcagtggatgggggcgttccccgagcgagctccgtgcgggaggcgaggggcagccggcagaggccccgggcgctgcggcctctcggtctcagggcgcctcccgcaggtgggtgggcccgaggagtgccctgtaggtgtttccgctttcgctgctcagcggcttctagacgctgacattgcacaaccaggtgtgccagaaaaacaggcacattgtcaaatacggggtgcgcaaacctcggtgcaaggcaaaaggcgtgtttttacgctgctaagcagaggaggaaactgaggctcaagaggaggaagagaacttgcccaggtcacagagctggggcgtacccaagtaggtagacctggaaccccagtttgctgaaggccgggcccttcctccaggggcgctgctccgccctgtctgcttgagctgagtcaggactggccgttctagctgcggcagccacccttactcctgccgctgtcccatcctctctgcaggtcctcagtgcttttcctctgaatggagcctgccacctccctcctctctttttgggccattatttatgaggcttccttcctgggatttctctgcgccctctctgctcagcagtgagctcctgtgcaaagactatgggctgcatgtgctggttctaatcctgcttctccaaccctaataaagtatgacctgccacactttcctcacctgtgacatgaggatgacaatccttccgcatttatcaggtaagcctgataaatggccactctggataaatgtcagctcccactcctccagcttggttcccatcccatcttgcactccacctgtggtcccagttttcttgctttggcaaatgtccctcccaggtctagagtggtcccctaacctctagcctggaggctgggtggcagtgctccctgctgcaggggccagttcctcccgctcttctttccacctgggcctggctcctgccatccctgttgtttcatcttgacagacagatgaaatatatatctagatgaaatctagatagactatctatgaagatatagatgtaaatatttatatttcatatagatgaaatatctatgtatttcaagatgaagcaacacagaccagcatttcaaaagaggaaataaagccaattagtaaacttgaaaaaatatttgacattagcaaaaaaaaaaaaaaatagttaaattaaaacaacatcctggtgccatgtttcacctgtcaatttttaaatataaaattaattttaataatttttaattgaaaattttgctataaattgctggtgatcctgtgataaaactcgttctctcacctgcttgagagtatcaggggtggattcacagagggtttggctttgaaaaaaaaattgcgggccaggagcggtggctcacacctgtaatcccagcactttgggaggtcgaggtgggcggatcacctgaggtcgggaatttgagaccagcttgaccaacatggagaaaccccgtctctactaaaaatacaaaatttgctgggcatggtggcatatgcctgtaatcccagctactcgagaggctgaggcaggagaatcgcttgaacccgggaggcggaggttgcggtgagccgagattgtgccactgcactccagcctgggcaacaagagcaaagaactccgtctcaaagaaaaaaaaattgcaacaacgtatacttaacaaaaaatttacagtgttaaccattttcaagtgtacagttcagtggcattaagtgcatgaatgctcccctggcctcgtccttgtccctgagggcactgctataccactgttcctaccttccatctccagaacttcatcttcccaaatggaagctccatacccattaaacaataactcctcattctctccccacccagcacctggtacccaccattctatttctgtttcagtgaattcaactattctagttaccttacataagtggaatcatataatatttgttgttttgcgactggcttatctcccttagcatgtcttcaagattcatccatgtggtagcacgtgttagaatttccttc

SEQ ID NO: 2326 - DNA, 4001 bp, Homo sapiens
gaaacattggtcgccgtgtcgcctgccctgtgccttctcttcagggtgggctcgcaggagtagctcaaggcctctggctgggtccccagtctccacataggcagcccccaggttgaaggcgcaggcctggagcacaggggtatccctggtttgtggggccttggaggccagaaggaaggccctctggaagttgttcaaggcttcatggttctggccagcctgaagggccccatggccagccctggtgagggcttggatgctggcttcttgccgcagccactttcttttcttctttttcttattggagcttgagggctcaggttctggcctccggggcacatcctcagggttgggggaagacatagggctgacaaaggggaacagagggctcagtatgtcagccttggcttcctctagatagcaggacccccttagggcaattcagctctacccctgccctagcatgaccctcagggtttcaaggattgctctctgatctctcactttgtttcttctgtcccattgggcaccatatccactctcactctaacttcctgactaattcttagtcctccttcaagactcaagtcaagtaacagcttacttcagaacgcaccttcttctcaaccaactgggtactcctgtggtcccatagcacttgatgcctatgtcttttatagcatttatcacactgggtcagagctgatgactttattgtcttccccccactactagatttggagcaacttgcagggtctggcacacagtagattctcaataaatgtttatgaaaggagatgaaaaagttctggagatggatagtggtgttaattgcacaataatgtgagtgtacttaatgccactgaactgcacattttaaaatggttaaaatggtaaattgtatgttatgtatatgttaccaccatacgagtgtttttggattgaacaaataggccaggtgcgatggctcacaccagtaatcccagcattttgggaggctgaggtgggcagatcacgaggtcaagagatagagaccagcctggccaacatggtaaaaccccgtctctactaaaaatacaaaaattagccgggcgtggtggcgggcgcctgtaatcccagctactcgggaggctgaggcaggagaattgcttgaacccgggaggtggaggttgcagtgagctgagatcgcgccattgcactccagcctgggtgacagagaaactctgtctcaaaaaaagctgcaaataaatagatgaaggaaccgcatatgcagggcctctcctccataacttccttcacactgtgcctccacagacacccccctcactcatcatctaggtactcctgctatctaatctcaagacgtagttcaggtcagttcaacaagcactcagtgagcccctgctatgtgctaggaaccacactaggcactggggaccctagggtgaggaggctcctgaattggcaaggagcgaacctccaggagagaaggattttctgaaaaggagtgtggtgtgggacagaacatgcatttactgccccttccctagctcaaggggaagctctctctccatttcttccgctttctgtctgctggctggttctaggcccccagcctcctgctctggtctccagagccctcttaaacctgaatacaagcatctcagcagcttgtatatcctgtttgtatttttccccttgaagggcaaaagctttttatgaactctcctcccaggagatgggaaaaagagtggaaaagacccaggccctgggctcttgacccctcccattttatcctttttttccccttttttaggaggggcaggcagaggaaaagcagtctcttttaaaagaaattccccctgcttctaagaacacccagaaatcctgccttttcaaggccttccactccagggcattcctgaccacccccatccagtgtggggatccccactgcaggacaccttacctccttgggtcttctccgcagctggctctctggaatggcccctctggcttgggttacctcccaagctgttagctcaaagccctagaggttactagacaaccaggtaccaccctccagtcgtagggaattatttgagtgacagctctgaagccgtatcttagtgctaaacctcggtagtgctgcagacacaccccctcaagtccctcacttcaagaaatgaatcaaggcatcagaggggcgcttactagttacaccctcagaaatcatctacttcatcccctcatttcacagaggaagggaccaagcctcagacagcagatgtgacttaactaaggtcacagagcagtcacgtagctggggttagactctatgtttttttttgagatggagtctcactctatcacccaggctggagtgcagtggcgccatctcggctcactgcaaccgctgcctcccgggctcaagtgatcaagtgattctcctgcctcagcctcctgaggagctgggattacaggtgcacgccaccacaaccagctcatttttgtatttttagtagagaaggggtttcaccatgttggccaggctggtctcgaactcctgacctcaagtgatctggctgccttggcctcccaaagtgctaggattacaggtgtgagccactgcaccccgtcttttttttttttttttttttttgagacggaatcttgctgtgttgcctaggctggagtgcagtggtgcaatctcagctcactgcaacctctgcctcctgggttcaagccgttctcctgcctcagcctcctgagtagctgggattacaggtgcctgccatcacacctggctaatttttgtatttttgtatagactgggtttccccatgttggccaggctggtcttgaactcctgacctcaggtgatctgcctgcctctgcctcccaaagtgctaggattacaggcatgagccaccacgcccagccaactctaggttttttgattcaaggtgagtagcctagggtcccttccactacactgtgtgattgcaagttgttttttttgtttgtgtgtttgtttttgagacagaatcttgctctgtcatctaggctgaagtgcctagatgatcacagctcactgcagcctctacctcctgggctcaagcgatcttcccacctcagcctcccaagtagctgggaccacaggcatgtgccaccacacctggctaataataataataataataattattattattattattattattattattattattatagagatggggttttgatatgttgcccaggatggtctcaaactcctgagctcaaatgattctcctgccttggcttcccgaagtgttgggattacagactgcacccggcatgacctgtgatagcaagctttaatggggcttgagctgtcctggaagtgaaccctttctctctctctctctctctctctcacacgcacacgcacgcgcacacacacacacacacacacacactctctctctctctctctctctctctcttacatactgtgcttctgtgtggtggtttcacatttgggaacagggtgaaagattgatagtcaggaaaggcctggagatcagaagagactcccccaagactcctttttccaactccactgatctgtgacctacagtttctgcttaatgagaggacagcaggccccaggacgaagggaatataatgccccaactcaccaagggtggcctgcatcagaaagaaaatgtcctcattgcctagggaaaggcctcttttaagtaaagaggcctttgccagaaacaaaaattatgaagtgacggggctcacctgcgtttggcctgcagcctttgctaaatgcctgctatgtgcaggcatagtgctgggtgctacagatggtgctgtggcagagtgaaaaaatggcttctccctacccttctagattctttggctgggctacaaattaaattgacataagacagattagcaggagaaaaaccattttaattacagtcatgcttcgcttagca

SEQ ID NO: 2327 - DNA, 4001 bp, Homo sapiens
ccatcagcagtgtggccagctggtgcacgccgcaggcgaccctgtgtggagatcagctcaggggggcatgccccttttgacaacccctccacctgcccaggtgattgggcagtggggaaatcccgtctccatgtacctggcctgggcagctccctccggagggaccctcacgccacaccatccccagaagccaaaggtgcccttcctagcatgcggccctcacgctctcccttgcccttctcctaccctgtgggaggtgggattgtggcggtatagacaggcagaggcagggctgaccctgtgtggaccctgcctcagtttccttttctgcaaaaacacagacgaacaatttggccttgctgggctcaggggtgtgcctataggcagaacaagaaaacacatggctgcacctggcatgttcctgtgcccatgtgggaatgttactgagtgctcactgggaaatggggccagatcctcaaatttgacaatttccagagaacaaatataaatgccatcacataatgaaagtttcttaccagcagcaaatcaaagccacgcaaattaaacacccagaaggcagaggaactctgtgtgttttgtgtgcgttatgtacatgttgtgtgttgtgtgtgtgttatgtacatgttgtgtgttgtatgtgtgttatgtacatgtgtgttgtgtgtggtgtgtgtgttgtatgtgtggtgtgtatggtgtgtgtctggtgtgttgtgtgtgtgttatgtatgtgttgtgcgtgtgtgtgttgtgtgtgtgccttggggtggacgctgacatcaatgatgcccctccaagaaccgcccccaccccccggactcagtgcttttaactttgctgaaaccccttcctgccacctcccagcaattacacgagggaagtcaaagcagctagggattcacccactgggctttgggctggcaaataatttgcaaaatgagcatcaagggtgagtgggggatgggcggtggccagattgtggtgggaggagggcagctcctgaagtcaaggatcctacaagtggcggcgcttcctgacccgggaactgcatgcctgtctccgtctcatggagagaacatcctggagacaggacattacccacgagggattacagctaagaacaaaggccaggcgcggtggctcacctggaatcccagcactttgggaggcccgggtgggaggatcacttgaggtcaggagttcgagaccagcctggccaccatggtgaaaccccatgccactaaaaatataaagattagctgggcgtggtgatcccagctacttgggacgctgaggcagaagaatggcctgaacccaggaggcggaggttgcagcaagccaagattgcgccattgcactccagcctgggcggcagagtaagactccatctcaaagaacaaaaaacaaaacaaaacaaaacaaaccaaccccaggactgctggaaggagtagtggcaggggcgcaggtcggggcggtgctgccggaaacacatttagccacaaagggaatcgtcatgacctattgagtaagaaaattagcatatgaacagcatgtccagcacagactcggtttggtgagctattttacatgcaccaaacgaaaggcctggaaggaaatgtgagccgcggatttccatttccggactgcggcccggtcgatggaagcagcggagctagacctgcctcgggtgctttgggaagtcaccagccactgcctccgttcattcctttgtaaaataggaggaaacacatccgtcgctacctcgaaggagacccgcaggaagcagcggccccagcgtgcccgggcgggtcctcacccctcctgcgtggtggggccgcccgtctctgcggcctccctccggccctgcgctctggacggcccggcgcgtggagatcgctgcagcatcccacgggcctcctcccgcagcaccaccagcagcagcccccgctggttccagggcacgtaggccttggcggccagcagcgcctcctcgggccgcagcctgcaggcggtgacatagtccagcgtgcccaggaacgcgctgcccgccagcacccgcagcagtccccggccgcacagcgcgcgcacacagccccccgggtgcggcgccccctgctccactaccgtctggaagtcctccatggcgcgccgcgagtccccggcgtgcagcgcgcagaagccgcgcagagccaggagaggtgcgcggtcccctgcacggtcccccgcagggtcctcagggcgtgcgggccgcagcaggcgctcgcacatggcccgggcgcccgccgcgtcccctgccagcagcaggcactcggcgaggcgggctcccagcgcgggtcgcgccccggcaggcgccaggcgaagcaggacgcggagcgcgcgggttaccggggccagcagctcgcggcccgcatcctcgcggagctcagggtggttccgcacggcttcctggaagcgggcgaagcccacgtccgcggcctcctgcgcctgagcccggacgcgctcctggtcctggacagagaacacggcctggaactgcctccgcgccccagaggggctctcgcggaaggcctcctgcaggttccaaaacacgtcctgggcccggccgtccaggaagaaggccgaggccgcgcgggtgaccagcagggcggctcggcgctcacctgcggagagaaacagaggcgtgggttctgcctggggggccgactccccgggggtgccacctgcaagtccccaccaggtccagggcttggactcaggagactgtgagtcctcctgcccgaggcatctccctccagtctccaggtggccctgggtatggcaccgccaggacaccagctggcaggaggcccgacgcccatgagcgacggggcaggttgagaaccgtgctgggcaagcggcgagggggcagccgcccggcctgccagcgacactgtgctctcagggtgggttcagagtcactcccaccgctcagtgcaaaccaaattcagttacaacgcctttcccttgcctgacatttaaataatgggttttaggattgagtttcctcctctgggaatcagtgcccctccactcccagggcagagctgaagctccaactctatgacctttgcagtggccatttattcctgggcgcctttgtttcttgccttctttgggccaagtggggacccagcccttccctctctgtagcagagctcttctctcaggtctaggactggaggggcatgccctgctgcttactgagggtggacctgggcatttacggagtctcctgcgtctgttccctggtctgcactataatgggttataatgatccacgctcgcagggggtgaggattaaacggatctacctacatccagtgcctggaaggggcctggtgcatcgtgtgagtcagtgaggtcaggggcagcatccccacccccactcccccagcaccctccccgcgcacctgccccccaccccagtgtgtctgagcaaacgtgaatggggctttctgactggtaagggaagtgtagctgccccatcccaaaaagggccccaggcagggtgcacaggccactgggagaggcggggatactccgtgctgggcgggcttcaggtcatggcccttattttcacaggttacgaaggtgctgcaggggagggacgttctgagggtccatcccagacctctgaacctctgcttcagtgctttttgcactgactccttcagaattttcaaacagcttttccttataaccccattcaatagcaacaacagcaacaatctgctgcattcaaacaggattctggagagggcaaaataccacgcagggcacagaagcaaagccgctgcggtcactgccctgctgctgttgcggtaagcgccgagtccagcacagaaggtgtctcgtgccctgagactagccatgcaagcagccacaaggtcactctgtctagttctggtggccaaagtaaaagacactttgagcctttcctg

SEQ ID NO: 2328 - DNA, 4001 bp, Homo sapiens
aaacagagaaatgataaaacctaaattcaggatggcaagtaattctggagagggaaggagggaagaggtttccacaagactttcaagggtctctactatggtttatttcttaaaaagaatataaaataaatggggcacaatgttaatatctgacaaagttgggtggcaagggtttgtgagttcattttactatttgctatatttttctgaaggcttaaaatatttcataatttttaaaaaggtagagatttaaggcttgatttgttcaccaatgaccatctgggcccagagcaggccttgctgagtgtctgttgagtgagtgtctctgtagtgaaggtgagaatggtcctgctgcgtgcggccctcctctgctcagaccccaccaggatgacactagccagggttggggacagatggacaggtggcttcaaagaagagtgggcaggcatgcagagaggcaggtacggttctgcataaggaagacccaccagcgtgagaagagcaagcttgctgtcctgaggcctgcagcagggccagaggtgcccggggttgtagagggcacttaggcagggatgtaagcatataaggaagtgggatgaatgtggttttcagccagggagtctagacttctttgatagataccttgctccatgcccgccttctctcctggaaaccacttttctggacccagcagggtggtggtgctcagtcagggctgcacagaaggaacctacccaacctccagctttacaaatacttgagcccagaacaggaaaggaacagccagccccacttctgtgttttccaaaggagggaccagaagtctaggaagggttaaggacttggccaaagtcacacaacaaaaatgatgaagctgaaactcaccaggcaaccctctcccaggccagggtgtcccccagcaacccagcttccaagccctgatagagccacacacacgcaagccctgtggagacttccagctgccagctggcaccagcctcgtcacctccctgttcatgtgtcaagcctcgggcccttagcaaatattgtcactggtggtgaggctccaggcagggtgagccctcctcccagctcacctgggccggctctctgcccagcaacctcccagcagtcagggctcctagcagctgccccctgccctgcccactggggcccaggaaaagcagagagttgctgaaggtctcccggcagtagcggctgtcactgctacggggggtgatctaggtaggggtcctataggggtttctcagtgggatgtgggtagggttgggcaggagagccacgttgaaggtgacaacacccactttttactacccaggttcctgctgcacccaatgggcccggctggcccataccttagctgtttaagttcccctaatgtccctgaagatgatggggtggggggatctgacaacagacagaactgagttcaaatcccacccgcaactcttacctcctgggtgaccgatgacaagtcacttaagtgctgtgtctcagtttcctcatctgtaatggggatgagagtaacagggcccaccccacaggagtgaacgccacgaggcaggtggggaaggctgctctgaacgtgtctgtgactacagctccgtgagaaagttgggacccagaaggtgagtgaccgacccggggtccccgcgcctccgcctcctcacagccccctgcccccactcctggcagcggcggcggctgccaggggccgggcggggtgggggctggaagccgcagtgcggccccaggccggtgcgcggggggaggcctggcgcggcgcccgccacctgcccgggccccagcccgcgccgcccgcgcccccgggcctcccagccgcgcacttaccccgcgggcagggctcctggggcgccgccagccgaggtcatcgccgaggggcgcgggcggcgctgccccagccggacgccaatcgcggcccaggtgctgccgccgcaaccccgagccgggcgctgtgcggtcgcggacgcggcggccggggaggggcgcgccgggggcggggaaggcggcggggccgggccgagcctcggtctccccacccgcaccgtagggccatggccgcccgcggcgacccgcgctcccgcaccgccgggggttctgggcggcccccacccccgctccgacaggtgagagcccggcgccctctgcgcagacaccgcccgggccgggagctcgctccctcctcacacgtccccacctatttggcgctagaagttcttctccgggacctgaggtccactttactgtcacttctcctccccacagcttccgccccgaagcggcccccacctgagccgtcaccatcctcccgcattaatgggggcattcgtgcagacaaagacagcccccagagtcaggcctggattttaatcccaccatctcgcccactgagtgactgcaggagaccagaaggcggggaaaacacggtttagcactcactgctagctggcagttcacactgccttctcaaatgatccccataattgctattttacagatggggaaactgaggcatggggttcatttgattcacgcatggtcactcacctaataagtggcaagctaggactggaatccatccctcctgaatccaaagccaacactctggcccctttcccccttggccccctctcccctgcattcccagtgcctgtgtgggggtcacccacaacgctccccaaatgtccactgtgcaccgagccctgaggcggtgtctccacctgacctgatcttctggcacagaaagccactggcccatgaagagttaaccagtcaccatctcctggccccagatgctgctcttaaccatgactcatcagagcatgtggctgccattagagctgtcccttcacaaaggaggggacagaagtaaggaaggactgtagctcccctggagcaactatgacctccaggacgtcagaagaggaagcagaaggggacagcctgcagaagcaaccacggtgggaacaggacttgtaccagatcccaggggagccaggcagtttgggcttggtggtagctgcttaaaatctaagcaggctgcctggaaaggcagtgaagtcccatcctgcccatttgtgagcaggggcagatgctcacttgcaagaatcatcccatctctaggagtctcatatacaggcacgaaaaagataattaactactagaagtaagctatgatgacatccaccagcaactataaagaatccagacaaggggagagactggggagcttcctggaagaggtggtgacagaactgagccttgaagtttatattatttaaacaaactgaagtcatggagagggtgtaccagatcggggagcagcatggatgaaggcatggaagtgggaaagggtgaggctggtgagaccacaagcaatacatgtaaagaggatgatgaggctggggcccctatcacatgtcatgcactttcaaatctctaggcatttaaacatgctgttccctctgtgtggaacacaccttcctcccttgtcacttgttagtcattcatgtaaccgggggtggatccagaagcttacaatggggaggccgctgttcaaaaaaagaatacaaatttaccaatacaggttgagcattcctaatttgaaaatccgaaatccagaatgctccaaaatttgaagctttttttattttctcttttttttgagacaaagtctcactctgttacccaggctggagtgcagtggcacaatctcgtgatcttggctcaccacaacctccgtctcctgggttcaagtgattctcatcccacagcctcccgagtagctgagattacaggcatgtgccaccatgcccagctgatttttgtatttttagtagagacagggttttgccatgttggccaggctggtctcaaactctggacctcaagtgatccgcctaccttggcctcccacagtgggattacaggcgtaagccaccgcgcccggcctgaaactt

SEQ ID NO: 2329 - DNA, 4001 bp, Homo sapiens
agccaccctactcctccctccccagtgcccacagctcagggtggcctggctggtctgtccatagcggcctacacggtgggagtggcctacacagtgggagcacgatgtgggacccaccgaaataattccacttcgtcgtccccgaacggcttgtggtcctccttcccaaacatgctgaggtaggcggccttcatgtaaatgtaggtggcctgtgcgagacagagcaacagccaggtgtgagcagccctcctccagccccagccgggctggaatctgcagacggacctcacgtggcccagcacaggagctcccgttgtctccaagccccaggggagaaatgaaggtaagaagctgaagcaacttgaagacctgaatccaggacaacccatgtcaaagcagccaccttcttctccacttgaagcagtggcaagaagaacccatgcaactagtaataggcaggacagactggggctgcggcagagacacaaggacaggggcgcactcggggcttccgggaagcaacagcttcacagtgggcccctgaagggcaatggggaaattccctgaggccccagacaggccttccagccaggaggaagaggctgagcaaagccaggaggtggcaggatgtgtgtggactaccaataggaggatgaagcacgggctgtaaaaagaagaggcttgagccagaaacgtgagcagggcctgggtcgggtcagctcgggccaccctggtagaactaactgccttgctgtgtgtgccaggcacaccacatccagcacctcgcttgatcccaaagccaatgccagaaaggagtccgtaccccacctctgcttcctgggaccccagagctactggggcagagccgggagtcaaccccagcaccttgcccactaaatgcacagccagccctgacagggaaaccgtggccctgcgggagaccccctaccccacccagtcctccctgcacaccacgccccttcctcagaagtcctgagacaggagcctggctctgtgctgccctcaagtggccaagccccgaaccacagctcctgcctcctggctaagaaagggtggaaaggaaaaggcgccggacatccgggagtcctgcctaaagcaggcggaaagcggcctccacctggcagccccacccatgccggggcctcagcccgcccttcacaacatgagggaaagctggtcttcgtgggccacggcgggaagagtctccctccctgaaatctgttcccggtcccatctttttttttttttgatgtggtctcgctctgtcgcccaggctaaggctggagtgctatggcgcgatctcggctcactgcaacctccgcctcccaggttcaagcgattcttgttgcctcagcctcctgaatagctgggactgcaggcatgcaccaccacgccaggctaatttttgtatattttagtagagacggggtttcaccatgttggccaggctggtttcaaactcctgacctcaagctatccgcccgcctcagcctcccaaagtgctaggattacaggcatgagccactgcgtctggccccggtcccatctttaacctcccgggtcacccttgtcctctccctttcccctgcccctgacgtggagacaccaagtcccggtgactttacctcccgtctcactctaggatcctgctggccttgccctacggctctcattatcggactgccaccatctccacaccgtctccctgttccaggctacccgggatgtctttctgctgtcctggtacacattgtctcctatctccctgctcccactcctgtcccctgcaagccatttcgcacactgacctttttaagtcagatcatgtcagttccttctggaaatctggttatattccatcacactcaggagacatctcctacaatttccttgacacctgcagcactccagccacacgacggcctcagggcggttcccaggacacatcaaacacactcctgccctgctgtgccctgcccagctccctctgccctaacggcctgccatgtgactgccacgtgctgctcctgcgctccattctggtgtcctctgagacaggcttcccccgacctccccttacaaagcccctcccatcactccctgcatccagcctcgcttgttcttcactgcacttactggaaccagacatcgtgttatattgcccatctgtgtttcttgtctccccactaggacgtgagccttgagggggtcttttcctgctcatgcttgtatttcctgccttagaacaggacccagccagcggggtggcccagcaactgctggtgggctttctaaagcacctatctaagccacaagcctgccaaggctcccccactgctggataaagcccaaacagccactcatgtcctccaggacctgccctaacctttctttttctggctcatcttctgccatttcctcccctacactccttaaactctccccaggcctctgcctgtgctgctcctcggcccgggatgccattatcccttcaccaggctcatctccaagagtcttccctcctgcccacagacagctcaccctcactgcaccaccagggttaggatgggggctgtgacttagagttgtggacgccccagctctccagggatgtacaggggctatgctgggacaaaagagcagctgtcacccctgatgcaagccccctgcccttctgccacacaaactcttcaccctgtggcacacagcccctctgcagcgccctggcttctgagcctttggtcctgccgccctcttggcttggggtgtcctctcacttcctccactctgcctccctaagtccttcctctccaagacccacctcagaggtctctcctcagaagccttcctgtcctctttggttgcctgggcatgcctttagctccttgggtttcccaagccctgagcacgccactgtcaccaccttgtttctggccatctcagcctctaggctgccagcactgggggaaacacaaaggcctccacagggctgactgcaggagataggtcagggtggtgagaaaaattacagaaagaagcaaaccttggaaggctcggaggttttgcaaaagcttcgggaaaggatttggctgaaggcagctgaattctctcagagtagataacaagaagtaagggaattgatctagataagttggtttacttaggcctcggaacctggcctttaatcatcatgcggaggactgctctttctgggggggcgacaatgttaattacccacaaatggagtttgctttaggcctttgtcattacatctgtactaaataaatgcaagcgtggcaggcttatgggggccgctgctgactctggcaggggtcccccatctgctgacaggcaagcctgtgtctgcatactccgttcatccgtcgctcagccagggtctgcgggtcagacccagcagctgacctcggaggatcctggcagaggggggcgctgcctgcacagagcaggtggtgcctatggcaatggccagaggcccaggccccaggactagaagttggtggagtctgtggtggccaagttctggagattagaaatgggtggggccccagaactcagagggttacaacccccatttttcacagaagtcctcatgaggagagtgttgcagagagagagggactggccaccccaaagccacacagcggtctggggactgagccagatttcctgacagctgggaggcctggcccaccttctgttcctctatatagcagctgtgtgcccccaccaggtctctccttccccatatggttagccccagccacccacctcactctacaggaaggcttcgagagtcactttcagttcaaaaaggttccctaaggcccagaatcccagcactttaggaggcagaggtgggaagattgcttgggcccaggagttcaagactagcctgaccaacatagcaagaccctgtctctaaaaaaagaaaaaaggttccctgaggctttgtccttttt

SEQ ID NO: 2330 - DNA, 4001 bp, Homo sapiens
atttaagatcgagtgcacatatccaacaacccagcaattccactactaagggggcaccctcgtgaaacacatgtgcaaacaccatcatacaagaatattcactgtctgaatagcaagacactgggaacacttcgacatccatcaagaaggataaacaaatggaggtgtctacatagggtggtatatcacacatcagggcaagtgggacaagagctacaggatcaaggctaaatctgagacctgaagttgagtgtgaaaacgcgagctgcagcatgacacatgctataggactccattcacagaaaactttgaagaacaaactacatatttttaagacttacacacactgagtaaaagaataaaaacagagaaatgataaaacctaaattcaggatggcaagtaattctggagagggaaggagggaagaggtttccacaagactttcaagggtctctactatggtttatttcttaaaaagaatataaaataaatggggcacaatgttaatatctgacaaagttgggtggcaagggtttgtgagttcattttactatttgctatatttttctgaaggcttaaaatatttcataatttttaaaaaggtagagatttaaggcttgatttgttcaccaatgaccatctgggcccagagcaggccttgctgagtgtctgttgagtgagtgtctctgtagtgaaggtgagaatggtcctgctgcgtgcggccctcctctgctcagaccccaccaggatgacactagccagggttggggacagatggacaggtggcttcaaagaagagtgggcaggcatgcagagaggcaggtacggttctgcataaggaagacccaccagcgtgagaagagcaagcttgctgtcctgaggcctgcagcagggccagaggtgcccggggttgtagagggcacttaggcagggatgtaagcatataaggaagtgggatgaatgtggttttcagccagggagtctagacttctttgatagataccttgctccatgcccgccttctctcctggaaaccacttttctggacccagcagggtggtggtgctcagtcagggctgcacagaaggaacctacccaacctccagctttacaaatacttgagcccagaacaggaaaggaacagccagccccacttctgtgttttccaaaggagggaccagaagtctaggaagggttaaggacttggccaaagtcacacaacaaaaatgatgaagctgaaactcaccaggcaaccctctcccaggccagggtgtcccccagcaacccagcttccaagccctgatagagccacacacacgcaagccctgtggagacttccagctgccagctggcaccagcctcgtcacctccctgttcatgtgtcaagcctcgggcccttagcaaatattgtcactggtggtgaggctccaggcagggtgagccctcctcccagctcacctgggccggctctctgcccagcaacctcccagcagtcagggctcctagcagctgccccctgccctgcccactggggcccaggaaaagcagagagttgctgaaggtctcccggcagtagcggctgtcactgctacggggggtgatctaggtaggggtcctataggggtttctcagtgggatgtgggtagggttgggcaggagagccacgttgaaggtgacaacacccactttttactacccaggttcctgctgcacccaatgggcccggctggcccataccttagctgtttaagttcccctaatgtccctgaagatgatggggtggggggatctgacaacagacagaactgagttcaaatcccacccgcaactcttacctcctgggtgaccgatgacaagtcacttaagtgctgtgtctcagtttcctcatctgtaatggggatgagagtaacagggcccaccccacaggagtgaacgccacgaggcaggtggggaaggctgctctgaacgtgtctgtgactacagctccgtgagaaagttgggacccagaaggtgagtgaccgacccggggtccccgcgcctccgcctcctcacagccccctgcccccactcctggcagcggcggcggctgccaggggccgggcggggtgggggctggaagccgcagtgcggccccaggccggtgcgcggggggaggcctggcgcggcgcccgccacctgcccgggccccagcccgcgccgcccgcgcccccgggcctcccagccgcgcacttaccccgcgggcagggctcctggggcgccgccagccgaggtcatcgccgaggggcgcgggcggcgctgccccagccggacgccaatcgcggcccaggtgctgccgccgcaaccccgagccgggcgctgtgcggtcgcggacgcggcggccggggaggggcgcgccgggggcggggaaggcggcggggccgggccgagcctcggtctccccacccgcaccgtagggccatggccgcccgcggcgacccgcgctcccgcaccgccgggggttctgggcggcccccacccccgctccgacaggtgagagcccggcgccctctgcgcagacaccgcccgggccgggagctcgctccctcctcacacgtccccacctatttggcgctagaagttcttctccgggacctgaggtccactttactgtcacttctcctccccacagcttccgccccgaagcggcccccacctgagccgtcaccatcctcccgcattaatgggggcattcgtgcagacaaagacagcccccagagtcaggcctggattttaatcccaccatctcgcccactgagtgactgcaggagaccagaaggcggggaaaacacggtttagcactcactgctagctggcagttcacactgccttctcaaatgatccccataattgctattttacagatggggaaactgaggcatggggttcatttgattcacgcatggtcactcacctaataagtggcaagctaggactggaatccatccctcctgaatccaaagccaacactctggcccctttcccccttggccccctctcccctgcattcccagtgcctgtgtgggggtcacccacaacgctccccaaatgtccactgtgcaccgagccctgaggcggtgtctccacctgacctgatcttctggcacagaaagccactggcccatgaagagttaaccagtcaccatctcctggccccagatgctgctcttaaccatgactcatcagagcatgtggctgccattagagctgtcccttcacaaaggaggggacagaagtaaggaaggactgtagctcccctggagcaactatgacctccaggacgtcagaagaggaagcagaaggggacagcctgcagaagcaaccacggtgggaacaggacttgtaccagatcccaggggagccaggcagtttgggcttggtggtagctgcttaaaatctaagcaggctgcctggaaaggcagtgaagtcccatcctgcccatttgtgagcaggggcagatgctcacttgcaagaatcatcccatctctaggagtctcatatacaggcacgaaaaagataattaactactagaagtaagctatgatgacatccaccagcaactataaagaatccagacaaggggagagactggggagcttcctggaagaggtggtgacagaactgagccttgaagtttatattatttaaacaaactgaagtcatggagagggtgtaccagatcggggagcagcatggatgaaggcatggaagtgggaaagggtgaggctggtgagaccacaagcaatacatgtaaagaggatgatgaggctggggcccctatcacatgtcatgcactttcaaatctctaggcatttaaacatgctgttccctctgtgtggaacacaccttcctcccttgtcacttgttagtcattcatgtaaccgggggtggatccagaagcttacaatggggaggccgctgttcaaaaaaagaatacaaatttaccaatacaggttgagcattc

SEQ ID NO: 2331 - DNA, 4001 bp, Homo sapiens
ccaatgggaaaagcaataaaattattaactctagaaggaaatagtctcgcacatgattttctttgcaataagcattaatcacaaaggtatagtaaggtaaatactgattctttctttcttttcttttctttttttctttttctttttcttttttttttttttttttttgagacagggttttgctctgttgccccatgctggagtgcagtggtgcacaagatcacagctcactgcagcttcaacctcctgggctcagataatcctcccacttcagcctcccaagtagctgagactatagctactatatactatagctgagactataggcgcacaccaccacacccagctaattttttgtatttttttttgtagatatggagtttcaccatgtccaggctggtctcagactcctgggctcaagcgatctacctgcctcgacctcccaaagtgctgggattatagtcatgagccaccacgcctagttaaacactgattattgatttaccccaatattgtgatataatgacgagaaagatgagggaagggaggtggggcaggggtgtaagaaagctaaattctcatctatcagtagatgttttctggtttttttttttttttttttgagacagagtcttgctctgtcacccaagctggagtgcagtggcacgatcttggctcactgcaacctccacctccagggttcaagtgattccccttcctcagcctcctgagtagctgggattacaggcacacaccaccacacccagctaattttttatatttttggtagagatggggtttcaccatgttggccaggctggtcttgaacttctgacctcaagtgatccacccgccttggcctcccaaagtgctgggattacaagcgtgagccaccacgcccagcccaataaatgttttaaagtgataagaaagggtgagttttacggtatctgaattacatctcaatttttaaaactgagaaaaagtgataagtaaagaaaaaggagtatacgcccattattgatttgtatttacagaaacatggcagtgagtactcaaggaaatggtcaagtgagcagccctcttgattgccctaaaacacccaggaaagcaggcaacctaagtctttagtgctttggggaaaaataaacaaaggagtcatgtgagagctggtgaggatgaaactccaagtggattctgcgggaacaagtaacaaagtgtgaagaaccctcaagagcctaagaagaagcaagtcacagtgaccttggagagggcctggctgcacacaggccgtggaatggagcttgagccatttttatgggacttctcagaggtcctggtgacccagaaagccaaaggcatttagttacacagggttcctctcatacaagacctctggttctccctgaccgtcatgcacaccccctaccccaaccggggcttgagcctcacctgggcttgaggtagctgagtgcttctgagaactggttggtgaggaagaggtccagggcggtcatgcactggtccagggcctcatggaggctgctctcaggagtcctgggggaagagatgcggggcatgacacaggggccctccaaccctccagcctctcctggctggaacagagcctcacagggtctactcagcctccctggccagccttgggtgcctgtcacgagctcctccaggctgccactctgtactgggacgcagggacaatttggacccacctcttggtgttcccaagggtgggagggggagcagaagggaatgtcatcagagatctgttggaggtgggggaggggccaagggcaaggtgcaaagaggcctcaggaatcaatgatcttaccctccacaagggtaaagggagtctttgtggcccttctggcccattgggctctgctgcccccccagggggtgcagcccagccactaaatcccacagcccctttttccctcctccttctccaaggcctcctccctcccccaggcctggactctagaatccctgacgttgtcacaatgggctgtcacactatgggtcagcagccccaaacgagaggcccagggcctttcaaattcactttgccaatggctcctccagaatacctgagccctttccagtccttacgtttctctatagcttttaccaccctctgacgtgatatattttacttatttttgtgtttattgtctgtctccctccactaaactataagcttccaggaagcaagaatctttaactgctgtatccccagcaactagtatccagtacaaagtaggcttttaataaatatctgttaggtaaatgaatgaatgaatgaatgaatgaatgaatgaatgaatgaagagtctaaggctaggaaagcaaacccctgacttttctgggtctcagctttcccatataaaaatgagagatgaaactaagagatcccagaagccctgcctatttgatgttttgataatgcctcttctcaaggggcctcctttgagtgaaagaatgttccagaaagaggcttgatactctccctgaagggaaatcctatttcccagaagttagttaaaagaaattccctctccaccaggtaaactcctacatataccttagggcccagctctaaagtctcccactctgagatgcatcagtagatcttcccaggcaaattgaaacatgtctttttcaaaactgaactcgtgttcattctcccaatctgttctcccccagtctttgcctttcttttttttggtggatatggggtctcgccatgttgcccaggctggtctcaacaaactcctgggctcaagtgatcctcttgcctcagcatcccaacgtgttgggattacaggcgtgagacaccatgcttgtccactcctctacccaataagcaacactcctctacccaattccccaagccaaaaatctgataatcatctttgccacatcccttctctggcctctgtcatcccctccatcactaaactccactaaatcccatcatttctacttccttttttataaagaatttttacagagatagggtctcatatgttgcccaggctggtcttgaactcctgggctcaagtgatcctcccacctcatcctcccaaagtgctgggattataggtataagccacagcctacttcctaacatctctcaatcaaccccttctatgcccaataccttctggtccaggccagcaccatctttacccaggtctgttggaacactctccattccactctttccaccttcttctctcttctctgttagacctttttattccatatttcatgtctcttaactaacttctatactatctcttgggctctctgttagatcctgagtaatttctttcatttcaccagctctttcattaggtgtgtctgacctgctacttatcctacctactgaatttttcatttcaatgattatatttttcattttgtgaaattccacttggttctttttcaaatcttagttatttggggtagtattatgttccctgcctcaagtccatcttcaattcctttatacattttaaacataattatttctattctatatctcataattctagcattttagactctcagggaaactaattctgctctttcttgtttctggtgcctgctgctcacagtggcttatttccttgtgtgttttgcaattatattacaaattcatgtttgacagatccaaagggactgtgggacaggatacattgctccaggaaggatttttcatttactctgtccaggttcccaggggaactaccaccctgagaccatttaagttacttttttaagtttatggtttccaggaccacaaaggtagtggtgtgccatcaaacccaaagtttgtgtgatggcagaccagtatttatcattttttagggagtctttttttcccaccagaaatgctgtctaactttgctggtgggggcggaccttttttctagccaatcttcctattcactgaggctgtagcccttggagggtcc

SEQ ID NO: 2332 - DNA, 4001 bp, Homo sapiens
gctcctcagaaatcatcccatgtcctcatcaaaactgaaatgcactctgagccccattatgtgctgtgctctgggaacatggggacaaatgagccctgtctcctttccataagtagtggagaaacagaaaaggaggaggtgacagtgatccagcattgaaatcgtctgtccacaaaaatcctttctccgtaggacagcgtggtcagctttaaataagtaaatgccctgctaaagccctccagtggcttcccaccacacagtgaaacctaaattcctggtcctgtttgttctggccagcctgcttcctgggtctcagtgatcttccatcactctccctcctttcttctcagacacagctcagggtttgatgtgagctatcctgcctgcaatgcttcagcactgccaattttactgggcataacattgccttattgtatgcctcgcccagcatctatttctgatgtttacttgtctacttgtttatgtctctcttactagaacctggttgccaagagcaggacctgtatatctgaagtaacaccatacctgcagtgcctagtacagtgctggcccagcacacaagtgctcaacaatgtgtgctgaaaggctgaatgagagtcaccaaagggtggtggagagccatggaagggttttattttctttaatgttttttcctttatttatatagagatagggtcttgctatgtggcccaggctgctctcaaactcctgggctcaagcgatcctcccgctgggattacaggcatgagccaccacgcctagcctatggaagggtgttaaagcagaaaatggcttggtctggtttgtgctttagaaaggatgtgtggaaagggagagacaggaggagctggggaagggggcctgatgcaatagtccaatgagaataaacagctttgagagaagttgggaggtaaaatcaacaggacttgtagacgggggtgggagaaaggtagggaggtgtcagggatgactcccaggtttcgggcttgggcaactgggtggatgaccattcactgacacggggacaccggaggaggaacaagtttggggcttgccaagtttgaggtgttcataggacagtcagatggaggtgttgggaggacagttggattgccctttccctggcacagcagggtgaactttaaagatgtaaatatgaagggaagggctgaacctcagaagatgtaaatatgcggggagggctgaacctcagaagagaggtcagggctgtggtcccctctcacaggaacacaactggggcgcactaacttatcccggaggtagggtcagctagggaggtggctgacacaccctggagggctcgccttggaggagctggggtgcacataattcaccctggactgggactggaacccaggacttcccccacctgctcctcggatgtggacaacccctcaagcacacagagccctggcttcatctgtccgggcacacagcgtgcccacacttggctcatgcagacctgaggagaaccaggtgagaggatggagggttgagcgcagacgccgctgcccaaacctgaccgccagccccacctgaggtccttctcaccgagctgacttcgcagatagcccgcgtcttgcgacactgagcggcgctcaggtgggaccgcgtctaccctccccagttcccgccctgctgggggcgaggacagagagcagggggcgcgcggcgctgcccctctcgggcctccggccgacccccacgcccagcagccacacaccctttccccagctgtgcctctcagctgtttccccgacgtcggctgggtcctccggcggccccttggtcccgtccgcgccttccgccgagtccccacccctgcccggtacctgcggtcgcttttcccggaggccgcctccttccaggtggtcagaaaggccatgggcgcgggccgggctcggacggggccgcgggcggcccctcgcggcggcggcggcggccgtggaggctacagtggcagcacctggacggggcgggcagggcgggacccgtggctcctccccgccctggacctgcgcctccctgccccaaagtggaagggcttaagtgtccctagagcgggcctgaggtccctgggcaagcccactcccacccagaaccagaaaggaccccaaacactctgaaacccctcattgggcaccgggagaaacggagctccaggctttgtccaaggtcacaagggggccagcggccggtcccactcggtccagagcccagcctccaaactgacgggccacacgatggccttaccagggtccctgcgggacatagcagcaccaccaaccctgttccctcctccctacatacagagccagctttgctagggcctcgccggaatggggtcagaagctcgggaccgagtcaaatgctgggcacagagcaccagcagcagggggctgatgggcagggaagtggagagcagctgtctgggcctgagggtggaggctgcaggccaggccaggccctggagtgacccacttcaccgacttatgagtccagtaccccgtggcaggtcgggggacagaggagaatgagccaccgccccatctccagtgtaaactttctttgaagccccacatttcatcttaggctgcgtacatttttggtttttattttaaattaccaccaccaagcagaatcagctctggagcaaggggatcccctggcgtgcagtccaggggcttttatgggaggcccaactaaggacaaggagcaggggagcaccgtgaggaggcatttgagaaggcctgctccagctccagtgtgaagaatggattcagggacccctggagatttagctcatcagagaaggtgggggttgaacacagggcaggggcagggtggctaaggcccatttttgtttccttttgggctgggtctgtatcctaggtacttgtgcaatacaaatttcgtgtccaataagtggtgactggttttcacatgtcaggtgttctctcatgtgtcaagccctgagccaggcagtttacaccaattcttatttatctgcatcttgttacatactcactcatccccattttacagttgatgaaacaggttcagaggggtgaacgacctttcctgaaaccaagttgtgaagtcaggtcttacacccaggcttctctgcccaatctggtgctttcctcccaccctgcctatggaccatgggtgggctgagcacggagtgggaggccctgggcaaagctgcccagagggcagaggctctaaggaccatctgggcaatttctctcactcttccctggtaggcagcagagaacatatgacctttcactcatatcatggtctttgcagatcaacaagggccggggaatactgcttatctgatcacaaagctagagcttctaaatctggaaaatccagttacagtatgcccagggacccaaaccccttagtccagagccttgtccagcttggccagcactgagcacttagccaactttctcctgggttcgcaggcaagaagagccacaggacctcagaagcctgaccttctatgggcccagagcccagtttactaagaggattaatctcaccgagcctgtcagcccacagccagcaccacttcctccaggaagccatccaggatctccccatcagagcggtctctccgttttcagaggatacattttgtctctctcacagcatttagcattacatattttaaaatccttgtataagttatttacaatggtatttcagatttctctctgaaggtacagatagtatctcatgtgtcttctacagagctcagcactattgctatacatagtaggtactcaatggtgagtaaataaagaaggagctaatacctatcaagcttctacccaatggcaggcactatgcagagagcctttacgtatctacctctaatctagacaactgttttaagaatatttgggtcagaagtttagaaatgttcctaagatcaaatcaggagc

SEQ ID NO: 2333 - DNA, 4001 bp, Homo sapiens
ctcttttcatcatgtcaacttggaagaccagagttcaatcagagtaaactatccttagtctgggtttctgggataacagcccctcatcctctgatgttctcaaacctccactaaccatcataatggcttgtatcataagtttattcttcagaaagcacttataaattacccagatagtactgtgctgctgcccggttggtataaaggacagcattcaaatcaggatctgcacatttcttctttaagccttcagtgtatgaaattacagctttcttgtagtctttttctttaaagtaatcattgccctcatctttataggtcttggcctgttctgcaaagaagaggaaaaataatcactattgcttactttttaaaaggctcattaaaaatagattctaaatcatgtaataatgtactatatgacacaccaaagcgaagaaaccaatagggaaaggaaactcgatgttatgataaaagtgggtatcaacatggacaaagtcgcacaaatgtaatgctaattccaaatatcttacaaggtagattactaagtgctttccaaaaaaaagaagtataaaggaaaaaagtacactcatcctagctgttgaagaaaagaattttttttaatcactgaagaaatcagtgaggggcagggggattgattatacttctgcttttgcttatgttgtttattctgtggagtgcaaattcccctcctcaccctagtaaaagcctacaaaattacaaagattcagctcaaatttcctatctattgtgaatccactcctgctccttaaagtgttccaacaggacccactacagctgtagtatacacctacatgttgacacttatagcataagtttgtcttgattctttaagacaaaaggcttctcactgagcctgaccttggagggtggaactgtgtcttattcacccctgtatccccagtccttaccacttagtaggtacaaaaagaagtatattggaatgaataatgacaagttagctcaggctaactacttcttgttatcaatcagaacgcttctaacccacacttaatttcagttcaatggaaacacaaaacaaatattagtcatgttaagataccttctggagaacgctcctcatcaaaaataattgactggagacaagccaagtcaggattctccctgggatcaatttctgatggcgctctcgacataaatagggggaccttttcaaattcctgtaaatggttaagaatgaactacatgaataagcttttctactgagcagatccaattccatgactcattaccaaagtttttttactcatcatgatttgcaaatcatcacagctagctgtatccattcaggcctccgcttcccttctgtaaaatgggagtgtggtgtaatggtctctaatgattgttttagttctcacattctacaagagcggcaggaattaccattaattgagcgcccttatgttcttggcactttaccaactgtctcatttcatctttgctattggtgatatagttcgcgcagttttacagatgaggaaacggactctgagaagttaagtaactgactcatatcagagccagttaagtggtggagtcacaggcctgactccaaaacctaggttctcagcttaagaagcgactcaaaacctcgaggccgattttcaatactcaactagaaaccagcgatcggctggcagcgccagggatctgggattgaaggaggtgccccagagcccgggtgccccacgagtccggacgacgcccctacacacgtggggagaccccaggaccgcccaccttctcccactggtcctcatgaaagccgccacggtaaggctggctctggaacttttccaggaacgagtccatgacgtcgtctgaggtgggatcctgcccaggttgttccatagctgatgccctgccttccagcccgggtcccagcgccgtgaagcgagcggctccttccggcggcgcgggttcccttccctcaatcctcccggcagcgcaggtccccgcgccttgggttccgccggcctgggggcgtggccgggcgtggccaatacgctcctcccccggcccgccctcctcggcagtgcctggcctcgcccggccttcgaatgcttttggggtggtgcgtgaacccgaatccccaaagcccccatctcacttcattcatttgttcgtcagtcagtcaacacatacttacttagctctttctgcgcttccggcctgttctagtggctggctatatagcggtgggcagagcagatgaaatctctgccctctaggagttgctaaggcagtggggaggaaacgacaatagttgagatgtaagagtttgtcaggggtagcaagagctattggggaaaagttttaaacaggatgggtagacattctgccagaggcctgggagtgactaggaggggtctgggaaaggcattcccatggaaggaacagggaacagtccggaagcctgatgcgggagagtcttctgtgcttggggaacagcaaggaggccagtggggctgaagcagagtgaggaagggggcaaggagatgatgaggtgggaggacaaaagggctgtgactatgaggatttggctatttcctcagtggtatgggaccttttggagagtttcgaggaaaggagagactgatcagacctctgtctctgagcttagccacccctaactcccacagttcagatggaaaagggtcttcggtccaggtgctgcaggcctggttaggcagccgctgtggcttcctgcagcctctctaccggccagcaaatggctgcaggtccctgcaccggggctacagccttggggagctcctagcctggtctggaatgaaaagcagacaggaagcacaccaatctaaactggcattgggtcacaggtctgctcagtgaaggctcagaggggtgggattcaaggtgatgcagagctgagatcagagctgaggaaggtctctgcagatggatagaggactcagcgttttaggcagtgggagctcatatgtggagagaggcatggaggtgtgcacaggcccgccatgctgggtactgcaagtgttaagaggtgtgtccagggccgggcacggtggctcacgcctgtaatcccagcactttggggggctgaggcgggcagttcatgaggtcaggagttcgagaccatcctggctaacacagtgaaaccccgtctctactaaaaatacaaaaaattagccaggcgtggtggcacgcacctgtagtcccagctactggggaggctggggcaggagaatcgcttgaatccgggaggtggaggttgcagtgagccgagattgcgccactgcactccagcctgggccacagagcaagactccacctcaaaaaaaaaaagaggtgtggccggcaagtgggtaggggccagaaggcctgcctgcctcactgaccttggtcctgcagaggataatgagtcactgaaaagacctaagaggagcaatggccgtgagcacatttgtcttaggaaggcctgggctgccaggtgaagcattgatggggggaggttggttaagagattgacaaggaggatgctgataagagaccaaggtaagacagagatctgaagcccagcagtggagctggcagggtagtcattctttgatatggggatggagacagcatggctaaggatggcgcatggggaccatgagccttccagtgccaggactttatcttttcccttctgattcttccacacccagcagaacatctggtcctagcactcccttccctccaaatccaaacctccttttccacacttcctcctccagccctgctccctaatcctggttccctcccttattctcctcttcatcatcttttcctttactgagtccagagcctacagagtctttttgctttcttttttttctcatttgattcccataagaacactgtgaggtatgaacccattttataggtaacaataggggaacctaagagaagcaaag

SEQ ID NO: 2334 - DNA, 4001 bp, Homo sapiens
aagtcaaatcaaaactatgggtttttacaccaagaatctatgtataacctctactgggtttgtaattcccacacattatcacagctatgggcattcctttggggaagaagtccctagctttcatctttacccactttctcaaataaagcataactgtttcttgatgactcaaaagtttaaaaccacactgcactgtgtaatctctacactgggatccccctacgaatgacataattagggctggctgtgaggccctgtatgaattttccccaggctcttcccttcatcctttccctctaacaagctgagagctgtcacttagtgttattcacacgcctacctctaacaatacgccctatatgcttcttgttttgtgtaagtttttaatcactcccttccaacttattatgaaaaaatttaaatatatataacatttgagagtaaacaggtttgagtgaaggtttaaagtactctcctaaacctgtggcactttttttggcctgtatattggttatcagatatagtccaaataaatcaagtttatcaaataattgtcttcaaataccactgtgctagtttgtatagcaaagcatttgtgtagatgggatcctaaataagagtgtttctcttaatgtaaaaccaaatcttatgccaccattaatgttgaattcctgcaaaggtaaaaatgcttctatctcacaaaacttgacctgggtactatatctgagaggctcagtgtaaatcatctaactcatgaaacagaaacatgggaagttagtatacatgttgaaagggcacttttctaatactgatatccattatgtactctacatctgacacggagaaaaataacttttctctaccaagttttgctgaatagagagcaggagatgtttaatgatgtgatgatagttttaaaattcacatagaaaatgtagacacttggtactgtgaaaacattaacacttgacaaactattaactttcctcactttagagaagatgcttaacatttctgactctctcctcccacctcagcctcacgagtagctgggactacaggcgtgtgataccatgcctagacaattttttttaatttttcgtagagacgggatttcaccatgttgcccaggctggtttcgaacccctgggctcaagcgattcgctcgccttcgcctcccaaagtgctgggattacaggcgtcacacaccgcgccaggccctccgttgtttcttccagcgctaatttctttgaattatcaatttcaccatttagatgcagagaatcctacttaaaaataagaaggctaacaactaatcactagagtgttttaagctcaaacatttaaaaaaaaccgtcgggcctaaaactagtgcaaaacagggacaaattattttccactatgtctgctgtgtgtccttactcctttaaagggggagggactgtctgggcaggagaagggagtggttaaggcctgtcaagtgaatagaaacccagagctggaaaacaccggatcctcaattttacaggtaggggaaccatcggcccagagaggggggtaaccagcctcgggtcacacagccagaattagctgggcgtcttccgaacacgccacgctgccctgggatcaccaattgcttaaagggtcctgacaccgcaaactagggccccaccactcctcggccctgtgacgcccgacagcggggagcgggaagctcctctcgggaggccccgggcagccacagggagtggggcccagctccagacctactcggtggcccgcacgaagctgcacgtgtctgcccggcacacgtagaagctctttcctttattcgggccatcgcggacgccggtcttaagaaagcagaaagtccctgaagagagaagaaagtgaacaacgattacgccacgctaaatcaacaggccccgggacgctgagaccctagccccttaccgtgctctggacacctaacttcttccatttcgctgggtcccccaagttccacaaagccccgcccccaattctgcttccgccttttactccgccctctttgttcaggaaccaaccatcactcagctcttgcagtcttaatccctcccataattctccgcccttggccttcacccgtcctagccgctatcagccaatcatataggaacttcgctcacctccaaccaatcacagctgccctcaggtatggcgcgcgccgaaatcaaatacggagccagggggcgtaaaggacccggcttttgcaggctggggcgtggctgaggctggggagaagcttagaaggtggcggggcttctggaggaaaagaagcttcgatttgcaggtcttggaagacggaagggcaactcttgtttacgtttaaaaccgagaggcggccctaggggtagcgccagttagcaggcgctgaaaggccctggcttcgtgggtgtctctgagccaggctggcgctcgtgcgcgctgggctccgcgctcagtcgctggggtgggaggccaggggaagccgccgctgcaggccgagccgcgagatttgcagtgcaggagccgaagcggcgggcatggtgggaggtccttggaagctgctgcggggaactgaaacggctctgataggcaggcacaaagacttctctaggaccccctacaatgctttacgtttgcctcgtgctttagatttcacaaagtgcttacacataacacgaccctcctcactcgacctggtgagatgggtagcattttgtggaagattccgagactcaagtttgagagactcacccaaggtcagagttggcgagtgggcggtccgtggacaggtgcgcaggtctcagcgccatttggcccgcgctgctgcttcctgtgtgtactggatgttctctaggctcgcccagcgtggaagccccgagttaccagccgcaacgtggaaaccacagaaggggaaatagatgacttttggtgaaggcgaattttactttatcattttgtattgtcaaacttttttttactattatgcttttgtaattttaaaaatcgaagacgaggttaaatagaagaaaggggacagttcccttctatttaacttcatcctcgatttttaaaatttgaagttgtaatcaaaactattagtaaacagagaggaatagatattagatttattgcaatagaaatagtttcatattgcagctattgaggaccatatgtcccagacatatggtgtggcacctgcactgttcttatgggggccgtagaacagaaaatctgtaatgtctaggaaatctgggcgatgtgataaatgtacatgttatggggatccggaggaagggagacaaacctgaggtatcatttattaattaaacagtacttactaaatagcttttttgtgcccgttgtggactaggtgcttgagaaatgtaaaattcattcattcacacacacaaagtttgaaacaactattctaagcacaaggaacttactcagtattttgaggagactgaactagtacatgttgaacacttaaataacaatataaaatagtatttaaatgtcaaaatgaatggagttagcagtaactctctaggactagagaaaaatggaatttccaaagtgaagttcctttatacataactacccttccgaaacttagatgaacttagagataagacaggaacaacaaataggtagaagcattttcattattccaagattgttattcttgcaaatgatgtatttgtacatgtttaatagatgctgtattggaggtagtataccatgaatacaggatttgcagaaagaggggcatggtaattaattatttcttgaataattttcgaaacaaggcaaaatcggggcctcttaaatatcccgttaaggaagaagctcctcctctgcaagtacccaagtcggtatctccagtccaacctcacaaaagtgtgcacagccaaatcacagacaggaggaatatttcttccataaattaaaaatatactagatcaaaatgttaa

SEQ ID NO: 2335 - DNA, 4001 bp, Homo sapiens
atggtgcttggagcgggtggggactgggggatggggcatgggtggtgagtgggcggactgtgagttgtggtggaaggaggtggctgggtggacggcggtgcctgggggaaacagctgtgttgctctaggctggaagtggacgctggacatggtgtaaagctggtgtcacaggcaaccaggggcggggggtgcagatggaggcagctgcggttggctgggcgggtgcttggtgcaaaaatgtctgggccaaatgaagtgaggagggataggtgggtccatagaagggcagtgggcagggctgggagcaggaggacgaagtcgctaggatggatggcccagacttgggtgagcgatggacggcctcactcagggcacccacaggtgacggtgggcacggtgtgggattgtggatggattggatggatgtttggggtgaaggcagattgacaggtgggttgtacctgggtgggtctgtgagatggacaggtgggtgggtgtcaggcccagtgggttggggacgtgtgggatcttccccgttcagccacgaggaagagggtgggtttatgggacaggggtttggccctttaaaggacaggtggaaggtggaggcaggtgctgacgggtgggggctggggccagcctgggagcccaggtggccaggggcaggggcaagggcaggggcaggggctggagccagcctgggagcctgggtggccaggggcaggggcaagggcaggggcgggcgcaggggcaggggtggggcgggtgcaggggcaggggcaggggcaggcgtaggggcgggcgcagggacgggggcaggggcaggggcagactcacctggcctggaccccccccggcaccttgctggccttgctcatggcccgtgcccgtccccgaagggtgctgagcagcccgatcttggtggtgaggagcttgttgttgggaagctggtacagcagctgctctcctggaggtcagaggccagggctcgtgtggagggagcgcaggacctcggtccccacccctccaacctgccctgtgctccggcccaggaggcccctgcaggctgcccgcctctggtgccggctcccgctaccttcccggaagctgccgtagctgtctcggctcttgacctcacaccacttcagcgtgtagtcgtcccggcggctgtcatggatgcgctgccagcccttgcttttgcagtaggagctgatgctgcgaggggtgggggcgggggtgacctgggggccgaggcaaggggttggggatggcgggcggccagcggaggccgggctgggccccgggagcaggcggtgggtattcagtgggaccacgggcgcccagggccgctactcacattgtggccccgttgctgcctccaatgtagaagaagggccccggccgggtgctgtggggcgatggcttcccaccccccagcaggagcccctccaggagggcagctgagggcccggcggcgttagtgtcatccgagtctgcaggccggtggctgttcaggagcccagggggtccgggtgtggcagaggctctttctgccccctccaggtccggcccacagtgtccatctgcgtcgtggtctggctggcttggctgacaccggagtccctcctcctggctgctccccattggcctctcgtgggccgggcctgtgaacggggtggggtcccaccggggtggctacgggagctgcccactcagcccggacatggctcagccagtttgctcccagcccatttctccaataccctggacaatccccctggcccgtctggggctcaagttcagcccgagctctggccccaccaggcggcctggggactgcttacatctggggaggggccgtgaccaccctccagggccaggcttcctgccggcaggttccaggtgggggtggggagcttggagcagggggcagggaggtcgcccctccgaccctcctcaccaacagggcagtggcctggtgcagggcaggggccgggctgtgaggccggtgctgggtgcagacgtgacgcagggatggtccctggagggcaggggtcacaatgtccatgatgatgtcatgggtgacccaaggggccattgtcaggccgggagacgaggggctgcccttccaggggtggtgccagccaggcggaaccctgggccgcggagcgcgacagctcccctctgtgcctgcagagcccggcgcccacagctggcccctctctcggagcagcggggcatggccatgtgtggatcctgcccctgccccatgaggccgactgacttccttgggtatggggcacccgtcccagggaggccttggccttggagaggtaggaggccacccagggctgctctattcacctgagactcgagcccgaggcctctgctggatccttggcctcttgcccctcttgaagccggctcgggtccgagtgggtggtccccggcggtggatgaaccgggtgcagctgtggtccattggccggggggtgcccgggcgagggccctgaagggaagatgccgctctgaccctcctgtgggacctccgcgcggcccgaggccccagtgcttggatggagcaggcagtcaggcccaccctgcccaggaaagggcgcctcccagggccgtgggcttgagcctctgcgtgcggctggctcccgtctctgtggcagctgtggggcctggcgccgtgtgggggcgaggctgtctctgcaccctgtctctgccgggcatgtcctccctggccggagcggctcttcaggtgtggctgagctcggcctgggtgccggctggaaggaggggcagcgtcaggcctgctgggtggggcgcctgcctgaagaatggagggtgggagggctccttggcctgagcaggggtcttctctgtctccgctgctgaccccggagcccagctgtgggctgtgtgcagccgcctggtacctgccatcagggttcctctgcggccgcccctgggtgccaggcccgacccccaggacactgtctccagcaacaccttcccatgttgcaacttaggaattttcagccagttcctcgacagatctttctacctctgtctccagcaaacaaacccatcttggggctgcttgggaggtgagaactttttttttttttttgagacggagcttcattcttgtggcccaggctggagtgcaatggggcgatctaggctcactgcaacctctgcctcccaggttcaagcgattctcctgcctcagcctcccaggtagctgggactacaggcacccaccaccatgcccagctaactttttgtatttttagtagagatgggttttctccatgttggtcaggctggtctcaaactcccgacctcaggtgatccgcctgcctcggcctctgaaagtgctgggataacaggtgtgagccactgtgcccggcttaggtgagggctttcaagggtttgaaggaactcgcccaggagacaggggagcacacggcagtgttgggcagaggctgtgggggctctgaggctggagaaggctggggtaggcctgaggctccaggctgggcacagagctcggcaccaatctcacccgcaggaagcctttgtgtctgcccctccctgccccgcctgagtgacaggagggaaggagacaacgaggaagcccacgggcaggggaaggtggggaaactgaggcagccgtctgcacgatgacccagtcgggtggggccactgggacccgtcctcagggaggagcggaacacaggctgggccccccacctgtgtctgggagagcctcacgccctcttcctagggtgggctgggcaagaatggaagaagtcaggagccctgagacccctccccacccagaacaggaggacttttggaagaggctggaccctgcgcaggcacggagcaggtgtgtgcgtgcaagactctgcattaaatgggagacctcagctccttctcatgggccctcagcacccaggattcctgctggggaaggggatcctctaaag

SEQ ID NO: 2336 - DNA, 4001 bp, Homo sapiens
tctccaccggcacagcggcagcctctctccacctgcacggcagcagcctctccaccggcacagcggcagcctctctccacctgcacggtggcagcctctctccacctgcacagcggctgggagcagcagcctctccacctgcacaacagcagcctctctccacctgcacagcagctgggagcagcagcctcgcagggttgctgcaaagatggagtttccacatgtaatgtcaggacagcacccgccacacactgcgcagtctgcagggctgtggtgatggtgactgtgggggtgacgggaggcagagagctcagggacagctcaggataggcgggaacacaagcacatgtgaaaagcaaggcgatcgccaactctgaggaaaacaaatgggcaccacccggggaggccgggcagctctgccccaaacatcattcgtgccgggatgatatggacagggcagcgtgtggaagacaagcccctttcaccgtccacggggaatttctgcactggaagctccagaagcagcagcatcaggtgctttttggaaacaggcagttagaaagcggaagcacagcacccacccccccacccaggaaactgcctccgtctcttctgctgcagaagaagcagcagctggaagaggcagccaggtgctgatttcatcgtaagcctgaggcctcctttgggcttttctaactttatgtccttatgatgttcacaaataactaaataagttgtgagctgttatttcttgtcattgaaattaaaggtgtttttttttttaatttttttagacgaagtctcactctgtcgcccaggctggagtgcaatggcgcaatcgcggctcactgtaacctccgcctcccaggttcaaacaattctcccgcctcagcctcctgagtagctgggattacaggcgcctgctgccatgcccggctaatttttgtatttttagtagagacagggtttctccatgttgaccaggctggtctcaaactcctgacctcgtgatccgcccacctcggcctcccaaagtgctgggattacaggcgtgagccaccgccccggactgaaatcaaaggtttcttaagcagctgcccgctgtgtgtgtggtgaacccggggcctgaatgcaggtgggacgcagcctcccaagcgccgggagccgctggctcctcacgcctgtcgatctagcaaatgtgctttggagtctctgacggacgcgattctgaatccagaaggaaagcgtctcactccgagatgctgactgacgtgtcctttatagcggtgggacttgggaagccggtgacgcccggtgtggaggacggttgtgacgcccctcggtggggacacggtgtaaaggcggcgtggaaacttggtgcacgaccttacaataaattgtaaaataagcgttttacctggtgagatgaaaagaccggcaggagacggcaccccggtaggatgaacagaagagacttttaaacctgaagaaatcatccaaaaagcgaccacatgttagtgtcctgctgcgagttctccccccagaatccaagcttggccacgtggggccctaggaaggtactgacattgttcgaagagctggtgcctcccggccggaggccgctgtcaaaggacgcacgacctgtgggctcaagcagccgtccgtccaggacttgctctgcggaggcagacctggtcccaggccacggagctcgtcccagggctgcccagccctcccaccccaccgggtacacacaccgttccccggcctggcctggacccgagcctctcgcacggtggcgctggggtccgggacccgcagagcaggctcagcctggccccaccctacccgatccctgtccagtcccctccccagcctcctcctctcctgagcagcctcccgaggggacccgcaggcagggcgtaggagggcggggccgagcccactggaccccagctggtggccgccggcgcttcttacctgcccagcccacaaggtcctgggagcctgggccaggaaacaacagtggtgacctggcaaccgtctcctggcaacccccacccagccggaacccagaggtgagcttgggttttcggaggatggggaggggctgctgagtggcggggccagcccgggaagccgggctgagggctgaggctggagaagggcacagcttcatgggcacagctgcctcccagtcactgctgggactgcctgagcctgagccccagttgctgcccctccgcccggccctcccaggatggtccctgagccgtctctcaggccccacccatgctcagcaccccaggacctggcccgggccaggctctgcgtgcaccctggtgatgttggctggatacacggctgccgatccctgagcattctctgtgcttcacgtggtcgggtccctgttctcactccacagcggacgaggtgccactgtgcccccctctgcaaacaggaaccgggggctccacaaagtgagtgccccccagagggggactcacatctatcggtccaaactgcacctttctgtaagcccctcgctgtgtcacagacctcggccaaagtgaagcattccgcaggggtttgggccgtgaggaacagcctgcccgacacctgacttgaacactctgcggggaaaaacaccgaggaacatcacgattaccttctgcgggaacaagggccaaacaaacggcctcatcctgaagccgtgtggcccgggccgctcccacccatacctataggcaccccagcccgtaggcggcagtgggctctggcatccagctggtcccccacctctgcaggtgtttgcaatgtacccgtgttgatgtaaggctgccctttctccatctctgtgtgtctttgtttaaccctcacattctctcttttttttttttcaaaatacggagtctcactcttttgcccaggctggagtgcaatggtacggtctcggctcactgcaacctccgcctcccaggatcaagcaattctcctgcctcagcctcccgagtagctgggattacaggtgcccaccacagtgcccagctaatttttgtatttttaatattaattttattttttatttttattttgttttatattttatatatttattattttatatattattttctatattattataattattttattattaatttattattaattttagagggtttcatcatgttggccaggctgctcttgaactcctgacctcaggtgatccgcccgcctcggcctcccaaagtgctgggattacaggcgtgagtcactgcgcctggcctgccctcgccttctctttaaaacacctaatgatacgaggtctgggagtcctgggctcctggcatgacccatggcacggtctgatcccctctgcctcaaactctgagcctccagccacgtgtcccctacccatccgtgtccttcagagctttgcgtgggtcacgagggcctctgtgcttagggtccccttgcagggggctggtggtgcccccaaaagacaaccacatcatagccctgaaacctcgaatgtgaccttatttagaagaaggggctttgcaggtggggttacgtcaggatctctagtgacatcacccagggcaggccctgaatcaatggcctctgcccccctgagagggaggtggagagaggagacgcagacgtgggggagacgccgtgggactggggggcagagatgggtgacacggccacagccactgatgcctgagctggcaggggctggggaggcagacagggtcctctcctggagcccccagaggggtgcagccctgcctgccctgtggctttggagttctggcctccagatgcgggcgtaagcgtctgttgttgtgcctgcctgtgtggtttttcagcagccgggaggagaagccaccctttcgagagtgtggtgcccgctccggagccgcctccccgacccacgccggggcggcagcctgggggttccccgctctgtgtccctggggcctgagctg

SEQ ID NO: 2337 - DNA, 4001 bp, Homo sapiens
taacttgaaaaagaattctccaatgcaaatggttcaatactttagaaatgacatactaagatgactctgttcctgcctaccatcaatactatgtgagtatttagagataatgagcatctgtactatagcaacctgcctcttgagacataaacaagagatgcatttcttaagaaaaaatctgtaagtcgctaatgaaagcaagtcaaaggacccatcaacgggcgaagaaagacctagcatccattatttttacagaaggagcatagaaggtcaatataattgttgactcttaacggcagggtaacaacaaactaattcagtttcccactatataagaactacattttactacaacactcatatttctaaactgactaagagtcaaggcttgtccaaattccatggcttactgagtggtcttgaaccttctctgaattttgttccttagtctgtaaaatggagttatcacctgttatgcaatatcacagagttgtaatgaatcaagtaacattatcttagtatgggttcacctgtcaccctattgtggggtgcagttcagtcgcacacctcatgaactaagtaactattattactgtaaatgtctccctaacatttaagacagaaaaagatttccagagttcttcttacgtttttaatcgacttctccaacacttgagcatccaccaaatatcactgccaaaaatgtgctgaacatctcctgttatgacctcactctcctatgtagtgttgttcacatattttttgccataagctttctaagaaaatagattatttttcacatgattcaaagcatctttctttcatattgaaggagcaataattccttatgcagaaagtttacaggttgttgttgctgttgtttgagattactcctcaattaattaattctatgtttaatatctaatagagcatatatatgtacacttggacacactccattaatacagtggaaaatccatggactatagagtcaggaaaacctatattcgaattcctgttctgtgaccttgagaatgtaatttaacttccctgctcctcagtttccacatttggttctggattatgatgatttaataaaatacgatatataaaagtaagtgcctaggctatgaaggtattatttcctacctctcctaaatcttttctttctatgccaggatcaatcaaacccacccagaatacaaggcaactttcatagggtatcttttacatcagtcgagggaacgctgcgatgtgatataagtggatgatggcatgagtcaggcatccaacagagcaagatgtggagaaagtgagaggtacctacaagggccctagacttcactcgcatgtgcgaaaagggcattttgataccctttcaagaatgccccgcatactcgcggaggcttataccacgatgtgggaaaacgacggaattacagaataaaccagcagggagcctcctcgttcacccaacccgaccccgcccgcccgagtctcccatctggagcctaaaaactgagctgagatcacagcaactgaccccgtcccctccgccctctccctcccccattctgcccaaacctctcagggcacgaatggtgctgaatcatttgcacgaacgcagcagctccccgttccgcggctcccagcggggacggtgtccccagagcagtgacagtccggggatgggggcccggaaagagggccagggcggagcctttggggacgtggggacatggaagggggtcgggggaggatggcggcagcaggtactcacccgggtgaggaaagcccagcccgggtcctcgcgtccccgctgcaagcggtcccccaggtgctcccgcgcctcgcagcttccccgtgggcggccgccccgactcggcagcctgcactggtggtccggtgctctcctccgcccgcccaccgcccgtggcagccacggctcgggactccggtgctcgacgcggagtgcctggaacagctgtcgctgcccaagcgggtggcggctaccgacgggccagaccattcgcctgctgcggccgggggtgcacgacgtgccgagaggcgcgggcgccgggggcggcgacggttgggaggaacaaaggactcggggaatcctctgccccctcggagtcaggaggtcctggggacaggagggatcaacggaggggccgctgcctcttctgggggtttactgaagacactgctcgagctttcccgggccacacacaccccccccccgtttgccttggtcccgctcggggctcctttagaacgcggcaaacagaggacttagcaacgcgagcgcctgggcggcgcccctcctcagagatgcgagaggcgctggcctgagcgcctccggccacctccttctacctccgggccctaggcgcccgatccacctgcctatctgaccacagacatcttcccacaaaacagtggagctttttgaatctttgaagagagtcttcagatcttttatctaagcatctttgtgaagcaaagaataaacgggtatctgaggccagctcgaaagttaggaaataaaatcaggtggggccccatcccgtagatgctgagggacagctctgacctagagttcctgctaagcaaatgttgaaccacggcagttgtaaaaaaatgtagatttaggaagccatttcgagataaagatttacagaagattgttgcagaaattaaagaatattcgaggttcattgttcaccattttagagttgcgtgtcttgaaaacgggaaggcaatcatgtcttctcataaaatgaattgtatagaactggaagaagtcctaacacatgaattccttagacttttgtggtccctgcttctgtcacgctgggttcacacaggttcatttcagagcatggtgaagatcaggacaagtgtacagttttccctgtagaaaaaaagaaaagatagaacagaattggcaactacctataaaatgtgattaaaggtaggaaaaaaaaaggccctccaagtgcatcccaaaaaatataaaatttcacaatttaaagttttgtccttcgttgagtaaatcaacataaattcagcactttctatagaccactgtgctgagaatagtctcattttcatttcttcatttattcttctaaaaactcctgtgagattggtaacctgcaatagacctccatacagccttgccagcattgggaactgatctggtcagtgagggcatcttctcataaaggacactggtgagaaactgggctcagggtttgtcgtgctgggttagtctcacgatcataagcggcagagcagacattgccacctggagtttttgacttgttcctttcccctagaatgcctctgagaacgatatacattaaaccgtgtcacatctgtgattgcaacttgaatgtgagtctgtttatccttcctttgtgagaaggggttttagaatggagagggggcagttaggtgtccagggtaggcatcaccctgaggcaagaagagtgatcagaaagaagaagctggacttcacccagaactagccgaacatcagcgtcacaatacactgtcaaggtcacatgaggttgaagaggaattctccactgccttcttgttaatcatctttacatcattattttcactgtattacactttacactatgcatgcactattactacattacatgttatcattcttccattcctaggaaggggcaagaatttttcaataaacctattatcatgggtcctcatataccttatcaaaaaaaatgttaagtaacagaggtattagcaacacttaacgtcacctcaagaaagctttttgagaaatcaggaataaaattaaattgtttctgtatgatatgatattgttactatgttaatggttgttgtaaagattcacacgtcagcagcagcaaaacagaaatccccaaagttgcatgttgccgaggagcaggagcattgggtccccagtggccagactggcctcaggctcagaaatgtgt

SEQ ID NO: 2338 - DNA, 4001 bp, Homo sapiens
gaggttgcagtgagctgagatcatgccattgcactccagcctgggcaacagagcaaggccctgtctcaaaaaaagagaaaagaaaagagaaaagaaaagaaaggaagaaagaaaaaaaatagtagaggttaatgattcattaacactgccagtgccaacttggtcttagacttctttccggatctcttttctatatagcaagcaagcaaaaagcagcccaaacatccctctcctttatttatctcatacccttttccctcaactattccaaaagagagagcaagagcatggaagagaagctataggtggtgtgcatctgaagtcccagctactcaggaggctgaggcagaaggattgaggccaggagttcaaggctgtggtgtgctatgattgcacccgtgaagagccactgtactgcagctccggcaacatagcaagacactcgtcgcttaaaaacaaagagcagggagtaggacttgtggctgacacataatggatagatttcttccatctcttcagagtctcatagctggggatgtggcaggctacagaagaatggggtttgggcaactggggttggccaatagcaacatctgtattttaatgtggcaaaaacactcatagcccaggcagaaatggagaggggactgggaaaagaactaaatgaccatctgtattctaaacctgaaatgagtttgaagaagagccataatctagctgcagttgggttagctctacctcaagagcaggatgaggcaggcagagagtaagggagtcagatgtgggaggggggatgatacacaagttccccatcaccttagttttcatttcactcccacccacaatagcttggaaattgatgaaatagtacacacctaatctgggttaagttccccaaaagagcctagaaacactcagccacaaattaccctcctcagcctctggagaggaaaaaccatatggtcagctagggtggggagaactgggactgggagccagagaaagaggagagaggggtagaccagcctgcactggagaacgccccctttctccgcaaccctctccccgtccagaagccttcgcttgggtcacttccctccccttctcggcccgggttctgcatccccttcctccactatcccagggcctggcggctggagacggaagcaaaactaacacaccgtcccaggaagctatcggcaggcagatagagggaggaaaacaagagaactacaagggggaagaaggagaaatccaagacaagaggtgacccccgggcggaaagccctatcccttagcgaaaggtagagtccctagccaatctcggaatagtttgagtcctaccgtcccctacttgccccccgccctccagtccaagccctgtaatttactctaccatttttcttgttactgatcatccaaagcaccatgatgaaattctttggagggcctcggaggtcaccaggaccctcgacccacgggaaagcctaagcctcctcggcaggacacaacgtccaaaggcgctcagggacccagtcgcttgagctcattctcttatgacccaatgtggctgcccaaaagacgcctgagacccgcggcccaagcacgggctcgccggcgccgagtcccaggcaggagccgcagtgtcctaccaaagggcagggacgccccgaaccctccagcctcaaaggagtcttcaccccgcgactcccactgcccgtcgcaggcaaaagaataaaaagagagaagcgccgcgcagggctgaccgcgcgagccgggcaccaggtgatgtcagccaacacggcgcggggcacggaaggggcggacttagaaaccgggaatacaaaacggagaagacagcgagagcgctttttcttaccgccgcctggtcctctgggtgcacgtccaccagggtacaccagttccgcgtcccgttcatcttccctcggggtcgcagcacacacgccacttgtccaccccgctgtctggctccaactgggcgggcgcgcgcggaaccgcccccttgtataggcccatcaggggcggggctgaagataggccgcgcccccagttcgcggtttcgcagagaactaacgataggcgaggaggtgaggtgggcggagccaatgggtctgggacatgccccatcggtgctcgcatagatttacacaaaggtggggcttgggagcgacatggggctgctttaactgaacagctttatctggagtatgtggttgcacattcttcattaatcttgtcgctttccatctttccaagatcagtgttggtcagagggaatcaccctgcctgctcctagtggatgaggagttggaacctgcaaaagcttccttccatacatgctcctctccctatacgtaagccacctgtaggctttgtggagctgagtaaacctttcctccaccgcagaaaggcaggcaccaaggtccagctcactcagactggcctaagccagtctggcaggtgcacttccttggcaagaggcccaggaggcccagtcagcttaggctctgggtggggcttgttttgcagaagctcttttactgacgctgcccttatatagttgggagaggcgggacacattgccttaaaaggaatttgtgttcgtgagaaaggatgagccttgacttttccagttgcattttctccccaagcctaggctgggatcttgagggcctagaagagagggttggccaagcaggaccctggagcttcgtccccgcccagctgctcttggcagatggcttcttcacttggctgtggtccacagagacagcagacagaatactttaggaggaggtctgacccactcctgaagggatagtactcctatacctggcaataggctctagtgaagggccagctccctcttcaaggcaacactagggcaggaacagcagaaatgtccctacctcccagttagggactgggtcctatgtcagttaggaatgaatgaggatttttctacctgggaagtgaatgctggggttatcactatgacccaagggaataaaacccagttctggtctgttctactctaaccctcaaaaaggcatttactgctggccaggcgcagtggcttatgcctgtaatcccaccactttgggaggccgaggtgggcggatcacaaggtcaggagtttgagaccagcctgaccaacacagtgaaacgccatctctactaaaaatacaaaaattagctgggtgtggaggcacgcgcctgtaatcccagctactcaggaggctgaggcaggagaatcgcttgaacccgggaggcagaggttgcagtgagctgagatcatgccattacactccagcctgggtgacagagtgagactccgtctcaaaaaaaaaaaaaaaaaaaaggcatttactgtccttgttcttcccagaaggttgttcaggagagaagagaatggggctgctataaacatctccaggtttcgtaggtcccatctgctctgttctaaagggcctctgaaaagtcaggtgaagaaaactccagcttcggctcctaagctgtacagttaatatgacttcataaaatctggacctccaaatatgccaagaaaaagaatgagaagacaaaccaaggatttcaatataaatgtgtaattttaatatttaatttaaaataaaaccaaggctggattggattgggaaagaacgtttgatttgcagaagaatataggaatttttttaatcacgacattacaagtcatttgtgaaaacagccttcctcctgccaccggctccctatacaacctgcttaggaaatatggaggtgaatcatcccccttacctcttccctaccagggcttggttctccccaaaatccaaaggagaaataaatgtcttccgttgcctcttcccatttttacagtcagcttctaaccccttgcaaagccctgaatcagagccaagcacctcagaaaatgagggtcccttggttctcttattgaagttgggcacatgtggtcagag

SEQ ID NO: 2339 - DNA, 4001 bp, Homo sapiens
ggtggaggttgcagtgagctgagatcatgccattgcactccagcctgggcaacagagcaaggccctgtctcaaaaaaagagaaaagaaaagagaaaagaaaagaaaggaagaaagaaaaaaaatagtagaggttaatgattcattaacactgccagtgccaacttggtcttagacttctttccggatctcttttctatatagcaagcaagcaaaaagcagcccaaacatccctctcctttatttatctcatacccttttccctcaactattccaaaagagagagcaagagcatggaagagaagctataggtggtgtgcatctgaagtcccagctactcaggaggctgaggcagaaggattgaggccaggagttcaaggctgtggtgtgctatgattgcacccgtgaagagccactgtactgcagctccggcaacatagcaagacactcgtcgcttaaaaacaaagagcagggagtaggacttgtggctgacacataatggatagatttcttccatctcttcagagtctcatagctggggatgtggcaggctacagaagaatggggtttgggcaactggggttggccaatagcaacatctgtattttaatgtggcaaaaacactcatagcccaggcagaaatggagaggggactgggaaaagaactaaatgaccatctgtattctaaacctgaaatgagtttgaagaagagccataatctagctgcagttgggttagctctacctcaagagcaggatgaggcaggcagagagtaagggagtcagatgtgggaggggggatgatacacaagttccccatcaccttagttttcatttcactcccacccacaatagcttggaaattgatgaaatagtacacacctaatctgggttaagttccccaaaagagcctagaaacactcagccacaaattaccctcctcagcctctggagaggaaaaaccatatggtcagctagggtggggagaactgggactgggagccagagaaagaggagagaggggtagaccagcctgcactggagaacgccccctttctccgcaaccctctccccgtccagaagccttcgcttgggtcacttccctccccttctcggcccgggttctgcatccccttcctccactatcccagggcctggcggctggagacggaagcaaaactaacacaccgtcccaggaagctatcggcaggcagatagagggaggaaaacaagagaactacaagggggaagaaggagaaatccaagacaagaggtgacccccgggcggaaagccctatcccttagcgaaaggtagagtccctagccaatctcggaatagtttgagtcctaccgtcccctacttgccccccgccctccagtccaagccctgtaatttactctaccatttttcttgttactgatcatccaaagcaccatgatgaaattctttggagggcctcggaggtcaccaggaccctcgacccacgggaaagcctaagcctcctcggcaggacacaacgtccaaaggcgctcagggacccagtcgcttgagctcattctcttatgacccaatgtggctgcccaaaagacgcctgagacccgcggcccaagcacgggctcgccggcgccgagtcccaggcaggagccgcagtgtcctaccaaagggcagggacgccccgaaccctccagcctcaaaggagtcttcaccccgcgactcccactgcccgtcgcaggcaaaagaataaaaagagagaagcgccgcgcagggctgaccgcgcgagccgggcaccaggtgatgtcagccaacacggcgcggggcacggaaggggcggacttagaaaccgggaatacaaaacggagaagacagcgagagcgctttttcttaccgccgcctggtcctctgggtgcacgtccaccagggtacaccagttccgcgtcccgttcatcttccctcggggtcgcagcacacacgccacttgtccaccccgctgtctggctccaactgggcgggcgcgcgcggaaccgcccccttgtataggcccatcaggggcggggctgaagataggccgcgcccccagttcgcggtttcgcagagaactaacgataggcgaggaggtgaggtgggcggagccaatgggtctgggacatgccccatcggtgctcgcatagatttacacaaaggtggggcttgggagcgacatggggctgctttaactgaacagctttatctggagtatgtggttgcacattcttcattaatcttgtcgctttccatctttccaagatcagtgttggtcagagggaatcaccctgcctgctcctagtggatgaggagttggaacctgcaaaagcttccttccatacatgctcctctccctatacgtaagccacctgtaggctttgtggagctgagtaaacctttcctccaccgcagaaaggcaggcaccaaggtccagctcactcagactggcctaagccagtctggcaggtgcacttccttggcaagaggcccaggaggcccagtcagcttaggctctgggtggggcttgttttgcagaagctcttttactgacgctgcccttatatagttgggagaggcgggacacattgccttaaaaggaatttgtgttcgtgagaaaggatgagccttgacttttccagttgcattttctccccaagcctaggctgggatcttgagggcctagaagagagggttggccaagcaggaccctggagcttcgtccccgcccagctgctcttggcagatggcttcttcacttggctgtggtccacagagacagcagacagaatactttaggaggaggtctgacccactcctgaagggatagtactcctatacctggcaataggctctagtgaagggccagctccctcttcaaggcaacactagggcaggaacagcagaaatgtccctacctcccagttagggactgggtcctatgtcagttaggaatgaatgaggatttttctacctgggaagtgaatgctggggttatcactatgacccaagggaataaaacccagttctggtctgttctactctaaccctcaaaaaggcatttactgctggccaggcgcagtggcttatgcctgtaatcccaccactttgggaggccgaggtgggcggatcacaaggtcaggagtttgagaccagcctgaccaacacagtgaaacgccatctctactaaaaatacaaaaattagctgggtgtggaggcacgcgcctgtaatcccagctactcaggaggctgaggcaggagaatcgcttgaacccgggaggcagaggttgcagtgagctgagatcatgccattacactccagcctgggtgacagagtgagactccgtctcaaaaaaaaaaaaaaaaaaaaggcatttactgtccttgttcttcccagaaggttgttcaggagagaagagaatggggctgctataaacatctccaggtttcgtaggtcccatctgctctgttctaaagggcctctgaaaagtcaggtgaagaaaactccagcttcggctcctaagctgtacagttaatatgacttcataaaatctggacctccaaatatgccaagaaaaagaatgagaagacaaaccaaggatttcaatataaatgtgtaattttaatatttaatttaaaataaaaccaaggctggattggattgggaaagaacgtttgatttgcagaagaatataggaatttttttaatcacgacattacaagtcatttgtgaaaacagccttcctcctgccaccggctccctatacaacctgcttaggaaatatggaggtgaatcatcccccttacctcttccctaccagggcttggttctccccaaaatccaaaggagaaataaatgtcttccgttgcctcttcccatttttacagtcagcttctaaccccttgcaaagccctgaatcagagccaagcacctcagaaaatgagggtcccttggttctcttattgaagttgggcacatgtggtc

SEQ ID NO: 2340 - DNA, 4001 bp, Homo sapiens
ctctatgccgtggcccccacatccctggctttgattagactagagtgacttgctgctctgagaagtaccgttttcctttgaatcctggcagaacagactggcccagagaacgtcaagtccaaactccctctcctcaccagcttcacaaagagccgccctctgctcacccaaacccttggcttttttcttctcctgtggccttcgatggtctcggtctccgacctcgtcactctgccggatctcttctgtgtttggatcccccttggagggttccttctctccattgactactggagttggttcaggctccccattccttgccacataggtccgggacttctctgcatcttcgggttcagccggctcaccctgtgccccatcctcgccggggcccccctggttattgtccacacagtatgtgctcagtatgtcttccagttggcggctcagctcctcagagacatcacgaagggccccagactgagccgttctggcttgagcccctacagcaggagaggatgaggggtagagtgagaaagaagacgattataccactggttgggatttttcaggcccagccaaactcatcagtttgagttaaatgttgcctaacttttttttttatggaaactgagaagcaagaatggagtatcattcagcaaatctagttcctgtcagaatttagattcgaaacatcttttaaatcaagaaattatagtaatcgttgcctaacttctttaagtctgtttacttgtaaaatgacacaactatttctcactaccacccgaacatatttgttagatcataaaagtatgtaaagcatcagcacacagggatggcacggagcaacttctagtccatctccttcccccccacaaaaccatttcttgccattcagatcattctagaaatgcctcaaacaggaagggcagttagctgctggtggctgaggtgtttctaacgggacctggatttcctgactgggtgcctcgtttggctgccacctgacttaatcccgtcggagcttctctccagaactctgttcctgtgcttagagggggcagctccgccaactcgccagagcgcaggggggaccgcggcccccagcactgtcctctcattctacatctcctcctcccggacaacctggcctcggcctgtaagtccagaagcgaggccgaccccacagctcctccccctgcccgctggcaacgcagagctggcacacaccctccggcttccgaggagcctggctgctgccgggaccttctgcttctactgcaggagccgcctggctgggccgctcctgggctccctcgggtcctgcttccggttgtcctgggctgctttttggattggattgtttggcagccccgttctttttgtcttggttcttcattgtgatgagcgatgctgggtcaggagaagatcctttagaaacaaacacagttgctattttccagacttcgaaattcttcgcagcctggatcagaaatccccacagcaggcgcacaaagcttcttaaaataaacggaccggcaggcccgggcggagggcgccaacggctctctggtcttggcgggtcaggagagcccgacgtgccggggcaggctttcggggcgcagctcccacagcgggtgagggaagaggcctcttctccctggagccacttcccggcacaaccggccccctcgcggcaggccgggcgcgggattggctcagggccggagactgacgtggcgggactcccggcaccgcccccgcccctcaggccccacgtgcgccccccgcgcgcgcagccacccacgccccgcgcgccctcaagccgcgaggcacgcccgcgcatgcgcatatccccagacagcccccggcccacgcggggagttggcgtgatttccccacaggccgagaacatcccggcccgcacactctcaaatagtctcgcccaccggccgccgctgcacgtacctcaccgccgacgtccgatggcttccccacctctggcctcgcaccggaaaccccgagtaactgctgccggccagccgcctgctcccgcctcagccaatcaatagccggcgccggcgcggagcttgctgggaaggacgaagcgagggcggcctcggaggcgggcgccccggcagggcggggcagggaaaagactacgcgtccctctttacgcaggggctagccgcagatcccaaggtgcataagggactgtagtcctgggagtccaaaaggagcccgtcattctgcacgagtgcccatgtcaaccttgtttctatctcgcagaagctatgcttcaactcccaaagccttgcgcctggctgttgtttcctgcaggcctccatcaaaccttcctccctggccgtgaacaaatgtgactccatccgggaactccgaggactcgggaagagggatagagtcctgggctgagactcaggagacccatactccagtcccaacttcatcacggatttgctgtgtggctggacgttctgttctctctctgggcctcaatgtccttcttccaaaggaggcttttaataacaatagcagttccttgaacgcttactgtgtgctttcccgctatctaatagcttggttctcataaccactcatagaaataactactatctgttatccccattttacggaaaaggacagtaagagaaaggttaggtaacttatccaaggtcatatcgatagtgagtggttaaaacagggattcaaaactggtaagtctgagaccagcacccaggtaattacctggtctttcacccagaagaaacactaccacagcaggtttccctgaggcagtcaaggtaacttgtgaaagtaggtcatattttcccctctccattaccattttggcagtcagttcctcagaaaggtgctgagttaggcttcaggcatattcatgagccttttctctaccccacactctacaaagtctcactggggttaaagtagaaaaaacccccacagttccctacacatgagatcacaattctgtatccccattgcttctggataatgaaatcaaacccaacaatccttgtgcctggaatttgaagcctaagagatttgacttttgccaaacccaaaattttttgaggcccagttcaaaggtcacttcagagccttcccagtgctctgcaaaccgtacttgctccctaggtctgcagagttgttacagcattagcagtgaggtgttgaaattactatttacttataagtcagttaattttgcaagaactgttggctaaatagtctagtcccagagcctcgcatcaggctgtgggtagagaagattgtaaactgttgtgctaattgagcgttggtttagggctgttaggatgttaaatatttcccccaaaggctcagtgaaagacttcagagccgtgcatgttggatttcagattttcagattggggaagctcaaccggtaaaatttgagaaaatcccaaattggaaacacttctggtcccaagcatgttggataagagatattcaatttttagtataatgatggaactgaggctcagaaaggttggaatctagatgtcctgaaaccaaggccctgattatttctagaaaagcattctggaaatctcttgagaaggcaccatataaatcaggccttgatagatttccatataacaagggtgttctaggtgagataaagaacataaaaatgtatgcatggggtgagggatagaggatgtagtagaagggtcaacaatagcctagaggggccagttgggtaatgagaacaggcaagaataattgacagaaacataggttaacaagttactttctcctttgctataaacaatatatagcaacaatattagcacctgccagagtgagggagaggtggtgattgcagtaaaatacagcagctcttgcacattgttagcaagcagaaactcaggccgggtagggccagattgtatttttgttttttagacaggttttactcagctgctggggctggagtg

SEQ ID NO: 2341 - DNA, 4001 bp, Homo sapiens
aacagaaggattgcagcagaatcattccatacagtaaggtcagtgaaaaaaaaaaaaggaagaggggttgggatccatgctacaattcatctacttagaaaagcataaactctgagttcacagactgtcagtccaactttcaactaagtaagggctgatgaggagagaggtgttaaaacttagaatggagatgtaggtaatggatggagtagggggccacacctcctaacctccattcataaccactgatcgctcacttacaaaaaaacttcgctgaaccacagcaaggacaattgttggggacccttaaacagcagaccttctaccattcgcttggctcttcttatgcactagatacagctacctgggatgcaggtgctgtttcccaaaggcaagcaagtggcagtaacctagctcttcgcggaagaagtaacgagagaaatcttcagacccagaacagggtcctctgcatatgcaggtccccaacggctctatttctcccaggtgggaaggtgaccgttcctcaggacctcccaagtgctaggcactatgctgggctcttaacatgctttccttaatttacgggccattccttccccccaatccaataatttagagaggcctcaagtacaacttctccattccccagacccgctactctctaccccaagaaatcttcaaactccaggagcggttggggaagataaaaagaaatctggagtggcctaagagttagaatgggaggggaacggtgctagggcaagaagagattatactgggatcagtatagtaaagatcagtaaagagaagataagaacgcggtctgaccctttccaagcccattatgtccatcagaagagatgacgaggagcaggaaactgaagcccagcaaacaggtggccccgagacgaggccgcgtctccatggcagtaggtgcgcggggccacggggctgagcggacgcagggccggagtcccagcagacggtccacacagttcgccgagcgccgctcagcacaacacctctacttcccagatttttttttttcaaactctgaaggaagtgatgttagacggatgtgggtggtgcctccggggtccggtttgggatggagtgagcttaaaggtgcagatcacgtagaagggtacgagagctgttctcgagcgcgagttgcttttcgtggattctgggtgtccaggtcccgggacggagcgggaaaatgtaggccaagatagtaggggcgggggagaggttcgggagaaccgttgctcctcgcgtccgccacccagtccagcccctccccccaagaaccgctgcacttcctagtcaaaagcaaattattgattcgtgaggtcagtcgctcccaacagtgggcggattgcccactggcctcggattctccttacccctccacaaatcaagactggacaactggatttcattgttaggttcctgcgagggtctctgaggagacctggcaagcctgttctgcggtgcgtgggctcgtgccgtgcagacatgcactttcccgctggagaagctctgtaccttatttttccttgcaaccgcaaatcttctactcagggatgatgcaaccaactgatgcaagctccaagaaaaccaaacttgggacctcttattgcaaaactgacttaggtggacttaggacaccaggatataagtcactgcaggctaaagtgtaaagcttctggttatttttcttgtagcttgaggatttcttcccaatttttccccttcgctgtataacaaacaggtgaaaatgtccggtctttttcttcctggtactagttgagtcctaaagtccgtacttaatgcatagcgaaaaagcgacctaacaaaagtacacacccaaataaaaacataccgaccacccttttattaggttccctaaaattgtaggcagggacacaacagaacgctcgggagactgcaagccccaggatgccgcgcggccacctgcacctgccgccactagcactaagagggatgcgcaaagcaggcggggcgttggagttcagatgttcgctcccgggataggctgccccggagagggagaggcggggtcggctgtatcacgtggatctgctcccgccgccgccgccgccgccgtcgtctttctctgtctcggctgaggcagccatctttctcttgccgcgtgctggtgttggaggaccctccctgcttcaggtgagacccccggcggtcccgccacttcacggccataggccgctgcgcacggtctccccccgccctccccttccgacacccgccaaccgctcaggctgccacttccgccgtggtgcggcgagcgggggcggaggcggctggcttggcctgtcggttaccggcggcgcagctgggggtcggcacctgtgggaaggtccccagcaccaccgccccctgtgggagcgagcgggcccgccctgttgccgcccagaccctgtcccaggaggcaggtggacgcccctcctctgttccattactccttgctcacaacagcagtgttgtgtgctttgagctttatacaggctctctgttgtcatctcatttgatgctcccagtctacagatagggaagctgaggttaccacttcccgcccttgagtccagggaaccgaactcagttacagcactcttcaccttgtaatggcagtgtttgtttacaagtcggcgtcccttgcccatctttataacccccctcccactgcctgctgaccgacaggctcagtgttgcacagctagtgaatggcggtttcaacttccgttcccacattcttgcagtttaccatagttgtcccctcgggagtggtaacaatagttaccagtaactgtgtatcttctgtgaaccattccctgtggttgataatgttttaaccctcaaaacaaccctgtgaagtacgtggtgttatacctttccaaatgcaggaggaatacaagttcagagaagaaaaatacctttcccaactggtagaaccttggtctttctgattccaaagcctgtgcttgtcttagagaaaccctacataataaaaagtcaggactcaaggttgcaattatttttatctctgtgtaaacatgatgtatgtgaaagtgcctaccacaatgcttctaacttaggcacttaataaatataaacctgtttacaccctttcttgagtccttgagaacagtgctaaaagatcctggaatccccaaggaagaactcattaatcatgtggctttaggaagttacttctcccttttgggcctaggaagggacttctcccttctgggcccttatttcctaatctattaagatgggagggagggaactgtttcgtttgtaatttatactttgctggtgctagcagatgttgagatgacatcacagataggaatgatgggtgcaataaagtagaggttgattgagaatagagaattaaaccaggtgatcttggaggtctactccagattctgagcttgacatcgcatagactgagtccagtcctctttcctacttgaattccacacaccacaacttgccaagaaacaaaagactactcttgttcctcccctactgccttgagctctcagtctccctaaaatcatttttctctgagatactccttaggaacaaaatttctcaattctgttgtcctgaccacctggaatggaatctgttctttcatctataccttgatttgaagagttaattttgttcttgcttttatttcaaacaagtcaagactttgtcttggcatcccaacctctgtctgttctcttgggaattgttacttcaaaatgcagaagaatcccaaagggtttaccaagtatctaggtctaatgtttttccttagcccctttttttttgcaataaattcctttggctctttgttagttcactacactctcatggccacattcctttgagaaaagtgaatgttggtccttttctgtggatatttgagcataggaattgggatttaagtcatcaaatttaag

SEQ ID NO: 2342 - DNA, 4001 bp, Homo sapiens
gcgcatgtccctgagataatatgattgcctctgactgatgacaacttctgagtcagcaccttggtctggccattggcaaggtaagtgtggcgggccacaatggcagctttggggaccacaattcgggaacatgtattctcaaagtcagcatggatggaaatctcatcacctagcaatgagaaagatgaaaacttactgatactcagtatagttaatgacacttcctctaccccagtcccatgcccttgcccctaaacccagttcctgttttaactgccataagcactaggattttaccttcacagaatccttttctgtcaattcgagcagagacagacacccgcccatcaggaatgaacatgcaggaaactttcttttcttttttagcagacacaggtgcctatatagaaggggataaaaaggtgttttgagatgcttcaatctaatgcccaagacgtctgatttatcatcctcatgacccaggagaatagaatctttaaaatggatctcaccattaaatcaggggtattgacatccaccagatccactacttcaaagtttttctttgtctcttgagttggctggctcgggcggtcaagaaaagccttcacccagtagtctacacacccatattttcctttgaaggatgttcccagaggcctgtgtcaagaaaatgaaaattttaaaacgctctccaagaacagtaagtgatcaaaggagggcaagatattttagacagaaaagttcaaagatgcatttagctgatatttacccctgaggaagctcaaagccgaacttgtactcatatttgtttccaggtctcatgatcaccatctcattctcacctgaagggaaagaaaatcgagtagccattaggcttgctgttacacttaaaatgcatctgtgtgataaggaatgcttgggtggcatgcaaggtattgaagtacccccaatttcatcccatatatatattttttaatccatcccatattgttcttaaagagaaattctgatgtattttgtcgggcagcaagttgccaagccctgcaatactgaaagattcacccaggacagttctctactaacatctcaaataggaagtagacaaagaataagcaacttatgcacacataagactttaactacccgaggcaacgcccctcaggatcccctttaggacacagcaccataaaaaattgtacaaatcacccttttttttggggggggaggagaatgtctgcaaattaaaacagaaaaaaggaagcaacaacacgtaattcaaaccactcaaactgagcaacttaaaacatttcgtacaggttttgtgtattcaattctcttctctaatcagctttcaccctccaacaatgaattgggccgcttacctgttggctggtcttccagaagaagcgtgtcttcatagcgcaggtactccgaagtctgtttgcactgctgggatccctgcatccaaagcactttagccactccgcaagccaggatcctaacggctttgacacgagtaacttcacacacctccactatcacccggccagccaccttctcgccactgccgtacaccttttcagggtcgttaaagaccacctcaaaagacttgatcttcttgaacatcaccatgatggaactgagttggttttaagagttagaaatgacggtggaagaaaaaaaaagctccaaatcgaggaaacccctttgcaaaaaattatttcactttaaggaattaaggtattcttaagcagtttgagcttaaaaataaaataagatttaaacaaatgaatattaactactaggttttcgaaaaggcgcctaaaaaatatacgccgctggttacactaagctaattcagagaaaaagccttctttcccccaattgctggagaaaagatccgatctccacaagcactcctttggagaaaaagaggggttagtttcaagcaggaggcggaaacgtctctatatagtagcccgggccagaagagccacgcgagcgctggcccggaggctcgtgctgccctcgtgcacatccctcccattggctgcccggtccttgtttaccaggagcccgaccaatcagtgagatcgctgtggcgcgtggacacggtgtgctcctggctgggaaaatggttgttgcgctctggagcggcgcagggaggggggaaggagaggaaggagaggaaggaggggaaggagggggctgttgagcgtcttctcccgggtccagtggaaggaggatcccactgaccctaaaacctagccagggcgacaggccatcggagggcgggtgtggacgtttctggtctgagagcggtgttttgaggtaaaaggaaaatgtgcttatgagggaatttcatgcctagtcttagccagtgcagttactttagagcctgtcgttattcctggctcataaatagcaagtgtgtgaaaatcccatagctccaagaatactttcaggtttggggctgtggagcgcagaatgcttggtgttactgttcaggaacagccctttgtccttctcttgccccgcatccctattaagtataaaaaacaccaccgtctctgagggaaaggagaactttcaggcctcattgtgtgtgtaggaccgatgtcttctccttcccgttccaatcccttggggctagggctgggggctgcgtgcctgtgctgttcgtcacccacccccagcttgtaccctctcttctgttctctctgttctgtggaacggaaataggaggggcgtgtttacatcctgttgcttatcctgtcatctcttcaatttctacctgcaaagttggggaacactttgtctgtgttccccatttacctcattacctctttagtgaggtgtgtccaggcgctcattatctcccacttcctacctgcttctggaggaaaaggaaaagcgggaaaaaaaggatgcttcactcttttcacttttttccagttatgttcactctttcttgtctccatcccctcttccaactcactaaatcaaatgtacatccataaatctggttaaaagtgagaaagtcctcttgtttatatccaaattttcagtggagagatggccacacacctgtttgaaggaacaattttaaaaactattttcaaaggtttttccctaaacggtttagaaaacagtaagaaggaaaagagaagaaagatcggtcaacagagcactataaattcaagccagaagagaccctaccctctctcttcattctttgttggtttcgtttggccagctgtcagatggattttcccctgctggctgtgagatgctttaggagctgagtactgagaacttactcttaaatgtaataggaaaaacctgtatgcaaaagtgcagggattcttcctccttttatttgattcatagacccttcctatatctgtgctggggtatcagaagattattatttaattccttgtgctggaaagaggaagataatgtcccaagattgagatggggaggtaattaagaagcattcaagtatattgaaaccctacccaatcagcaaaaaaaaaacaatattcattgctgttaaagagccttcttccttcctcagacagcctagctggattgacactctaaggctaacgagagttacaactcaaccccaatattaagcaagctcaagaataggcatcatgagtctcttcgaaaacacacacatgcattaaaccccaggaacatgttgatccttagggtgtgtttgaggcggcaccctgttctagaaacttaaccagctaggcttgaggtgttttcagttggttaacaatattgattgagttactgggagcagaggaggtggaactctgactgaagtaattttttttttaaggtggaatcttgctctgttgcctaggctggagtgcagtggcctgaccccagctcactgcaacctctgcctcctgggttagagcgattctccgcctcagcctcctgagtacctggcattacaggcatgcatcaccacgcccagc

SEQ ID NO: 2343 - DNA, 4001 bp, Homo sapiens
cagagttgcaatttgtcaaacatggtttggagaagaatagttaagtggcttgttagagaaccattgcaaaaatcaaggcgagacagagttatggaaatggggcaagagagagtttgtgggcaagaatgccattgctctgaaggtgatggaagtgatttaaaaatgaacaggccctgctaacttgagagatcagcaaataaatgatcagtcaataatggacctaaagaatgagcctaacaatgtgctgtcttccatgctcttaagccaatactacgaataaaatcagtacacagccaacttttacagtgcatgggccaggcacaaagccaaatatttcaaaaaaaattatcctattttctccacacaaaatccctataaagcagatactttttattatcctcagttcatagaacaggaaggggcagagttgagatagctttcctaaggtcacatagcccgtggtttttaatctaagcagtatcactcccaagcagccttatcctcaggggatatgtcccaagaccccctagtggatgcctgaaacctcagatcaatttctttttccttcttcacttcacaatttcactgacaagattcattctttccgtagatcttagcaacctcagcatatgctgttttttctttccttaagtctttccttaagaactttcaccttttcacttcaaaaaagcactttaaaacttactgttggcagatccaaatcgccagcatcattactcccgtactttggggccattattaagtaaaataagagttacttgaacacaagcactgtgataccaccacagtcgatctgataacccagaaggctaccaagcagctaaagggcagcaagaatatatagtggaatattctggacaaagggatgattcaccttccattctggaaggagctggttggctcaagattttatcacgctactcagaacagcatgcaatttaaaacttactaattgtttatttctggaattttcatttaatattttcagactgctgttgactggggtaactgaacctgcaaataaggaggtatggcttgtacagctgcttcttgatttatgatggggttacatcccaataaatccgtcataagtggaaaatgtaagtcaaaatgcatttactacccctgtaaacccatcataaagttaaaaaaaaaagtctaaccatcctaaattatatacgatcgtacttttctctgcgtaaaactactagagttgtaataatggaggggctcactaggaggcagtaaactccttaacactggtgatgttcaagcatgcagtaacaatgatttgccagagctgttgatgagcggattccggcattcaataccttagcaagctacaaagtctttagattcccttagtattcatataataaaatcaaattttctaaactttgccacacaagatagttcccaggtcagcagtttcaacatcatttgggcacttgttagaaatgcacagtatcaggccctaccctacacttaaagaatcgggatctgtattttaaaagatgctcagctgattaatagccacgttaaacttttagaagcactgatctaatcccctaaatttcacatataaagaaacagagaccacccctcagaggagcaaacacagacatgctggatccggtcgtcactggatgggaacagggctcctgaagtttcgcactagaaggcaggcgatggacaggcgcaaaggggcctcacccggtcaaggagtaggatgcggccagcgcaggagctggtggtgaaaaactgatctcgcatgttcagaaactgcacaagctctaccacatcctcgtcaacactgcccttccggctgaggtccgctttgctcaaacattgcgccttccatttcctgaactccgcgctgcgatccatgggtgacggactcagggtctgcgctcggctccttcatggtagcctcgtctctccctgggggcagccatattgaagcgagcggtggccgaaaaggtccaaacttcctcttcgttcttaatttgggaaattctagtgccttcgcctaggggtggagagaggcgcacatcctgggtggagcgaggcgcacatcctgggtggagcctgcaaaagttggagaaggtgtggcagtcctcatttctgtggaatctgaagaagcccacgcagattttaattcccactctagattctggtaagtggttttaaaaactctccttagttgtttagacagcgaatctccccactgctcgtccaagtggaaccgagtttgattttggctgcacccctttcctgccctctgtcctcccagagaactagtgcgtagagctccagaccgaagccattcccctccaggggctgcaagttcccatccataaatcaggtaggaagttttgccttctggtcctgggctcctagccctggtcctgcgtttaggctctgagtttaggctaccacaccatgaggtgtccgttggcactacccctgcccagcctccgccccccgcactccctgtcccccagccccacgctgcaccccccccccccccccccgccagtcacccgcttgatttttccctgcagccagtgcctgggtttggggattcctgcagcagcgcccagcggtctgtccagggccccttcccacagcccagctctcagctgtagaggatttgtcctaggtagggccccttcccacagcccagctgtaggggatttcttctcctaggtagggccccttcgcacagcccagctgtagggatttgatttcttctcctaggtagggccccttcccacagcccacctgtcagctgtaggggatttctcctaggtagggctccttcccacagcccagctgtgggggatttcttctcctaggtagtgccccttcgcacagcccagctgtaggggatttgatttcttctcctaggtagggccccttcccacagcccacctgtcagctgtaggggatttctcctaggtagggctccttcccacagcccagctgtaggggatttcttctcctaggtagtgccccttcgcacagcccagctgtaggggatttgatttcttctcctaggtagggccccttcccacagcccagctgtgggggattttttgtcttggattcccacaattacaggtttcccggagcttcctccagctttgccatcaggattgcagtctttgagagaaatgtatagttttattgaccctgtgacgcccaccacctagaataatcttcaaaagaaaattacaaaacaccctgttaacacatcgttggatgtttatactgagtttctagaggagactcagtgaccagggaaggtgtgtcaatgattaaacctaaaggctaaagtttggaatgcttgtccgtagctaatggaaattgttgtgcgagtccctctgaagccactgtgattacgtgtctggttagcgcagcgagttcagcagcaaatctctccaagctctactcctccagcattagggaacagactgccctgttccatacgatcatggaacctggaggagtccgaaattattaaactcctcccctcttcttaccccgtcctatctcaagtgaacagaagtgacctgataagatcacacagccaggaagagactttctctgaccacttgtaattcttgccttttttacatttctgggttaataataaaccatatgcttacatgagtcattgtgtattagcagcagaacaatttgtaatgattgattttttttctaagttttcagtttttaaaattcttgccagaattcttatttaattttacttttgctcttgtctcataatgttcctttgctctggctttgtgacttgatctgttcatcctatgttaaaatatactcctaacattttcccaattcctttaattttcgtttaaatcaaatggatacaagcatagccaggaaaaagatcactgttggaagagggattttagattttctatttcctagatttgtaaggcatattggcaacc

SEQ ID NO: 2344 - DNA, 4001 bp, Homo sapiens
taagcagagttgcaatttgtcaaacatggtttggagaagaatagttaagtggcttgttagagaaccattgcaaaaatcaaggcgagacagagttatggaaatggggcaagagagagtttgtgggcaagaatgccattgctctgaaggtgatggaagtgatttaaaaatgaacaggccctgctaacttgagagatcagcaaataaatgatcagtcaataatggacctaaagaatgagcctaacaatgtgctgtcttccatgctcttaagccaatactacgaataaaatcagtacacagccaacttttacagtgcatgggccaggcacaaagccaaatatttcaaaaaaaattatcctattttctccacacaaaatccctataaagcagatactttttattatcctcagttcatagaacaggaaggggcagagttgagatagctttcctaaggtcacatagcccgtggtttttaatctaagcagtatcactcccaagcagccttatcctcaggggatatgtcccaagaccccctagtggatgcctgaaacctcagatcaatttctttttccttcttcacttcacaatttcactgacaagattcattctttccgtagatcttagcaacctcagcatatgctgttttttctttccttaagtctttccttaagaactttcaccttttcacttcaaaaaagcactttaaaacttactgttggcagatccaaatcgccagcatcattactcccgtactttggggccattattaagtaaaataagagttacttgaacacaagcactgtgataccaccacagtcgatctgataacccagaaggctaccaagcagctaaagggcagcaagaatatatagtggaatattctggacaaagggatgattcaccttccattctggaaggagctggttggctcaagattttatcacgctactcagaacagcatgcaatttaaaacttactaattgtttatttctggaattttcatttaatattttcagactgctgttgactggggtaactgaacctgcaaataaggaggtatggcttgtacagctgcttcttgatttatgatggggttacatcccaataaatccgtcataagtggaaaatgtaagtcaaaatgcatttactacccctgtaaacccatcataaagttaaaaaaaaaagtctaaccatcctaaattatatacgatcgtacttttctctgcgtaaaactactagagttgtaataatggaggggctcactaggaggcagtaaactccttaacactggtgatgttcaagcatgcagtaacaatgatttgccagagctgttgatgagcggattccggcattcaataccttagcaagctacaaagtctttagattcccttagtattcatataataaaatcaaattttctaaactttgccacacaagatagttcccaggtcagcagtttcaacatcatttgggcacttgttagaaatgcacagtatcaggccctaccctacacttaaagaatcgggatctgtattttaaaagatgctcagctgattaatagccacgttaaacttttagaagcactgatctaatcccctaaatttcacatataaagaaacagagaccacccctcagaggagcaaacacagacatgctggatccggtcgtcactggatgggaacagggctcctgaagtttcgcactagaaggcaggcgatggacaggcgcaaaggggcctcacccggtcaaggagtaggatgcggccagcgcaggagctggtggtgaaaaactgatctcgcatgttcagaaactgcacaagctctaccacatcctcgtcaacactgcccttccggctgaggtccgctttgctcaaacattgcgccttccatttcctgaactccgcgctgcgatccatgggtgacggactcagggtctgcgctcggctccttcatggtagcctcgtctctccctgggggcagccatattgaagcgagcggtggccgaaaaggtccaaacttcctcttcgttcttaatttgggaaattctagtgccttcgcctaggggtggagagaggcgcacatcctgggtggagcgaggcgcacatcctgggtggagcctgcaaaagttggagaaggtgtggcagtcctcatttctgtggaatctgaagaagcccacgcagattttaattcccactctagattctggtaagtggttttaaaaactctccttagttgtttagacagcgaatctccccactgctcgtccaagtggaaccgagtttgattttggctgcacccctttcctgccctctgtcctcccagagaactagtgcgtagagctccagaccgaagccattcccctccaggggctgcaagttcccatccataaatcaggtaggaagttttgccttctggtcctgggctcctagccctggtcctgcgtttaggctctgagtttaggctaccacaccatgaggtgtccgttggcactacccctgcccagcctccgccccccgcactccctgtcccccagccccacgctgcaccccccccccccccccccgccagtcacccgcttgatttttccctgcagccagtgcctgggtttggggattcctgcagcagcgcccagcggtctgtccagggccccttcccacagcccagctctcagctgtagaggatttgtcctaggtagggccccttcccacagcccagctgtaggggatttcttctcctaggtagggccccttcgcacagcccagctgtagggatttgatttcttctcctaggtagggccccttcccacagcccacctgtcagctgtaggggatttctcctaggtagggctccttcccacagcccagctgtgggggatttcttctcctaggtagtgccccttcgcacagcccagctgtaggggatttgatttcttctcctaggtagggccccttcccacagcccacctgtcagctgtaggggatttctcctaggtagggctccttcccacagcccagctgtaggggatttcttctcctaggtagtgccccttcgcacagcccagctgtaggggatttgatttcttctcctaggtagggccccttcccacagcccagctgtgggggattttttgtcttggattcccacaattacaggtttcccggagcttcctccagctttgccatcaggattgcagtctttgagagaaatgtatagttttattgaccctgtgacgcccaccacctagaataatcttcaaaagaaaattacaaaacaccctgttaacacatcgttggatgtttatactgagtttctagaggagactcagtgaccagggaaggtgtgtcaatgattaaacctaaaggctaaagtttggaatgcttgtccgtagctaatggaaattgttgtgcgagtccctctgaagccactgtgattacgtgtctggttagcgcagcgagttcagcagcaaatctctccaagctctactcctccagcattagggaacagactgccctgttccatacgatcatggaacctggaggagtccgaaattattaaactcctcccctcttcttaccccgtcctatctcaagtgaacagaagtgacctgataagatcacacagccaggaagagactttctctgaccacttgtaattcttgccttttttacatttctgggttaataataaaccatatgcttacatgagtcattgtgtattagcagcagaacaatttgtaatgattgattttttttctaagttttcagtttttaaaattcttgccagaattcttatttaattttacttttgctcttgtctcataatgttcctttgctctggctttgtgacttgatctgttcatcctatgttaaaatatactcctaacattttcccaattcctttaattttcgtttaaatcaaatggatacaagcatagccaggaaaaagatcactgttggaagagggattttagattttctatttcctagatttgtaaggcatattggc

SEQ ID NO: 2345 - DNA, 4001 bp, Homo sapiens
tgtagtcccagctactcaggaggctgaggcaggagaatcgcctgaaccggggaggcggaggttgtagtaagccgacatcacgccactgaactccagcctggcgacagagtgagactctccgtctcaaaaaataaaaataaaaaaaaaaagggtacctcataggttaaactttgatatctgggcgtaaaccactggtaacatgtgttcatctacatgttgtataatgttcataatgtaacgaccatacttgagttttggacaagcacaattcatctattatatttatttgaggcagatataagcaccttcatgccacaaaaatagtagcatgtttcccattaacgatgtttagaggcacgtgtaatggtaagcagcaattaacagaagagttaaaagatatggatttttattttgacaaccgaaatctgaaaaagttgaaaatctgctcgagaaattatgacaaaacttggtacatgcccacagcctaatccatctgcatcaaaatatatgaaaaatttggtaataatctaccattatcaaatatatttttattagaatttaaataccagtattaaagaaatccagtatttctccctccttttctggcttcccccacccagcccctatctctgctggtatacgtatgccctcgaaatgaataagtaaacctcttaaagcttttgaaaaacagtatcagagttgagacataaccaccaactgaatcctataaatgcttggcagcacagcctatgaagtctttctttgctccagctaagtgagccaactgactaaccgtgaaggaatagacaactgccttgagtttccggcgaactcttggatccacacccagtgaatttcacctaaaagtccttaaacttttgcaataccaaatgacacacacatatgatcataatcctattacctgatttcagatttcataaaccatgtagaagtaagtgtagcacagcgacaggccaaagttcaagcagccatatgttcagcatacgtgtgctcagccctccaataccatccttctgcttggccaagagaggggaaacccagaaatttcaattctctctcactaccagtatcatggcaaaccaaaccaaaaaaaagaaagaaaaaagtggcaagcaaacaggttttgtcccactgtcctgtcctccaaatgtatcccctgtctttgtcagacctctcaaatcttttcctcatatattcaagacacaccaactcgcttccacctgacagtgccaacgatctcctgtcccactacaggcccccacacttggtataactgtccacaaggccctagcctgagagcctcgaggtctctactgcccacccgggagaggccccactcccaaccccacacgcctacacgaccccctcggactcagacactggcccagacctcctcccacaacgcccccagtccatctggggcgcgctcattccatccctggccccgccatccacccggctgcccagcccacacaccctctcgcggggtggcggaggatggggtgcgactgcggggcgcacgggctggggtgtgtgtctgcgggcgagcgggaggctcctcggcgtgtgctcggctgcccgcgctgtgcacgttcgtgcgacgcgtgtccacgtctgagcgcgtggccgtgtgtgcggtggggccaggccctccgcccgcccgggtcccgagccccgccgtctcctcgctgggctgggagcccctcacctttctcggcgcgaccgcagctacgaccgtctccagctccttccgcgcggccactcatcggcgtcccgcgctcgctccgaatatataccctcatccggggggccgcggcggcggggcgggccgggagcgggggccaagtggagcgccagccccggccaccccgcccctctcgccacgactagtggctgccgacgcctgaaggagtggaagccgaccgcccagacacgtcagcgccgggagcacagacgacgacgcggacgcggaggcggccgcggcccggggcgccggggcggggctagggatgggggccgggcatgaaaggagtaacccaccgggccggggcggggcctagtgcgtcactcattctctggcccaatgggaatagttctggagcgcagtcggctggcgtcccggtccctcctgcgcactaactgagggtgaaggatgtcggttgggtctgctaggaggggccaggagccggccggcagagagcggctcgtgggtcccaggacccctgacgtccctaggttgtactgggaggtgcgagcccgaggctcttagtcggcccagcggcacggggcacaagcgggccacagagatgggcagggagctgtgtccccagggtggcggatttccgagccacccacgcgggtggttgggaaagggcggtggattttcctgcggagaaactttcagggcgggcctggcgcgctctctgaccttgggctagttattttgtgtgcagttcacaagatgcctggccgggctccaaactcgctctctgtttggttgtgttttggctcccaagaaggcgaagccaggccttttttcttttgcacaaacagacaggaaaggagagaggaaatgcaagcaaaggtagtaggtaacctaaggtagtataagcccggggtcatctttgtgagtttgcagacttaacgtcgctaggcctcagtactctgcagaaagatggtggaggacctagatgacctcccaggccattccaggaccagtgtttacagtcctgttacataacctagtgtgggtgtgcacacacaggttattatatgttcagcactgtgcccttggaagctatgtttacatttaaagttgtgttgcattttgcagcttttgcaagaagtggaatatgttgaaatacgaaaatacctagatttaacataccacctatcataaagagattcaggcgcctttcttctactttcttgggtgcaaaggccttttcattccctttaccaattgcataatcacccactgcctcaagtaacaacagaaaaacttaaacttggtaagtaatgctggtagatttacattcaggagattgaatactctccatctctcatgatcctagaacttccttcgtttctttgaaagaagaatagtgtagtgattggtttatagtgtagtgattggtttcttaatcatgggatctgaagacaatttcagctttattgcttgtgatctttggcaagctacttgtgctatcagttttctcatctataaaaaacagacaataaagatgaaaatgccatttggtggttgtattaaaccaatcgatataaatgaagtatgtaaaacagtaaacactaaataacctttagttattatttattattgagcacttattaattcaaactaggagacccagattcaaaatcagtctacgcttactaactgtgtgactttgggtaagtcatttaaccactccaaactccaatgtccttttatgaaatgaagctaatacctatttcacatgggtatagtaaaaaatgagaaagaacctaagataatgtctggaatattataggcattctataagtcatagatgaatgactgagtaaagagcaaaattattagttagcaatcctttaaagaaaaaagatagaactgaggtccagctcaatgtttttaatgaactactataaaatcacatttgtacttttacccttttttgctgaagtttcatttgtttgttattctggttactaggcataagaggggccataatctcatcttgccagctaaatgtccagaaatgtctaacactagagttatttctgtccttcgaaatactttttatatacatggtcttttaagagctgattgaagaaaacaaggcaacgatgttcacactacctatgattttttgacattacaccaaaggtatcagctaatgaagttagacaacagaaatcctaagaggcttataaattagaaaaaatatataagaattaaaaaattattttttaagaatttt

SEQ ID NO: 2346 - DNA, 4001 bp, Homo sapiens
aaaaatagccagagaaatttcactgaaaaaactaaataacaaatatttattgagaatctactatgtgtccaatacttcaggaaaatacaaaagcagtatgacttagtagctgccctcagggagcttacaatctaatttaagaaacaattcagaaactgaagctagactgagttgggtaaaatttgctacctctaacagaacaactaatttctgtagatgctttgttgaaatggcccctgcatccccttccccaccaccttgatatctagttagtaagagtacttcccagttaggacatagcaaggaggagctttaaagatgaaaaacaaaacaggacatttttaggcctttcatcactagtttatgtgccagcaatatttcccattcacaaaggaaacaatcattgagatagtctaatctttaaggacaatggtgtcagatctcaaagcagttttatcaactgatacacagccaaaatgttttaattctctgtaatcattgggatagtctaatctttaagtacaatggagacagatctcaaagcagttttatcaactgatacacagccaaaatgttttaattctctagaaacgctggttactagtaatgtccatcacctcccagcaagtcacatcaggtatccccaaaacaggatatgcggcggaggaaggtaggatgggagagaagacaaaaaaaaaggatttctccatttaataatcagggagagtcaaaggcaaaaacgttaacaataataacaaaaacgcctgttactgtggtgtttttctttccacaacatcctacaccagaggtggctacatttcaagaatggtggaaaaggagcagtctccagtttgtgacatcagtttgcaaagcaatttaagggctgtccacaaggttaagggtttgaagaaactgggcattcctgtaccattatgagaagagtgaacaaataccccagtgctctagtgacgtcccttaagcgtaaatacaccctatgggggcctccatgtccagcttcccaaataacacaattgtttggggtacccaaactacagtataaacaggaagctaaagacagcagcaaaaacatattccaagaactgggttggtgagaaagaagggagggtaataagaggagctgacaaagagcctggaaacggagaggggacgcaagcccacgggtggaggatgggaggctcacccccctcagcgccacatcgagagcccacggggccaatctcctccctacctcccagccggaacaaattaatccttcgcacaccaaactgagggccacatgggggagtttgggggagctccaccccatcgccctccctcccccacgccacccccaaaccaggccggatccggatcagaggaggcccgcagtgggtggaaagggaggaggccctctcctccgcaggcaccggccggggtgaagagagagccctacctcaggcaaggcccaggcctcgctcgctcgcgctctttctcgctctcccctctcaggctctagccgcatggcccccccttcctacggctgctccaagccccgccccggccacgctcccaaatcgaggccccggctctggcgcggcccactaggccgcgaacccaaccataaacaaaacctccgggggccgactcgaggtggggggcgccagggctcgcatgactcgggggggggtgtacagtgggggaacacacggtgtgggggggcctaccgagggaggggatacggcgggggcaggggagaaaagagggagggtaaaagggggatcgcggatttaaaggggccgcggacaatacccggccccgccgcgctgccgctgccgccgccgccgccgccaacgccgctgcgctcccaactttacctcagtctcctccacactgacaccccgggccgcgccgcccctgtcacgtgatataagattccctcttccccaccccctccctccttttccctctcgcgctcgctctcgcgccttcccccgcccacttgccttcctgcgtccctcagcgcgtgacgctaaaaggggcgcgcacgcaagcgtgcgcgtgccgcctcgccacgagacacctctttccggctccgcgagtccaccccgcctccttcacggcggccctgcctccaccacgtgacgcacggatggccgccgcttcctcttactgtcgtagttccgcgtctgagcgctcgacgctcctgggtgccattgcctgcctgagtcacgtgtcagggggaagctggaaggcgtcgttctcctttcccagctctcctgcctgtccgccatgttttcaggccgggtctggcttggtcttcccccgtaaggaaatggccggggagctccaggggacccaggcgccgtcgcttcggcggagcctgggctgaccagccaggacagcggggtaaacccgaacaattctgcgcgaggtagggaggccatggcgtccggcagtaactggctctccggggtgaatgtcgtgctggtgatggcctacgggagcctggtgaggagattaccccaccccattcctgctgtcgcatcttacccagtagagaccctccttttgagctgtaccccgtctgcattctccacccactcacctgcgcctatccgggctttgactccttattccaggagtaggtgggagtttaagtcacttagtcgggccgacccgccctcgttagtctagaaccctccctttaacgctagagcacagaccccacgcctccctgctgctggcttcttagatccacccccatcataacggccttgctttgccccaagttttaccctgaaacattcctgagagccggaatctggggatttggaatgaaggcatgcttttttaaaaaaaaaacaaaacaaaactgactttttattaaaggatttttacatctttttggacaggtgtttgtactgctatttatttttgtgaagaggcaaatcatgcgctttgcaatgaaatctcgaaggggacctcatgtccctgtgggacacaatgcccccaaggtaggtccttagggcacaagttaaacatacttctccagatcttttagggtcaagaatgagatttcctctgcctttagtgatgactttaattctcatgtttctttgcgtgcacttgtccttgtacttactaagttgagcaggcactgtgcgctttggaacttggcttacctgctcagtgctgtggcaagcatgtggctcatcctggaacttctgtttttgtatctgcagaatgaagggcttgggtcgaagttcccaactgtttgtagtaaaatatttcccagctcatcttaaactacccagtgttttttgtttgattaggatggggttgagatcattaaggttaacccaagagcaatgagaagggttacctttacataattttagacttaagaggagctccataaatcatctaattccaccattcatgttaccaagaagcccaagaaaaggaggcagtttaccagaagacgtataggaagtgaataacccagtggtcttttatctttgtctgtactttctccttaggtgactgtcttcctttccttggctttagctacagatgaaattttatctctatcctagaactctttcctgagttccttacatatattgccaactgattacctgacatttccacttagatttgtagtagacatctcaaacccaacatttgtgaatcagaattattgctatcccactgccactctcattctgcttctttagtctttcgcttctaagtaaaagacacctgcttcccttaccaacccccttttgtgtggctctccccagatcactgggacccagctccactggctgaattttccaccctttttgctcctgtgatctggaatggtcttcaattggctagctcattcattcttttgatcttagcttaaatgttacttccaaaaaaggaatgcttattacctattttaaagtaggttccccctctctttattttcacatggtaccctgatttttccttca

SEQ ID NO: 2347 - DNA, 4001 bp, Homo sapiens
gggagagaagacaaaaaaaaaggatttctccatttaataatcagggagagtcaaaggcaaaaacgttaacaataataacaaaaacgcctgttactgtggtgtttttctttccacaacatcctacaccagaggtggctacatttcaagaatggtggaaaaggagcagtctccagtttgtgacatcagtttgcaaagcaatttaagggctgtccacaaggttaagggtttgaagaaactgggcattcctgtaccattatgagaagagtgaacaaataccccagtgctctagtgacgtcccttaagcgtaaatacaccctatgggggcctccatgtccagcttcccaaataacacaattgtttggggtacccaaactacagtataaacaggaagctaaagacagcagcaaaaacatattccaagaactgggttggtgagaaagaagggagggtaataagaggagctgacaaagagcctggaaacggagaggggacgcaagcccacgggtggaggatgggaggctcacccccctcagcgccacatcgagagcccacggggccaatctcctccctacctcccagccggaacaaattaatccttcgcacaccaaactgagggccacatgggggagtttgggggagctccaccccatcgccctccctcccccacgccacccccaaaccaggccggatccggatcagaggaggcccgcagtgggtggaaagggaggaggccctctcctccgcaggcaccggccggggtgaagagagagccctacctcaggcaaggcccaggcctcgctcgctcgcgctctttctcgctctcccctctcaggctctagccgcatggcccccccttcctacggctgctccaagccccgccccggccacgctcccaaatcgaggccccggctctggcgcggcccactaggccgcgaacccaaccataaacaaaacctccgggggccgactcgaggtggggggcgccagggctcgcatgactcgggggggggtgtacagtgggggaacacacggtgtgggggggcctaccgagggaggggatacggcgggggcaggggagaaaagagggagggtaaaagggggatcgcggatttaaaggggccgcggacaatacccggccccgccgcgctgccgctgccgccgccgccgccgccaacgccgctgcgctcccaactttacctcagtctcctccacactgacaccccgggccgcgccgcccctgtcacgtgatataagattccctcttccccaccccctccctccttttccctctcgcgctcgctctcgcgccttcccccgcccacttgccttcctgcgtccctcagcgcgtgacgctaaaaggggcgcgcacgcaagcgtgcgcgtgccgcctcgccacgagacacctctttccggctccgcgagtccaccccgcctccttcacggcggccctgcctccaccacgtgacgcacggatggccgccgcttcctcttactgtcgtagttccgcgtctgagcgctcgacgctcctgggtgccattgcctgcctgagtcacgtgtcagggggaagctggaaggcgtcgttctcctttcccagctctcctgcctgtccgccatgttttcaggccgggtctggcttggtcttcccccgtaaggaaatggccggggagctccaggggacccaggcgccgtcgcttcggcggagcctgggctgaccagccaggacagcggggtaaacccgaacaattctgcgcgaggtagggaggccatggcgtccggcagtaactggctctccggggtgaatgtcgtgctggtgatggcctacgggagcctggtgaggagattaccccaccccattcctgctgtcgcatcttacccagtagagaccctccttttgagctgtaccccgtctgcattctccacccactcacctgcgcctatccgggctttgactccttattccaggagtaggtgggagtttaagtcacttagtcgggccgacccgccctcgttagtctagaaccctccctttaacgctagagcacagaccccacgcctccctgctgctggcttcttagatccacccccatcataacggccttgctttgccccaagttttaccctgaaacattcctgagagccggaatctggggatttggaatgaaggcatgcttttttaaaaaaaaaacaaaacaaaactgactttttattaaaggatttttacatctttttggacaggtgtttgtactgctatttatttttgtgaagaggcaaatcatgcgctttgcaatgaaatctcgaaggggacctcatgtccctgtgggacacaatgcccccaaggtaggtccttagggcacaagttaaacatacttctccagatcttttagggtcaagaatgagatttcctctgcctttagtgatgactttaattctcatgtttctttgcgtgcacttgtccttgtacttactaagttgagcaggcactgtgcgctttggaacttggcttacctgctcagtgctgtggcaagcatgtggctcatcctggaacttctgtttttgtatctgcagaatgaagggcttgggtcgaagttcccaactgtttgtagtaaaatatttcccagctcatcttaaactacccagtgttttttgtttgattaggatggggttgagatcattaaggttaacccaagagcaatgagaagggttacctttacataattttagacttaagaggagctccataaatcatctaattccaccattcatgttaccaagaagcccaagaaaaggaggcagtttaccagaagacgtataggaagtgaataacccagtggtcttttatctttgtctgtactttctccttaggtgactgtcttcctttccttggctttagctacagatgaaattttatctctatcctagaactctttcctgagttccttacatatattgccaactgattacctgacatttccacttagatttgtagtagacatctcaaacccaacatttgtgaatcagaattattgctatcccactgccactctcattctgcttctttagtctttcgcttctaagtaaaagacacctgcttcccttaccaacccccttttgtgtggctctccccagatcactgggacccagctccactggctgaattttccaccctttttgctcctgtgatctggaatggtcttcaattggctagctcattcattcttttgatcttagcttaaatgttacttccaaaaaaggaatgcttattacctattttaaagtaggttccccctctctttattttcacatggtaccctgatttttccttcatagcatttaccataatttttatgtttgtccatttgtttaaaacatgcctctctcttccgctagaccgtaagcttcaagaatgcaggcaccatgccagttttgttcacgactataaagccaggacctacacatagtaggtactcagtaatttcttgttgaatgaaaaacaggttagtgccagggcctacacatagcaggtactctgtaatttgttgctgaatgaaaaacaggttagttgtagagctagagctcatgactccctcaactcctagagcactgtactttcattaacaagtgctattaaccttcccctctttgttctttgctgacatagtacatgaaaaggctctaggaggatgtcctggcttgaaaccttaacagtcctgcctgcctcatgagaaagacatagggttagtttctagcacatcatgaaccaatcaatactttggctattcaggggtcccttggtctagttcagagcaatattccttttgcttaaaaattttttctaaattctcaaccattgctagtgaaagtataaattagtaaaaccactttggaaaataactggtcattgtctggtaagattgcacatgtacctaatccatggtccaacagtttctctcctaccatagagaaattaagttttgctcatgtgtaccaagaaacatgtgcaa

SEQ ID NO: 2348 - DNA, 4001 bp, Homo sapiens
tcccagctactcgggtgactgaggcaggagaatcacttgaatccaggaggtggaggctgtggtgggccaagatcaagccattgcactccagcctgggcaacaagagcgaaactccgtctcaaaaaaaaaaaaaaaaaaaaaaaaaaaaaattagccgggtgtggtggtgggcacctgcaatcccagctactctggaggctgaggtgggagaattacttgaactcgggagccggaggctgtagtgaactgagatcatgtcactgcactctagctgggccaacagagaccctgtatcaaaaaaaaaaaattccacaaaggaagcaaactgtgagaacagagtttgaagcatatgtgcctcgggttcccttcaaacatccccacagacaaaggacaccaagcatatcatcctgctgagagaaagagttggcgattttaaaacaaaaaggcacaggaaaaaaaaatgttcacacacagaaactgcattaaagcagcgtgaatcaccgagggcagctgtgcccaggtgctgaggcagtggctgcccagcgtccctcacccgtccctctttgtctggacagctctttcctgcttaggggatgtggcaggaaaccttggcctgacccatcggccaggcgcatggcacacccaggtccaggactgccagggaagtctctgccttctccaccagactgctccggaggctggacggaagcccgggccgatggaaatgggacactcacctgcgactcacacatgcacctgcctgggtcacctgcctgtcactcatccacgcacctacctgcctggctcacctgcctgtcactcaagcactcacctacctgcctggctcacctgcctgtcactcacgcacatccctgccgagagtggaactgctaaggaggtcagcggtgccaggccgtgcagatgacggactgcaagttccgggcacccagacccaaccacgccctaggctcaggtgctagactaagcgagatactcacgatcctttcttcggaagccagattacacagtctggttcccctggagcagggcgcggggccaccgacctgccccagccaagcccgctgtacactcttcgctgcccacctcccaccgggctgaggcccgacctttcagccgcttcctatctgggtctggcaagaggatggcaaccggactagagttaaatacacacgcactaagtggcaggcactgaaaaggacgccaggaggtgacacctggccaggggctgaaaggatgcagggaactggcaggtgtggatggcgaggcccggcgccgcttagagacttgttccgggctcgtgtctcactcgccggccggcggtggtctcccactgtcaccgcccgggtttcccagaaacgctggccctaagcacagtcccgggcacgctcgtttctctcggggtttacggggcagtctggagtctaacagttcaggggcgaggcgacggcgggctcgacggcagccctcccccgacacagactcccgtgatccactgacgaaccaggatcgaggctgcccgtcctggggcagctgcaagtgtcccagctgacgggaaacccggccgagtggtcaagtccccgacatgaccctgacccggagctccgggagcccgccgtaaccgacctcgggttccgcgcaggcaggctcgggccggggccccgcgggcggcgggcgcgaacggagaagcgtcgcgcagggtccccagcagccccgggccgccgctgtggccggctccggcaggggggacgagcgggcccgaggacccggcgcaggcctgcgagcgcgctcacctctccctgtcgctgcgcgtgggccgccgccgcgctcaggctcgccgtagtcgaggccggagcagggtgcggaaaagcggggcccgcgcccgaaacagccgcaccgccccgggattgggcccaccgaacccgccgcagcgccgccgccgccgcctcagcctccaagatggccgctcgcggggcggaaccagcctagcttctgcttccggtgcgcggtccggggcggtgaggagggagggggagggctggccgctctaggcagactggcggaccgcgcccacgactctctgtcgccgtcgaccccggggtgggggatggggcggggggcggggcggcgcttgcgcactggcgggcggctccgggcaccgttagtgggcgcgagagccccagaccccgaagccgcgcgcttccctccccatgtgccacggcccagggcggcaggcccggctgagggcgaccccggtggagaaagaaccccgaccctcccgcctcccggctcccgccttgtcctccgctcccacgccccacccggcccttaggggaggcgcggcgcggcccgggcatggagcgtcccgggcccctggaggctcagtggagggttgggctccagggagctcagagctctctcgttcagggacccgagagtgacacgcgtggcatctctttgcaacccacgtccgcgccgcagcaccctcccctgcaggtgcctgcccagccccgggatgcccctgacctccccttggacagactgcagaaagcgcggggcgctgcgtcctctccacctctctctgaccccagacacattgggagagagcggtaggtggcggggcgctggggtgggacgctgggggcaggcgcgcagcccaccgcctccctgagaggccgctgaggacagcggggagctgagggtggtcccctggtgggggatcaggaggtggacctcgccacctggctgcctgtggccctctcctttgccccaaccctgactgcctctcaggaacaaccacaggtcagcaaggtggctgaatattgagggtcagtcccgctgtggctacgggcagagggcaggctgtgtccatgctcagccctgactctggccctctgggacaccttggtgggtctgagacgttgctgcaggccgtggggcagaagccaggaggagtgtccacgcagcctcagcccgtgggaatccagcctgcctccattactgccgtcaccggctccaccttcggagaacatctcagcatccagcctccttcctctgcctcctctcaggcctctgccgttcccatgcagggcaggccaaactgttttcacagcatggaaagttatgtgagggaagccacaccggccgcagatacaggcaccagcacatccactcgcatgcacactcacggctgtggcccgcggcagatggaggcccgctctgccttgtctgtccctcagtagtgtgcgatgacagcacacctgtgggggccctgcagctgggaagactgcagcgaggctcaactcagaggcccctgctcaggagcatggctgagtcacaccccagggagaaggtgccccggacaggtgtggccagcacgtcttgccaagaccccaccaccccacccacccgcatctgtggccttctggtaagcaggacacaggctgcccaggcctctagccatagagccgatggccttggccagtgggatcggcacaagcagctaggttggtggcagatggtggctgtaaccttctcaaccctgagattgccctctgagggcaggagcagcccttctgctgtgggccagccctccggagggacttcctctggcagcttcaggaataggacaacagggaccaccctcagcatcttgagcagcggggggcaccctctgctttggcaaccaagaaaacatcccccaacccagttaccacctcctgcccccacctcctccagcccccagggttggaccagaaagccttggctgcctctgaacagcagggattgtctggccaggggatgcttgagggacagagaacccagcctggagggtgcaaactgaggaaggtctcagtccctttagaaagtttgttttgccaaggttaaggacacacccatgacatctcgggaggtgcccaaggtgcatgtggcacagctcgcttttatacattttagggagacatgatttatttacacgggtt

SEQ ID NO: 2349 - DNA, 4001 bp, Homo sapiens
cctgagccacggtgccaaatgcagcctgaccagactccctctctgcccaaaccaagggggctagtttaggccaagtctcctttatagccatggggagtctggctgaggaccccctaaatttaacttcctgccagggacaaacgcagtaaatggcctctggcaacagaaagagcagctggataggggcaaacctacccttaaggaattagaagcttaattcaggaacaaaattaactcgaggttcccacacaagccagggaaaccttatccacctctactgggtatcttagcattgccatgactctaatcctcaatgctggaggaaaaataattatcaaagatgcccaagtcttcacttaactaagccactcctagtccttcaattttaactttctagcaggaaaaaagaaaggaaatgaaaagagaaatgggacatatgagttttggtggggcaccaatcaatccaaactgaggctttacctcaccaaatcttaacttggtttgattgagaaaacggacagaaaacaccagtaagttgaattcaggcccccaagtagcagagaattcacaactctgcctttccccaggctactccgattaggtctgcctgcctggataaagtactgtctgctagcatttcagctactgctccggtagagagaataccatcacagcaggtaacatcaaccaatataagtgctatagcatgcagtaccagacattcccaaattagcagaagccaattctctgttcaagggatgtctgagggtagaccaggcaggagacatgtaaggtgtatgcctaggatggaatgacgctcacaggggagaaatgcaactgttactgcttagaataaatgggggtagccctcgcacatcacatcactatcattaccaggaaaagcaacaacccagggcaaatggacatatccatagggaacaggcaggggagtggcagaactgctaccagctgaggcaaaaagaggagagttagaggttacaccagaaaaagaatccaaaggagagaaggaagaggagtcaatgaattgcaaactatcacttggtgaagttgagagagcaagagggtctgcatgagggatgcctaggcggggatcccacaggtggcaacctcctaagtcagaggtactactgagaagggggcatcgctgaaatgtgcagtgagtttcaggccaggtctttgcagttagggtcagtgccgaggcctaaaaccttgaaataagagtaaggggaagaaagacgcattcctaggtggcaaggtaaagttgtggaggagtagccaaaaagagccaaaatcatgaaccttgggatgtgggtgggttcgtggaaacgggtagtctaggcgccatatgtcggggtgtcccttgctattggggtcaatggtagagattctgggtgcactgcataacctcaagcagcagaaacaaatgtaacctggagagaaagaactgagccctgagaggggcttcggcctcccaggtccttcgagagcaaaaagctggatggagtgatcctgggtccctgacaaggggcccccacagaggcgcacgcgagggggtcctcaccgtgatgttgcagtggatgcggacaggatccccaggcaccgacccccgtggggggagatgcggtccgggcgcggcccccgccccggcccctccggccccagccagcaggaactcgcagctcagctcgtccaggcaggcgctggcaatgcggaagcgctcgtggccgcggtggaagatggactcgagcagcttcagctctcgcctcaggcagggccccggccccgggcccccccctgggccgcccccggcccccggcgccgccccctggccccccagctgctgccccggccccggctgctgctgcccctgcggctgcggctgctgcatcctccgctccgctccgctccggggccggcgggccgggagcctccggcctgcgctccgggctccgccgccgccgccgccgccgccgccgccgccgcggtccgcacttcctgatccccccttcgccaagatggcgccgccgccacctccgggacaggcccccccctccgctcgctggcccccccagccgccggaagccgcgcgcccctcctcctcctcctcctcctaggcggccccgcctccgtccccctcacgtgacttccctgctctggcctcctccacgtgatctctccgtctttcccgcccccctgttctcgcctgccaccctccacatgtgacccggggcctggggcttgcctctgtgggcgcctcagtgcgagtttgcgtatgtcgtgcgtgcttgcgcgcgacgccccttcgcctgcgctcccctctcacgtgactcggtgccgcgtgctcccaggggctacccgcgcaggacgctgtttcctgccccgggcgccgcttcccccgcccccgagccgtggcgagcgtgcccggcactccatggacagagaagaaagaagtgctgtcttccccgtgcagtctttatcctgctcccacatgctggtcttcggcgcaggatcctggagcctctgctccccgtgggggtgggcatgctgtgtcttcacactcgggtgggtggtcggggtaggagccgggaaccggaatggaagaggcgtggattctcgtcccagccctggctctcatggcgttttgtgaccttgggttaaccactttcccgccgagtctcagtttcctcatctgtacaatggctctcatgagaatgatgcctgtttttcctattcccagggagggattcgatgcgaggacaccataaaatgaggaatgataatagatcactgctgtgttatgtacaagtgttagttaatatcaggcctttcgcgcttttcagaccccatgggtctggacgaggttgggggaaggacagcatgggcttcctccacagagtcatggaaggagtgctgactcgggtggtccccattccctttcctaggcctaaatggctaacaccttgtcgcagtggtcttggcagctgccaggagtaggtagtgcctccggaccctcgctaggtggcactatcacaaaggacaaagctggttgaagctacagaaatcccgagctggcgttcgttttgccaagggcaagtgttattagcctgtggtaaggcctagtcaattctgctgggccaactcagcccttaaaccactggtcagattgccccgtttctctcccacttgtactaaaatgagctagcctttgctggaagactattcaattgcctctgcagaggcctcctttggtcaagttggggtatgggtatttaaagacgattatagtctgttcctggtcttcgtggggccatttatctggtttaggtagcctgaacagtttgctacatgttgactttgtgtctgtgtgtgcaagctgatagcataaaaggctgtggtgggaattcctgttaattatttcctgagcgaaggtgttttgcaaatatatatatatatatatatatatatatatttatttatttatttatttatttatttattttaagacagggtcttgctctctcgccctggagtgcaggggcacaatctcagctcactgcagcctcgggagacctcaagctatcctcccacctcagcctcccaagtagctgggattacaggcgcatgctaccacagctgggtaattttcgtattttttttgtagaaaggggtcttggtatgttgcccagactggtctcaaactcctgggctcaagtgatctgcccatctcggcctcccaaggtgctgggattgcaggtgtgagccactgtgcccaggtgcaaatatttgtaaatctcccaacaacattgcaaggtaagtatttttacccctgtttacaactggggaaaaggagtgactctgtaaggatatacagtctgtaaacagagttcctaggcctgtctccaaagtccatgcccttgtaccctactctgccttttttagtgtgttgaaccccagctctgccaactactaatgatgtgact

SEQ ID NO: 2350 - DNA, 4001 bp, Homo sapiens
tgggaggctgaggcaggtggatcacttgagatcgggagttccagaccagcctggccaacatggggaaatcccctctctactaaaaatataaaaattagccagctgcgggggtggaggcctgtaatcccagctactcaggaggctgaggcaggagaaaggcttgaactcagaaggtggaggttacagtgggctgagatcgcgccactgtactccagcctgggcgacagagcaagactctgtctcaaaaacaaaacaaaacaaaactggccaggcatggtggctcacacctgtaatcccagcactttggtaggccaaggtgggtgggtcatttgaggtcaggagtttgagaccagcctggccaacatgaggaaaccccatctctattaaaaatacaaaaattagcaaagtgtggtggtgcacgcctgtaatcccagctacttggaaggctgaggcaggagaatggcttcaaccaggaaggcggaggttgcagtgagccaagatcgcgccactgcactccagcctgggtggcagagcgagaccctttcttaaaaaaaaaaaaaagaaaaaaagaaccagcctgtgcaacaaaggatatccccatctcttaaatataaagtatatgggaggacatgcataggttatatgcaaatactacaccattttatatctgggacttgacctttggtggatttgggatctgcaggatgtcctggaaccatccctcatggatacagagggttgactgtacagtaaaagtatcacaagtataaagtatacctttatataaaatgagaacagtggaaagccatggtaaaaggattagaacaagcaagacaatttctcccaaggaagcaaccagactccagcctcactatgttaaccaaaattggcatatgccattctttggctcaaatgccatgaataactgcctatttttcagggtataaaggttctttacaatctaacccttatatcccgccttatatccagtatctactctccacaaactcatgcttcagccacactgcactattcctgctgcccataaaagttttattctttcacacctttagatattaaaggttacatattaaatcacaactccttctccagtaatgcctccccaccactcacacctttccaacgtcaccctctgtgcgtctacatctatttgcatcgtgttctaattcacctgacagtttcttctccttaggaggaattccttgacagcaggtccctagtctttttttgtatcaagtctgcagtaaatttggataattaatgaacgaaacgtgggtttggaccagatgttgaagaagacaaaagaacaggccgggcgcggtggctcacgcctgtaatcccagcactttgggaggccgaggcgggcggatcacgaggtcaggagatcgagaccatcccggctaaaacggtgaaaccccgtctctactgaaaatacaaaaaattagccgggcgtagtggcgggcgcctgtagtcccagctacttgggaggctgaggcaggagaatggcgtgaacccgggaggcggagcttgcagtgagccgagatcccgccactgcactccagcctgggcgacagagcgagactccgtctcaaaaaaaaaaaaaaaaaaaaaaaaaaaaagaacagccagtgcacaacccgcagcaagtactgggctgttatgtcccttctagtggcaaatttctccctgctgtggcaggaggacggctcgggggagctctgaccacgatttcatgcaaagatacggtgagaccctccgctcaacagtggcttttctaaggctctcctttcagaggagacgaaaactcccatattaggcggaaacaggactccttccccccaagactcagtgaccttctccagtgtaccttctttcagatggggaaccggaatactctccttgcttacctgagctgacacccctcacaacgcagcaacgcgcggaccaacggggtaccagcgcctgcgcgacctctgactgttggcgtggctccgccccctgtctggggaagattgtgattggcccacagtaatccaccgggaaagaagcgcagccaccgctcctctctattggccagtgctctgaacgctcacgcattcaaatgagagcgcgcgctgggcgcagccattcagcttcctacaccctgcggctgaaccctgagacgtcatccggcagtccaaattcggttacaaagtcggctctgccagaccaaggaaggagctggaaatcgtttcttagcaagaacaatgaaagaaaccagaaatatttaatctggaaaagagaatacgtgatagctgtcttcctttattttttttcacatgggagattttactacttcagaggacacgtttattcagaggacacatttaaggacaacggatgaaagtctaagagatgcagaacttagttcaataaagcattctatcaattagaactctgaagaacaaagtaggtagggtagtgaattccttcatcactggaaatgttcaagtggaagttaggtcatcacttgttagggatagtgcagaaaggatccttgcactgggtggcagtttggaatagatgactttttttttttttttttttttttgagacggagtctcgctctgtcacccaggctggagtgcaatggtgcaatctcggctcactgcaacctctgcctcccgggttcaagcagttctcctgcctcagcctcccgaatagctgggattacaggcaagcgccaccacgcccagctaatttttgtatttttagtagagacggggtttcaccgtgttggccaggctggtcttgaactcctgacctcaggtgatccatccttctcagcctcccaaagtgctgggattacaggcgtgagccactgtgcccagctggaatagatgacttttaaaccatcttccaacgctagatgcatggtactttctgaacaaggaagaacctgtttatagttaagccaaccttaacttctcagagctgcctctgccagaggccaatgcttcatgagcgctgaaagatggcacagacctgacttaatctaaagcacatggctggaacttgactagcctttggaaatgctgtgggtggaaaaacaaaacaagcaaaaagccaaccctcatctgactgctctcagctcactgtgtagctttggaacaacgatggtaatactaatagtaatttattattattactattatttattactattatactatttattactattattggtaacagagtaataatcagtctctttctaaacttgtaaatcagtataattttggccactgcagtgatgtctacatctagtcaaaactggtgttaagtggcaaatggttccccatagccattgtgtggggtgttttctctcaagggcaccacatgttcactaggactctgtgatgctcccctggggttcctcaccttagttgtaggaataaaccaactacagtagtttattaattattataaagttgtgaaacaaacataaggaatcccattcttgtccagtctaattccagtttgctgttgggggtttgcatttattgttagcatttactcagcatttagtgaagtgttttctgtcataattgagttcctgcttattttactactgatgttttgttttagtcctttcaatacctgtctttattttcttcctgccccaattgtaattgtatctcaattacagttctgtcttcagaactgaaattgattacttccttgggtggttctctgagaaataggtcttaaaaatgtctcttaaaaaagcaagaactgtattgagtccggtggaaaagagagatggtttgataaaataagtaaatccctataattttggcaacagagaggaaagaaaaaaggatagaagacaaaagaggaaggaagaaaaggaggtagagagggaggaagaaaacaaagagaaagaaaaaaaagaaccccatacactaaatgtacagtttccatttgtccaccagaggggg

SEQ ID NO: 2351 - DNA, 4001 bp, Homo sapiens
tgcgaccttatcctacataaaaagaggatgggctaataatggtataaagacttttttaaaaaatagattggttttgaaaatacaaaccctgccaaactgaattctgtagaccttcaatttcaacttcccattccatcatatcttcacttacaggcttagcagtgatacccttgaagttaaaaacaaaattaaatcagaaaaaacttattaagtatttattgaagttttgaaaatcatataccaggtcacactgaattctaaaaactctaaattttctttccttgataagtttatttatttgctgctctggggaagtgttacatgtcttatttcacggaagttaatatagatcccagaaaacatatgcaatagtaattaaaaataaatcataagtgtggaaatcacaagtgggactagagagtcaagattagaatgtgtggcttatatactgtttgtgtaaatcaataaccaatttaatattcaaattttaaaagaaagaaatagttggaaagtgcatgtttcttcaaaacattttagagctatatgaatgctatatgaaaggcatgaagtgggaacattttcattaagaaaaaatccaaaattacacttgtatataaaagcaaagttttcctatacttgaggagttgttccaatggagggacaagaatgtatttcatagaaaaccttatgaattacgttaagtaacacacttacaaacacataaaaacacttctgagcatccacatagttattaagtatgttagtgcttgtctgggtgagccctgtctctctattatctatatttacatattccttcattggattctctttcaacagagaactacagagctcaggatgagcagaaacaatatcaaatgttaggtccatgccccaggaatgttcgctgttggactccataattgttcctaacatctccagtgaatgcagtacttttatagcagaggtaaaaaatgaacaatgccactgaactacacctgaagcaactgtgggaagcactctatacctttcatggacagctttctttctgttctttctcttaagcactccctcttcgccccctcttccatttttcattttccgtaaatcagcctgtggcagccatggacattgataacctcattggtggcgtttaagcccaaggacattgcttcttttgtgttaaaactataaagggaaggcatttatgtgtcatgctggtaaaagtacactagacagtaagcagtggaacacaggaattaagaactagggctttgaagtccaaaaaccctgtaatggaatcatggggcaaaatctttacagaatatttctgaggcttaggtttttggtaagtaaaatgaaatactacttattgtatagtattataattaatgagcataagcctgcacctactagtcactaactacatgacagaccctgatattcagtgcctagatccacataaattactctgcataatatgttcaatattgttaagcattattattttgaagtaataataattgttattaatatgaaacacattacttcagtgaaatggatttattaaataacaatactgtagtggcaaatcaggtttaactaaattactacttatagaataaaatgggttaaactgcctcttaaaaattattgcacaatgaaacacatctctccacgtgcccagtacttaccttataattgttctccttgagatcacagaagtctctgtgcagcaagaggtaagctctgccgtgcatgataggcagcggagggtctgacacttgtccccaaatgcctcaggtttactctgaggcagatgtttgaagttatgggtcactttcccacacttagtaaactgatataagttacttgctttctagaacctcagaacggtaccaagataagcggcttctaaagttgggatataacaatgactttttctcctgactcctctaaacgagaacttcccgaaggaagacttgggcacttcctcatctgcggcgtttcactgcagtgccggctcacagcccagtctcaagacaaacttggatgagtaacggagacaagcccatgtcgtcggcgcgtgagtgggagtgagaggtgtacgcctatcagggtcctagcaggttgtcttcgcttcacaggtgcaaccccgcagccacgcaccggaggaagcaaatcggttgccaaccaacaggcccccgtggggccgccgagagacggaggcagggggttggccgctctcacccaatcagcgacagggggcaggcctcttgctatctccacagccaatcctacaacagtttcccctttgaaaggccaatgagattcgtggtcaaggcaacaccacgccttctcaggccacgaacatggactgtacaaaactagtgtagaggatggggtgaggtcccaggacccagcatgtaagtcacagaagccgtcccacgaagtctttcttcgaaattatccttcctttttctttgactatcaaaagatatagtaagtgactggtaggtacaggtctgcataacaatatcttaacttacatggcgagttaccattcacagtagtgtgcatgctattatgtcatcaaaccctacaatcaccctgggaaagtgctccaggaacagggaactgcttaaaatttctctgattcccatctcttcccgcacagtttcgcacctgctgttccttctacctaggagtttaccacattccttccaccccttcagccctcatttccccttcactcactcatccttcagattttaacgactctttaagggatcctttcttttgtgatcccacaggaccttctatttgcctcctagttaacatttgccatacggcatcacaattgtctattgtcttcaccagagtgggaactactgaaagacacggttccattgccagcgccaactacaaagcctggcatctttgttcagaatactttctttttttactttttacttactaattttatagaatccggatgttcatttagtccattcattttacaaatatttattaaatactttttttttacttgaaagattcaaatgaagtaaatgtctttatggctccaatatacaataaacaagtatgcaaaacaaaaatcatgatttcagatggtgataaacgttatgtggacaataataaaacagtaccatgatagagattggggtaggtcattaaggattagaaatggtagtcaggaaatgcctctgtaaggaatggggttttgaactcatacatgaaagatgagaaggagcctgctacatgaaatattgagggcagagagttctaggaagaggaaaacaagatatttttgagtcaggaaagagcttgtcttgaaaagggaacaagggaaggtcagggaggttgtggaggagcctgggaggggtgtgataaagatgggcactatacagtaggaagtttgggctttatttgaatagctatgggaatccatttaatgggtttaaacaggagagtgtcatgctctgatttatttatttatttatttatttatttatttattttattgatcattcttgggtgtttctcgcagagggggatttggcagggtcataggacaatagtggagggaaggtcagcagataaacaagtgaacaaaggtctctggttttcctaggcagaggaccctgtggccttccgcagtgtttgtgtccctgggtacttaagattagggagtggtgatgactcttaacgagcatgctgccttcaagcatctgtttaacaaagcacatcttgcaccgcccttaatccatttaaccctgagtggacacagcacatgtttcagagagcacagggttgggggtaaggtcacagatcaacaggatcccaaggcaaaagaatttttcttagtacagaacaaaatgaaaagtctcccatgtctacttctatccacacagacccggcaaccatccgatttctcaattttttccccacccttcccgcctttctattccacaaaaccgcca

SEQ ID NO: 2352 - DNA, 4001 bp, Homo sapiens
aaataaagcgattctaaggagatttcctaccgaatgaaagaaactgtgtaatattctcttcacttaagattacatttctgctgtattcgaaaaaaacaaagtaacgccgaatgggcagtcctgattttccaaaccaagtatccaagtatcacaatcaacaaaatcatttgcttcctttcctacctgacccttaacacaccactgcgtgtcctatcccaggagaatttcagtccctaagtaaacacactaagtactctgtagctaaaactggagcatggaagtcttgtagtacaatcaacttgatggatgactgctttcctaatactgtagggaagtttacatgatgaaccagtgaagaaatgtggaggtaggctaaagagggtatggccagtaggggtcctgaaagggaagctcctaatttgcaaaaaggaagagaaaaggcagtagaatcataggaaattccttgtaccctaattgccactgctttttggttgtttttttttttacaacaacctaatttattaaacaatctttaaaacatcaagaagtagatctgtataactcctttaagaaatgagaacaggagagagtttagaaagtcatttgcttccacttgcttcccgttcagtctctgctacagcaaaacacaagtttgaaagattcaagaagtaggaaaagatagaatgtaacagaagaatgccagaagtcattagtggtctattaagtaccagaatataactggaattctctaaactgtggagaagatacatattttgttaaatatcaaagaatctgtctgtaaaccacccctcaagcaaaaatatatgtttaatcaagcttatacagtgcaataaccacacatatctggaatttcaaatgctttctttaaaaatattcacccaccatacattctcattccatccaaaattgttctttaaattcctgaagacacagacacacacacactttaacttcatgtaaatctcgcccttcttgttcgcataccctgaagaaaagaataaacacctcaagatgctctctcctcttgttcataccctaaaagaacactcggaaagaagcaaatggagttcagaatgaagaaagaaggcaacagaataaaggagaacaaaaccagagaccctatcggggagtcacgttattcttggaaaatatcatctccgttccttctccaagcccaaaggccagacagcactggcgcaataccatccctgtccaaagcgctaacgagttgccaactaatccctcaaggtgtcccccaacctcctcacctcatcagcgctcagctcctccatcgctttcctcttaatggtgaaaggcgttaaggagagatccttctgttctcgagaccacggcgggaggaaggagagtggaaggtgtctatcaggctgtctggtcccccgaatgggggaggtttcagaattgcatagtcagaggttaaaaaataagaacacgagaggcactaaactgccttggcttcggtcactccagtcgccccacagactactacagccgcttgttccctgagcagcctcctttggccgccactgctgctgctacagggttgtcttaaggcgccacttattaccctctgcttcccaggttacccagctaggcagcgcggtctccagttcgtctcgtgccccgagcctgctgtttcttcgtgatagtggcgcggtagctgcgttcctacagcagatcctgctctccttcctaccctttgctcctggcgggaactggtcgactgcagagtggataccccgaggtaaggcgaccccacagccgtcctggcagagcccagcactgtaagggaagcccctcccctcccaaagcaggccggccacgccccgcctccacgccggagcccgggtaggggggagggggaggatgggatgcgcgtagctctcgctggaagagtaaatcctcctacccctccacccctactctttccccctcgccccaccaagtattattcatcaaaacaacagggcggccatctttgaaagggatcacgtgacccccgtcagggaggcggggcttctggcgccgggacgtggcagccaataggccgcgggcgccgcgccgccgagttcctctcgcctgcgtcctctccccgcctccgtcccaccccgtcccgcgcagccgcgccggacgtggggaggggcaaagggaggctggcggctgggcggggcgttgccacggcgaccgcgctggggctgcgggcgcggcgggcctgagccaggtaggctggcaaggggagggacgactcccagactcgcgtcggggaagatccaccagaaggtggcgctggcccgcggcccgggggcccgccgcgcctccgttgttcccaatcgcctgcttttctgtgacttgggggcctagaaacacctcatcgctcccactggactgtgcgcgcccgccgcctaagcgagggaaaagaaaacggaaaacgtctccttgaccccgggagcgtgatctaccgtattgagcgctcattttctgaaacatctgccacacactcttccacctcctccaggaaagcccagttggaagaaaactcgaacacaagaactcccattcattttattttaccttggccttttagagatacttcctgggtttttttttttttaagtgtgttcaaaaagtattggtaaaatttgaaagtataaatggatgagagacccaaatcactgaattgtacacagcaaatgcaaggaagacgtttggagtcagtgggggaaaaccatcctccggtgcacaagaatacaaatatttggccgggcgcggtggctcacgcctgtaatcccagcactttgggaggccgaggcgggcggatcacgaggtcaggagatcgagaccatcctggctaacacggtgaaaccccgtctctactaaaaaatacaaaaaatcagccagatgtggcggcgggcgcctgtagtcccggctactcgggaggctgaggcaggagaatggcgtgaacccgggaggcggagcttgcagtgagccgagatcgcgccactgcactccagcctgggcgacagagcgcgactccatctcaaaaaatatatatatatgtatgtatatatatatttataaaatataaatctaagttgagcgatcaaagtaacagtaccatgaaattccagattttgccgctgacgaagactataagtggattggatggctcactaagccataaagactgcattccagaattaagagttacaatgtatttgctacatgcttaaaataggaacctgactactagatatgtaaggaatttgtgagtaaaaatatgtaaggaatttgtgagtaaaaataaatcactgctggctttgcatattatctgctctccaggaaaggaattctgtgtaagccagaacttgaacccctggtgacattgatgttaaaagtttactttttttaacctcattattgccatctaatttacataccatacaattcacccaattaaggtgtacagtggttttattatgttcacagttcagtcatcctcactgtccaatttcagaacattttcatcatcccaaaaagaaaccctcaaagccattaacagtcactcccgggctgggcgcagtggctcacgcctgtaatcccagccctttgggaggccaaggcgggtggatcaagaggtccggagtttaagaccagcctggccaagatggtgaaatacaaaatacaaaaattagaagggcgtggtggcgggcacctgtaatcccagctacttgggagtctgaggcaaagaattgcttgaacccgggaggcagaagttgcaaggagccgagatcgtgccactgcactccagcctgggcaacagagcgagactccgtcacaaaaaaaaaagactcctgcaggataactaccttctgtcttggtgaatttgcctattctggacatttcacatcagtggagcaatacaccgtgtggcctttggggtttggcttccttcacttagcata

SEQ ID NO: 2353 - DNA, 4001 bp, Homo sapiens
ttctgtctcttttcatgataatacgtaagtttcacaagggcagggatctgtgactgctgtgttcacacagaacagtgcctggcacataataggtgctcaataaatagggcttacccacctgcccatcactaccttaatcagcctcttgcaagaagtcacctagcaaactagctagaagtaattatctatatcattttgaactcttcagatttaattctaatatttgaaactgtggcattataaagtatgagtgattaaaaaaaaaaatgagacagaaaaaatgtccatataggccgggcatggtggctcacgcctgtaatcccagcactttgggagggcaagacaggcaggtcatgaggtcaggagttcaagaccagcctggccaacatggtgaaaccttgtctctactaaaaatacaaaaattagccaggcgtggtggcacatgcctgtagtcccagctactcggggagctgaggcagaagaatcgcttgaagccgggagacagaggttgcagtaagccgagatggtgccactgcacccttgcctgggcaacagagcgagactctgtctcaaaaaaaataaaaaaaattaaaaaatgtcctgacagggcgcggtggctcacgcctgtaatcttagaactttgggaggctgaggcgggtggatcacgaggtcaggaaatcgagaccatcctggccaacatggtgacaccccgtctctaataaaaatacaaaaatcagccaggcgtggtggcgtgcacctgtagtcccagctactcgggaggctgaggcaggagaatcgcttgaacacgggaggcagaggctgcagtgggccgagatcgcaccactgcactccagcctgggcgacagagcgagactccgtctcaaaaatgaatacataaaaaataaataaaaataaatgtccatataaaattttcagtcatgccctacgtccgtaagtcaaaccaggatcttctcaaatcactgtttcaaaaaattcacatcacccacaattatagacttcaattaaagcggcttaaattagaaagccacctttgacatccctataactcctttacaaagcagcggtttccagtggacgcgactaagacctgcagcacacaggacaggccaaatcttacctcctgtgtagagaaaggagccagacaggcctccaaagtagataagagccaagtgctccagtttcagaggggacaggtagtagaggcaagcggcacagacgcagcccaacgtgtagaggaagactccgaaccggacgacatcctgcggctccaagattcggtccacaagtgtcctgtcatcactctttttgtggtcaatgcccttggaaaagtcatagtaagtgttgaccaaattaccggccccgtgcacagccaggacagccacggcacaacccaccaagagcctgggatccaggacaccgtgggatctgtaggcaagggcactgcccagggccaccggtgtgagtgaggcactgaagctccagggcctcagggccaacacgtaggaggcacacttctgcctccaggagcgctgggggagcctatcttgctcgggacagtcgttccccagcgggtccctgtccccagctttgacagtctctcccgacaggatgttaatcttctcccccaggacctgagaggccgccatggaagctccacgtggttgaagtaaactctaaaagtgagccacgcacagtgaccgcccgggaaggaggaaggacggggcggggcagcagggcccgaccttccttcggttccgccccaggacagggctggtgtggcggcaaggtccgggggcaacagcaagtgggtcttacaccccacgaggccaagcggcgccgcccctactacccgtcacctgggcgaagtctgtctccggcccccagccccgcgttagagcccacggctgagccgcggccgccttctttaggccgccagagccgccatcttgtgcgccggcctctggaggcccgcccggaaacaggtgccggcggcgcgggctggaccggagggtgggctggagggcgggagggggcggggccgagccagaggcggggagaagggcggtgaggggtggggggcgggggcctggtcagaggcggggcgggcagggccgagtcagaggaggggcggggtcagaggcggggagaagggcggtgaggggtggggcggggctgaggggcggggccagaccggtggtggggcgggagggggcggggccggggcgggaatggaccgggagcggggacgggccaggagctggggccgggcggtgacccggcatccagcccttttcctgcctgcactgcgccccgcagctacttccagactaactgcaatcagcctctcttagcatcataagaactcgaaggcgtgttgctttaggacttaccgggcgcactttcattcacgaagtaggattcattaatttattcatgctacaagcatttattgagcgcctgctgtgtgcatacattctgacgtctatcatatctgcaccgtggaaatactctatgatgtgctactgctcacctcttatcagcttttcattcagtgacatccttcagcagcttgaaatctgcccatggtgggagaatttacaccacgcaaatcagcaaatgcttaataactgctaagtcgtctagacttaagaaagtggcggagaaaatgttcatattactggttaaacttaaaagtgttggagggtgcggtggctcacgcctgtaatcccagcactttggaaggccgaggcaggcggatcacttgatgtcaggagttcgacatcagcctggccaacatagcgaaaccctgtctctactaaaaatacaaaaattagccgtgcgtggtggcaggcacctgtaatcccagctactcgggaggctggggcaggagaattgcttgaacccgggagatggaggttgcagtgagccaagatcatgccaatgggctccagcctgggcaacagagtgagactccatctcaaaaaaaaaaaaaaaattagccgggggtggtggtgcattcctgtaatcacagctactcgggaggctgaggcaggagaattgcttgaaccctggaggcagaggctgcagtgagccaagatcacgccactgcactccagcctgggcagtagagcgagactccgtctcaaaaaagaaaaaaaagagagaaaaaaagtgtgtaagtgaatgcaccaaaactttgaggaaatattcgttcagcattggcaaattattatccagttgaacaaataagtcgcttgtagccttgacaaactagtgaagttctgacatatctcttttgattgtttcactttcctcttactcctaacataaaatatcaaccaacattcatgtctgaactatgctcattgatcaattgggaccatagggaagctacacaacatcaaagaaagcatactgtgagaactggctatatggagtttacaatagagtcctgtactgtatattttagtatttgtaaactgtatgctacacatcatttacatcagtgaaattataatacacatgcaacatagatgcacacaggactgactacataatttgtggtacccagtgcaaactaaagaggtggagctgggggtgataatgtgtgcctgtagtcccagctactcaggaggtttttttgagacggagtcttgctctgttgcccaggctggggtgcagtgacacaatctcggctcactgcaagctccgcctccagggttcacaccattctcctgcctcagcctcccgagtagctgtgactacaggcgcccgccaccacgcccggctaattattttgtatttttagtagagacaaggttttaccgtgtcagccaggatggtctctatctcctgacctcgtgatccgcctgcctcagcctcccaaagtactgggattacaggtgtgagccaccgcacccggcgggaggatctcttgagctcaggttagagaccagcctgggcaacaaagtgagatctcc

SEQ ID NO: 2354 - DNA, 4001 bp, Homo sapiens
agtctttgcctctaaccgtcaccaacactcatggggtaagtagatgctgttataaggatgcccatgcaacaggtgggaaacctgagcatcagacaggaaaagcaggttacccatggccacacagctggactcggactggaagagaggatgaggggccctgcaggccaaggacaggatgcttcctagggaagggggccctgcttgttcaagacattctcctccaccccttccctccatccccatcactcaggactgaaacttttgcaataacagcatttcaggggcttcagcagtgaatgggggaccacagctccccactccctcccactcacacacagagtgtggggactcctcagcctctgcaagggccactctctcactcaaagaacagagtaaagggcctggctttcctcgtagtctgcaggggactggcccctctatgctgaacccagggccccgtgaggccccgtgcattcagtcacacacactagactctagtttcatgtcaccactttacttttcacatgtatagcagctctctgcatctaggctgcgtgctctgtgagggcaaggatcctcattgacagataccatttttccttccagggagccttgggcagcgctgggcaggtaatgtgagctgtgatacctactgactgatcagtctgggagggtggggcatggctctgttcacgctggccacagggagtgtatgactttgctgaactttttttctgcctgaggctcagtttcctgctattcttggtctgtgtctgtctccctgagggctccagggctggcacccggtacgtgccctcctcccactctcacctctgctgtgcctgtcccttaagctggaagcacaagcaggagaacagcaggggcagcctcacccagaaggcaaggggcagctacctgacattcctctcctcttggctgctggggagcctaggggagatgtcacggtctgaggatggaggaaaatgaactcacattgtctttctgtcccgaaggagaaagagggtctgcctagaaccatggagaccctgggccagggctgctttcagcctggggagctgctgggtatgtgtgggcaaagctgccagcacaggaggggactgtggcctttggggctgccctccggtgatcagaacccttctaggggaagcatggtgatgagggttggttcactctgcatttcagagggaggacctcaggcccaagaggggacagggatccaaaaaccctccagctgcttggaaggttcaaaaaggggtgtggacgcatccacatcagcaggaagtagtaggaaaagtcaccagggaacacgtaaggatgaggccgggagaattttagcatgcaaatgggtaggatggcccgtttactgatcagctgctgcctcctccttctcctccatgtcacaggagctctgaggccgtgccttcgcctcaagctccctctctccagctggctccacgtgaggctcctctgccaggaggtactgggccagctgctccaggtgctccaggcttatcttctgcaggcgctcctcgtgctcctgccttagcagctgcagcacggccttggcatcctgtggttcaaagtgtttagctaggaccagtcccagctggtgccacaggggctgggtctgcggctggtgggcctcctttagcgccatcttctccaagggctgcatgatgacattgatagaggcattgggcccaatgcagtagtcagagaggtgcttgtcatcctccaggagctggccacggaaaagcaggtgctgctgctcctcaggcaccttcagccgcctggacaccagtctcttcagcgtggctacactctcttgccctgacaccttcagactgcatctctggcccaggagcagcttgactgtgaggaacatcgggctgagtggaatcaggagggatccatgctctgggagctgccctgaagattagggggtcctgcgggagatgttggcttctccctatcaacaaagggctagtagtcccaggagaccagggacccagcttaggcaggcagccattggctagtgcacggtgatgtcacaatgctgcgggggggctcatttccagagtggaacttttgggacagcaaaggggtatttgggcccagagcatccttcctccacgagaggagaaaaagagcactaggaaagaaaatgtgggactgggggaaatgagagtgagactagggaaagggagggagggaaaggacagggtggtgggaggagcatgtctattgatttcttcaacacatgtgtattaggtgccacctctgtgccagcacctggacctggggagacagtcatattcagatggatgacttctgccttcatgacactttcacactagtgagctggctagcatttatcaagcgtcctctttctgtcaagcactttacacgctcttttggattgggctttccagcagcagacactgagacagggatttgagaacaagtactcaattaggaggtgatcccaggaggcaccaggaggggagtgaggatgtgagatgaggacgggagggaaatcaaaacgtgcattcatgagcaggttgccattgtgggcaactagtatgttatcctgctggggagttctgggaggttgcatggaacacacctgagttgcaccaggtgtggtttttttgtttttttttttgttttttgagacagggtctcactctgttgcccaggctggagtgcagtggcatgatctcggctcactgcaacctccgtttcctgggttcaagtaattctcctgtgtcagcctcccaagtaactggggctacagctgcacgccaccatgcctggctaatttttgtatttttagtagagatgggtttctccatgctgcccaggctgatctcaaactcccagacacaagcaatctgcctgctttggcctcccaaagtgctgaggttacaggcgtgagccaccgcacctggccgaacctgcatctttatgctctgactcctgtctttggctaatagaagtgctacctccttggcacttctggtccacaggtgttaagcagcatgctcctgtgaccacagaaaagtaggaagccatcgggccctcaggaatgtgagtgctgaggggatggggcaggacagcccacagcatctgcatcacaggcctgcctaattgaatcctctcaacctatgaggcaggcactgccatgatctccatctgccagaggagaaagtggaggcttggctgatcctacagcaagcaggcagaattgctcttgtcttcactgttacctcatgttgcctcctaaacaaatctctgctcagtgccttttgtggcccaggccctgagcaggcacccccggctcaaaggtgaatatgaaaaaggacactgattgggcctcctctgtgtctgcaacttctgcagcatttggcagttttcagtgcaacacattgctgaaggccttctgggtcaagccctttatatatgttgtcacaatttagcctgggaggaaagtattgtctcattttagaactgagcaactttggagaagacctgaataacgtctcgcagccagtgggctgattttgtcagggatcccctcaactctcaccagctctgtgctcgactgtgcccttcttctcactcaccttctccctccctcccacctaacctcctttccttttccacctgcctggaagctacagtggcatgatgctgttgtcaacatccttggactttcctgaactgcccttccacagcacccagccctgaactccgcccaaaggtggctgcaagctctgtccctgtctttggaagctggcagccaagagcagctggtgaagatacccatggggccgggcgcggtggctcatgcctgtaatcctagcactttgggaggctgaggcgggcagatcgtgaggtcaggagttcaagatcagcctgaccaacatggtaaaaccccgtctctactaaaaatacaaaaattagccgggcgtggtggc

SEQ ID NO: 2355 - DNA, 4001 bp, Homo sapiens
cagatggacagtgagcccgtccttgattccgtgctggttcagtgtgtccccatccttgaggatcttgcctgcgaagatcaggaccagctgatcctgctgagccttaaacctccgggagatttcctctttgaactgtgatcaagaggcagaggtcactgtggaggctgcctggactccccctaccagggaccctgactctttttcaacaccttctgcactctcttgctctcatctctagtcatgggaagtcctttctgtagtctcgacgccattcctccagctgcaataagcatctcctttcttaacaaaggagatgaaccagtgagaggctcttctctcagctccatcccagagtctcccaccctagaaagcccctgctgctatctgcctcccagcttcagtccctccacctagttctctgtaaggcagagcagcctcccatcccaactccttcaacagctttggaccttcagccttctgagacccaattttctctcctctctattcccagtattctcttaacaactacaacaaatagatgccagttattgagcactacctattcaccagttaaagatatagtatattgttattttcattttattattatttttatcttgagatggagtctcgctctgtagcccaggctggagtgcagaggtgcgatcttggctcactgtaacctccatcttccgggttcaagtgattctcctgcttcagcctcccgagtgtctgggactacaggcacacaccaccatgcctggctaattgtatttttagtagagacggggtttcaccatgttggccaggctggtcttgaactcgtgacctcaggtgatccaccagactcagactcccaaagtgctgggattacaggtgtgagccaccacgcccagccgtatctccattttaaagatgagaaaactgaggatcagcgaggtaaggtaacttgccccaggcagaccagaactcaggtcttgacaccaaagtccaggctcttaactaaacacactgcctctcaatgagagccgttttcaaattcagctttgtagggaacatacagtatttaaattctgaaatttagtaattctatgtggttagggagggagcaaggatggagttagacttcccaaattctaccagcccctccaaaacacaacacaaaacaaaacacaacacacactttaagtaaaaacagtgcacttgttaagcagaggctgcttccagatccctctcttccaaccagatggcctatcttaagccccgcctatgtgaaattatggagcggccacagggggtggcgaacacaggcaacagtccgtcattcaacaagattttattgagcacctactgcacaccgtgtaaatctcagaagagctgagaaccaaatgtaaccacgtcgatttgaaagagtgggaaggatctgggcacagggaaatcctcccccgacagccccgtcgctcagagaacactgggcgttctctgaggcacagagtaggcgccggcgctctccgcctgcccccggcccgttctctcagttagcacctagcccgggcccccactccggcacactcccctcaaacccagggtccttcccccttcccggtgcaaggtgtcccctcctcactctccaccacgcccccaggccacaaggcaaaacccgcccctcaacacgcgccacgctcccccagatctcccctcgcagggcgccccctacccgcctctccttgccttcagctcctcggagtcccagccggcccccgccctcctctccggggccctccgggacgccggaccgtcagagaggccccccatctcttcgcagacccctcctccgcgctccccccgccccccgcctgctgtactacctccttgaccgaggctcgatcgcagatcacaatttcctccttgtccttgggggtcttgacggtgacccgaatggggggcctcgtctcggccccgctcggctccgccatgccgccgccgccacccggccgcccgccagcccgcccggctcctcctcctccccgcccgcccggccggcccggctcggcttctgcgcctccaacactcccctctctccacctctcccctcccctcccctcccctcctctctcctcccctcccctccccgaggcttcaccgccccctccggaccagccgcagccacagcgccccgggcggaccgggggggccactgcagcggggtccgcccagggccaagccccaggtccggagcccggccagggtctcgccaggcgggggcccctggggggcctctgggagggggaaggggcgtgcccttcattgcgggggcgagggcggactgccccgggagaccgcgacccaacgctgcccgcccgagccgtgccgcggtcccctccagcccaaagcctccccgccccctccgcggctaactcggctccgggacaaaggactttctgtgtcgccgctttatctccgttccctgtgataacttggtctttcttggaagcccaagtcccttccaggccaggggactttcccgacttggaggttgggttttcccaccaagcacgtccacctaggttctcagctctgggactgaccctatagccccgagggtcgcggcctgaatggtctattaagaacggttccagggagctgggttttggctgcgtggcctttcagagccttggtttcctcaagataataataatagtacctctcgcctcatcgcacagaattgtgcataacggagaaaactgttttgaaagtaaccaaaggcgtgcctgacaaatatgaggatgtagtataattattgaatcgtggactgccaagcggacacgttgattcctttctccccgaaggggttaaatgtccttccagcgctgctgctgtcctttcactcccgttcttttccgccccccaacaaccgcgtggtcggcttggaaaggcgaactataattcccagggtgcctcgcgaggccacaaagaactacgattcccagagccccccgcggtggggcggggttgagtcggaaccacaatagccaggcgaagaaactacaactcccagggcgtcccggagcaggccaacgggactacgggaagcagcgggcagcggcccgcgggaggcacctcggagatctgggtgcaaaagcccagggttaggaaccgtaggcatgctgcgccccaaggctttgacccaggtgctaagccaagccaacactggaggcgtccagagcaccctgtgagtgcagaccacggacccgagcggcgagcgctgcagtggggcggcgcgcggctccctgagggaggggtggggaaggatcaccaggaagggaggaagcggcagagggggcagcggctggggataccggccgggaggtcccctgtcgaaaagggaagccggtgtgctgggtgcttagggcatgttccgggacacgctcaggccagagccttgctggatgtgcccttggtgggacttgggatggaaacccagacgttttactccccgctctgagcacatcgctatccctccccgcccctcaccaggctgctgaataacgagggatcactgctggcctactctggttacggggacactgacgcccgggtcaccgctgccatagccagtaacatctgggccgcctacgaccggaacgggaaccaagcgtttaatgaagacaatctcaaattcatcctcatggactgcatggtatggagaggggagccagacttcccctgtcccccaaaggggatcccaagggggcgacctggaccccatcctggatggttggaggggcagggacaggatctccggaagattactaagagttggtctgcagcagcatttgtaataggcaggaccctattcatcaagtggtggtgaggaaggatccctggacctgagaggtctgacttgggttctggtctcagccatccacttatcagttgtggaaccttgggtaagtcgcttaacctctctcagcttccttacctcatgtttaaggagaaga

SEQ ID NO: 2356 - DNA, 4001 bp, Homo sapiens
gtcaggatatggagaccattctggctaacatggtgaaacctcatctctacttaaaatacaaaaagttagctgggcgtggtggcaggcacctgtagtcccagctacttgggaggctgaggcaggagaatggtgtgaacctgggaggtggagcttgcagtgagctgagatggcgccactgcattccagcctgggtgacagagcaagaatccatctcaaaaaaaaaaaaaaaaaaaaaaagagatcttgccttccaataaatgcgttaccaaagacccatcagtttggacttattttctaagccataaagagagatcttattaatgtctacaaatacaactcttgattatttgtacaaacagagggtatggcaaagaccactaccacatacatggcaaaattcaaacctagtgatgtatttggttggagggtgttccttaagtattacagctttaaaggtggccccagaatacaggatttatggaagggtgtcaacaaattattaatattttataacctatccagctcatgtccagaaaaacataaaagcaaatgctctaaaaagactggaacgttactgattctacgtaacatgagtatgagtcaggaaaaatactgccaatccaaatgtttaaaacaaaaagcagccacgtaatttgaaagtagtatatttgaaacctgtttacatcttcagaacattcctggcctgatgattagatagcaaaatccgtctgtaaagctgactgtgaagttaccaaactcaaccattattttattataatttgttaaaaactctgcatccaaaggattacaagtctacaacaagaaaaagcacaaaaacaatttgtcaaaccgtgggcctcctttgagtaacaaatagcaatttttaacctctggatagcagctagatatacccttgtcatcgtgaagctaaaatgacccagttaacaattgcagggagttgctgaaatgaggtatggctagaaaaatgaaagtcagtctggctttaaaagcaaaagtctaccattaaactaatgaaagactgctctgagcacagtatgtcaggaaaaggcaggcactctgagatcaccatctttgtacctacataactgtcactagctaagaatcgctgtgcaaaaagacaaaaacacacaaaaggaaaccaacagatagtaccgtttgtaaaagaatgtgatgatattttaatgcgagggggatgggaggcagcaagagaacacacacaccacacatcctctgggaaaatgatctctcagacacacactgaaatgtttttaatcaaagaccgatacagtaggaatgcacaaggagtgcaacgtaaaaagaggtcatcaatgtagctagtggcttcagtcacagaaatagcacgtgcccccactgattacagcaccgcggggagaccgttattaaattataccgtacggctccgctccggcccaggctaggaggatgagtgcgggcgagaaatgcaaactcatctgtgacttgacccaaggggcagccccgtgaacattcccttaagagggcgaatgcatctcactctcaaccatgtccggccacgccctcccgcagggaggccgctaaagttttgctcgagaggggaaactgaggtagaggtgatttacatgcgttggcggagggaaacccaggcaagccagtctccccgggcccgggaccccgaagccgtggctgtggcggggatcctcaagggggcagggggcggcccggaaagcgggtccagacgatccggctcgaaatcccctccccccacaacagcgtcgcccgccagagccgccgcccggtacctctcgatgactgaggccaccagctgcggcaactccttcatctcgaaggcggagtaggacgcggacagcaggggccgcacagccacctcccagcccggggtcgtgtccgcccccgttgccggggtccccggcgccggagccgctgccgccgcctcttcgccgccgctcgtcgccatcttccgtcgtactactgcggctccctccgggggcttgccaccggcccagcgccgcctcccaggagggggcggaagtgacgcaatctgtcgcgtcagactgcgcgccgccgtcatgggtcaaaaacgcgacgcgcggagcggcctttgctctcaccggggtcgagccgcggcgagggaacggatcggagacgctgcgcctgctcagaaggtagcgcagcggggaaaggcgggagagcgttaacttctgagcctgcgcggtgggagttgctcaagcaggtggtagcgacttggcttccgggcagcgggtaaaggtgagtctggggcatgggttcagtgggcaagtctagggcagcagagttgactacgcctcggcgtatagaatggccctggcctgggacagctaaggacgacaagaggaggccgaagcctaaaacgctttcacctgcttcttcccctgcctagatccccccaatagtaatactaaagagcgccatagtttacaaagatttctccctctcacaacaccttttaatcactgatccgtattcccttagcactcaaatctcttctgtttggattgccctcattaacaatctgaccagctcgtacaatgcatccctctttgcaatttgccacgtatgcttacgtgttccccttttttctactggcaaggaaagaatgtaagcttttattcacaggagatgtctgagacttttgccggtaaaatgatctggctacaaggtctaagagggaaaagcagtttgctcgaggaaaggtattcgtgcattaaggacagtcctgtgagtgagatattggtggacggcttcaagctctagcctgtggcctacagctggcctaaataagactgggaaggaactgtgaagacggtttcaaattcctaaagccctgaaattctccccctaagtttaggaagagcttttgttcttggtgtgtaacactgataaatgaattggtacctagtgattaatctgcacttttattaagatatgacctactttaccttttttgagacaggatcttgctctgtcgcccaatagcccaggctggagtgcagtggcagagttgcagctggctgcagcctccacctccctggctcaagtgatcttccagcctcagcctccccagtagctgagactatacaggtgcaggccaccactcttaattttttttgtttgtttttaagagacaggtctccctacgtagcccaagctgttttcgaagtcctaggttcctcccaccttggactcccaaagtgctgggattacaggcttgacccactgcgcccagcctgcatctttacattcgaaataaaattcagtcaagtcaaagccggtcttggaggaaaatgtggctttgatgacagcagtagggattttccttcagtgcctacttaccagaggataataataacagcaagtttcttaaacataaaaacatcagaaatgaaaaagaactttccataacactataaatattgcagtatttcaagatactgaaccagagccctaaggaaaggctggagacccagaattttataatggctttgggacatgaattttattttaaccagaggacaaaattaatctgcaaaagctgtcttggagaaatttcaggaaataaaagatcaaatgtatctgctgtcctcccttccctctccaggagaataaaaggcaaatgcaaactatcacagggagattttcacctttacctaaattatttattatatactttatatttctggttaatagattgggagagagcactccagataaagaacttcctttataaatgccacatttatttcagtactggaggtttggtcttgtgttgccacaaagatttggaatggcatctatgttataaatttagatgacaaaagagactaataaaagacttctagatgaaacacaagcttctaatattctggtccaggaaataagatagaaactaaaaaacaataaataacttttatgaattaactgaa

SEQ ID NO: 2357 - DNA, 4001 bp, Homo sapiens
gaaggtcataactgtccaactgttctgccaaagataagctccacaggcaaacccacgcccctctcggcccaccctccccacttgtggaatggctattaatttgccacagcttctacagaattatcacaggcttggcttccaacacccacacatgcctcaggaaggtttaactgtcagtgagtttggtaacttagaaacctcttccttaacaactttgatgaggagagtcatgtgttctcacaggctctctgtgggattatttttaacagtaaaacttgagtatgtgcatgcactttctataccttttggttccatataattatccatgttcagggggtgtcatattcaagacaccctggtcataagataacatgactgtgagctatctcagagaaaaacctcaattatgactaattcctaggagcccactcatggttatttagagactaacacctccttcaggtaaaaccattatatccaacctgctttcataacccactgcctcctcccgagcacagggaccatctgttacacggagggaacaccagctctccccagcacccatcacacagggatgggcggtgggggaaacaggtgtttggggatctgggccaactgtgcctttatattcacacctcaggtcctgaactctgcccaccaccctcagtccaggattgaggcagcagccatgattctccctgctcagttcacttcaccacctctaggcctggcagccactcaaccacaaaccgatttgacaagatctaggcgtaggcatctatcaagctgccaagctgaataggcgagtggcctgtttacttaaacacaatagctgcaccccagcggcctgctaggagtcaggaagcaaacactgccaactgtttccaagaagttgccagaagggcaggtgcccattccttaagattcaccaccaaatcaactggaaagaaggaaatgtggataggagaagctaaagcagggctcctgctttctaagggtgcccaccacccaccacagggtcagaccaccctatttcactcacaacccaaatctaagcctacagtatatgcagtaaaatataaccacctacataccatctgctggtatataccaagatacatacatttgaattggtcttttaaaactgtatcagttaatcctatccgttgccatcccgccccccccaacccacacccccaccaggctttcaggataaaaatgctctgaagaaccaacaggagatggtggttggcctgagaatgaaaaaactctggtaccattcccagttctaccccaaactagggattagaatacactgtcctatgcagagtgccacactgaaccacaagccaccaagtgatcaaatgtttggatagagaactggggatgattccagcgtcagaagggcagggaggtggtggggataactcaattaagtccaagttccagcgccctagaaggcaacaggcttaagaggcagaggagggatctgggggaggggcgagaaagagcgtttagaaagcgagaattgacttcagagaaagagcacaggactgggggaggggccctctggttctcgtctctgccctgccggagactgggacatccttttctctccctgggtctgtgtccccgtcgctacatcccagcctggagggcatggcccagcggttgcataggtccctcggtttctgcagagcccgggagtcaccctattttggtaaaggtgagctctggccaggcttgctttgcctcgggagcagacttttctccaggctcctcgcctgtctcccggggtttgcgtcccccgggctgggtctggggaggccctcccgggtgatgtgctggggtctcggggactggcctcccccggccccttccaggcctggcggaggccaagggcaggccgcgggatcgggcagccgctctcacctagccgttccgctccatccgccgcctgcgcccgggctctgtcctgctggtaaacaaccctggtctcccgggcaacgccgcagggtggggggccacgtgcttccggcgtgaccggaaccggcctgggtcgggtggggtcgggtggggtcgggtgggggccgctgggccaggagggcggaggccgtgaactccaggtcggtggattgcgagcctggagtggattgcctggcctggaggcgacagggacccgcggcctccttctctcctcctcttcctagcgtcaccgcctctgtttctctctgggggagagtgtctgggagagggagagccctggccggggcatggaggagcggggagcagcaccactagtctcaaaatccgtttctcaccttgggtcaggccctgaccctctcagtgtccctggttttaaaatgaggctgtgggactgatggattctcggaaccctaaactctgagtggatgcttctagggtatctgagttgcggggagcagggcccccatcctcagtacagccctttcagcgccagttccctgacctcttttcacatcagcctcccactccggggccacactgggaaccttatcaacagcatctgcacctcctttgatgtccccagccacaatctcttccacttccagccacttgagtcacttccgctgtatctgtttttcaccatctttgggtttcctgtccattgctgtctccgctttccccctcgatatcaatctgcttcttccctatcctggcccattacctcggcattctcaaaaggatcctccctgcccgagtcctactctccttccatctgatgaaacctgaagccaaaccagtccacctacacacgggtattgaagaagtcttggccagccacacaccttggtgtaacagaaacacgaggtctctaacctcagttagactctcagccctgcacttccatccccaaccgaccactgggttctctctccctcctttcttctttttcttccttttttaaggggagacagggtctcgccccttcacccaggctggagtgcagtggtgcaatcacagctcactgcagcctggacctccccagctcagcctcccttgtagctgggactacaggcgtgcaccaccatgcttggctaatttttattattttttgtagaatggggttctgccatgttgctgagggtggtcttgaagtcttgggctcaagtgatcctcccgcctcagcctcccaaagtgctgagattacagacatgagccacctcgcccagcctctcctttcttctcaatggctatttcaaaacgttgttttgcttgcgaaacctcccacctctccctctcccacctccctccctcctccctcttagaagatacctttactgccctcttcagagagaaaatagaagccatcatatggaaacttcctcagccttctgccatcagacctgcaaacttgcctgcctacacttccttgctttcctccctccctccagttctaatgtcttctgattctctccaaggtgaattgctcctccatgggtcgtgaaagaagatcatgtcagtggtggtgtttctgctcgtctcagaagggaagtctgtgacccgtgggagttgctggggagggcctggtctgggccaggcctcttctttgggttgccccctcacacactctggtcatccaggaagcctctgtggccctcggaatgtgtaaaagatggtggttttaggagctgctggttttgcaactgagtgctgacggcttatttcttgttaatgattctgtcaaaagtgtcttagcgatgctcttcagcccttcatcacccacccaaaaaagattaaagtggattcttcatcagctattttaaaatcacctaagaattatacaatcctttggagaatcaaattggcttctcaccgtgtgtgtgtgtgtgtgtgtgtgtgtgtgtgcgtgtgcgcacgcacgcgcgcctttgccagtgcacagtgaaatggcggtctgtttaatgtcagcagtacatgcagttaacgtcagcagtacctgccttttgctctccagtgtt

SEQ ID NO: 2358 - DNA, 4001 bp, Homo sapiens
attgcgccattgcactccagcctgggtgacagagcaagactccatctcaaaaaaaaattcataattccttgatataggtgacctggtccctgcttatgtctcctgacctcatctcccatcttgccgcctcccacacttgagccacctcaacttctagcaatgcctcaaatgcatgtgtatcccccctgcctcaacctcaatccccccactcccagaacggtctccccactcctacctgcacccttcccttggccagctaactcttttttttccccttcagtttgtttttcacttatattttagctttttatttgaaaattattatagattcacaggaaattaggaaaatagtacagaaagatcctttgtatccttcacccagctcccctcaatactttttttgttttgttttttgagatggagtctcgctctgtcgcccaggctggagagcaatggcgcaatctcggctcactgcaacctccgcctcccaggttcaagcaattctcctgcctcagcctcccaaagtgctaggattaccggcgtgagccaccccacctggcccatctctataattttcttacttcaaaaaagttacacaaatggaattatacagtatgcaacctttttcataaaacagctttgagatataattcacatatttcaccttcttacagtgtaattttctttttagtatattcacagagctgtactaccatcacaattttagaacattttcgtcagcctaaacaaaccctgtaccctttggcagtcacccccaatttaccctccagcccccaccccttttccaaggcagccttaggcaaccacaaatctactttctgttctatagacttgcccacactgcacatttcatataaatggaatatatactaaaatatactaaaaattgaaatttacactttaaaggagtgaagtatgtaatacgtgaattatatctcaataaagctgtcatgggaaaaaaaaacaaaactcctaaaccaaatccaacattttcgtcaaactcacttcctcccacttcccccttcttaatgggaccccatcacccaaccacattttttctctccttccttccctcttacgccatcttgcctcttacatcaaaccctgcaggctaaactctctcacatatagctgcccctttccatggccaccgtcggccgtcctagtgggactctcactgcccattctgggggctgtcacatggctcccaactgacttccctacttccagtgtcactccagtccagtccgacacattgtctccaggttaatcttctcccagattacaagggcccctgaaggcaaaggctgcatttccctgtccgtttggggggactcctgagggcaggggcatatctctttctccttcagattagggagccctgaggacagtcgcctaactccttcactttggggcttccaagggcaggactgtgactacccctcaggccaaaaggtccttaaggcagagttgtcacccacttcagacctggctctgagagcaaatctctgcaccatgcctctacatctttggaaccaaactcagtgctgtgcttgactcacaacattcttcttcacacctcctcggcctctccgtcatccccagagcccagagctctggcggggacacggtccggcccgctgccaggactccctaatgcccccaggacgcgctcagggagcgacgtctatcacgatctaacccagccctggaggccgtgtcgcctccttccgcctccacgcgtagtcatggtaagcagggtcttgaacctctcctgtgggagccgcggagctcgcaggccctcggggctcgggctccagcctgcgtggggactccaggggcagaaaggtcttaagccagactcaccacgcagggccgctagccgtcccgcagcgccgccatcttgttgtcacgcggtttcctaggcgaccaggacccgtgcacttctcattggctagtttgagggaggcctgagcaacctgcagacagcgaaggtggatacagtcgcctgtgctcggattctattggcccacagagtcggtattcttcgcgggcgaatcccagaatgcaccgctctgagagggctccaggtccggggcggggtggggggggggggtggttcgttcctaccctcaggtgcgggaggaaggagcctgggattaggttaatgaaactgctggcagcctcacattcaggacctgaatgtgtgatcccgacagtgccgctattttgctaaattgatcttgggaggaattatccctcttagcttatttccccatatgatcagtattgtaacacgaagtactgtaatacttcacggaggctgctttgaggatggattgcaatgatgcaagtacttaataaatgtttcctaaatctgagtttctgtgacaaatccttgaccagattggcgcccggaagggcggcccaaattctagttcccttgtgttaagagttgggtaagacaatttcccctcccagagcctcatctgtaaaattgtgttggattagactcagtcaccaaaacagctaaaggcagttaagaccacgaactttggaattaggagtcctggctccttactgtgtgttcttgggcactttatacaccttagtttttatatctgtaaaacagtgataatacctacccccactgggttgccgtgaggattaaataaggtaatgcaaagtacacgattttaaaggggaaagccgaaacagaaacacctgtagagagcactttttcaaaaacgtttcctgctgttaatcatcatcatcatctcttcaccctttcagctgtgatggtctgggagtttatgatttctgatctcaggcactcacttctttgtgcccaggttcaaaagccctttctctgcacaacccaagagtgtttttctgttgcttttttttttttttttttttaattttccgtttgactttctagcctaccacattcagggaagggtaggctctgctcactgcaacatccgcctcccaggctcaagctatcctcccatcacagccaccagtgtagctgggactacaggtgtgcacaacaacgcccagctagtttttgtattttcttgtagagacggggtcttgccatgttgcccagcctggtctcaaactcctgagctcaagccatccgcccatctctgcctcccaaagtggacagcattctttatatgcaaattggaagctaaagagagctactactactgagtgccaagtaccagatggtaacatgaaatttacagatgagggccgggcgtggtggttcacgcctgtaatcccagcattttgggaggctgaggcaggcggatcatctgaagtcgggagttcgagaccagcctgaccaacatggagaaaccccgtctctactaaaaatacaaaatcagccgggcatgatggcgcatgcctgtaatcccagctactcaggaaggctgaggcaggagaatcgcttgaacctgggaggcggaggttgcggtgagctgagatcgcaccattgcactccagcctgggcaacaagagtgaaactctgtcaaaaaaaaaaaaaagaaaagaaaagaaaaaagaaaaaaacagatgagaaaacaagctcagggtagtacagcggcttgcataagattataaaggcaggaagcagaagtggattcaaacccagaacggtcagcctcaagagtccacgctcttcctagaaactttcactctggtaaacaaggcaggcatagataagccaaggaagaaggtggtacagacctactgccaagggaggagtctgggcggaaagtgtgactggagagtggacataggaagagctctcttgttgctgagctgctcccagaaagttttctgaggttttaggtatatgaagatgagaaagactgagatcatgtcggggccaagtgttttttgaggttggacccatggtcagggtgagtagcaacttcatactgtcaccttgctcatggagataagcaagc

SEQ ID NO: 2359 - DNA, 4001 bp, Homo sapiens
cctctgtttttttctttggactcagcctcagccagatctcccctgggcttgcaacacaaggcccaaaacaatagaagagaagtgaggggagttttccctttactacctagcatgtaaatgaggcctaaagtagactaaggaagggagagtgtgaagggagagtgggccagagctggggttgtggtgaccaactcctggggcctggggggagtttgtgtaggggagggggagggagtggcagggaatcaagacttaatggatgaattctagggcagccccagaggttacatacatggctgtggcttcagacagacctggattcaaggtcaaatgagactggctccaccatttacgaccttagcaagtcacttaacatctaagcctcagttttttcaccagtcaaatggggataaacataacacctgctgcagggcaccacagagggtatcaagtgagggaatgcataaagcatggagcactatccaggcagctgtgggattcctctcatccccccacccctccctgggccctcacagccactctctcaccccagtccccttccactgtagcttagtcacccacttgtcccttccctcgctcccctcccattcatcctcagctaatacaaacaacccatctgcttgctactttctctaccaaaatcacaaaattctaggtcttggctgggcgcggtggctcatgcctgtaatcccagcactttgggaggccgaggcaggcggatcacttgagatcaggcattcgagactagcctagccaacatggtgaaacccagtctccgctaaaaaaaaaaaaaaaatacaaaaaattagccaggcatggtggcacacacctgtagtcccagctatgcgggaggccaaggcaggataattgcttgaacccaggaggtggaggttgcagtaagccgagatcatgccagtgcacagagcaaaactctgtttaaaaaaaaaaacaaaaaaaccaacaacaacaaaacaaaacactaggttttaacaaacttcagaaataatctatttcagtcttcccagttccttgaaatgaggaactgaggcctagagagggaaagcccaactgaaaccaggcttcccgattcctcacctccagcaccttcacagaaatccaccaacccttccacaatctaaacatttcccaagctttcattcagaacctgcagcccatctacaaccttcccttgaaacataaatctatcccagcccttctccttcagctcctataccctgccccaatcttctttaaacaacaaactcatttacggaatatctgctatgttctggctctttttaaattggttattattacatgtaatccggcagttcttttgttaaagggtcagagaggtagagtttctggcccagggtctcagagctggtcagtgattaaaccaggattcagcctgcaggatgcatgattccaggccttgggccctacttactcccaccgttgcctctggattgacctctctcctatcttgtacgatctagcctgctcccccagccagggccttagaacctagagcctggtattatccacccccagatctgcagaaaggaagccacacccctcctccaccttgtaagccctccttcctctccctacctcaccccgcctcctctgcctcctggttcaaaagcagctaaaccaaaagaagcctccagacagccctgagatcacctaaaaagctgctaccaagacagccacgaagatcctaccaaaatgaagcgcttcctcttcctcctactcaccatcagcctcctggttatggtacaggtaagagcaacgcctggcaccactgccaggactccccaaagttgcttggcatggagggagggcatacaggatgtgagctcccagagacccagccttctctcctgagagcacagcagatggactccaacaggaaaactggggacacagcgggcctggccgcccagccttccagctcttctggctggggctgcactgcttgcgggctgccctgagagaaacctgtatccacagctggggagcacttacagggtgctaggcgcgttggggcacccaaggggtgttgtggaataatagagaactaagagacttgggaagacaaccctgagtgaggaaggcatcggcccacagggagtctggggagatggtcctttggggagaggccaggagatgtccaagtggagcctgctgtggttatggaggtgacaggggacactctaacccccactcccctgccagagagaagcctggatgttcaggaatgcaaagaagacaggactctcccatttcagaaacaactggagtctcaaaagcgactgctattccaggaggcagctttggtagcatcccaggtgcccagaggggagtcagtacagcagaccggagccatcaagttcttgatcaagaacagcttgatcaccatcaaaaccagcttaatctccatcaagaacagttctagttgcagctccatcaagcattaaggacagctcgatcaccatctggccacttccccaccccacatccagccacccacgctttgccaagtgctttctcactcagccctggctcatgtgaccttcacaactgtgatgaacttctccccactcagaagatgaaactgaggctcagggaagctaagccctttgccaggctaggaaggtcaagggccagggctcccctgtctccctctatgccagaagggctggtcgctggggaaaggtgaaaagaaaggttctgtgaccgggcacggtggctcacgcctataatcccagcactttgggaggccgaggcaggcggatcacctgaggtcaggagttcaagaccagcctggccaacatgacaaaatcccgtctctactaaaaatacaaaaattagctgggcgagccgggcgcgctggctcgcgtctgtaatcccagcactttgggaggctgaggcgggtggatcatgaggtcaggagatcgagaccatcctggctaacacattgaaacctcgtctctaccataaatacaaaaagaaattagccgggcgtggcgtggtggcgggcgcctgtagtcccagctactcgggaggctgaggcaggagaatggcgtgaacctgggggtgaagcttgcagtgagccgagatcacgccactgcactccagcctgggcgggcgacagagcaagactctgtctcggaaaaaaaaaaaaaattagctgggcgtgatagcggctgcctataatcccagctactcgggaggttgaggggtggaggttgcagtgacccgagatcatgccacttcactccagcctgggcaaaagagcgaaactctatctcaaaaaaacagaaagtttctgtgaaagggggtggacaggggcagtgatcacctctgtccctgcctgtgtcaaagcaggaagcagtcaaacatcctgacaggaccttgtggaagaagtagtggtcacatggggcagaactgaggactgttttatggaggtgggcggatggagggcggggagggtagaaaggggactgcatctttaaataacaaacacgctattcaaaagtcccctgagggctgggtacgatggctcacacctgtaatcccagtactttgggaggccgaggcgggtggatcaccaggtcaggagttcgagaccagcctgaccaacatggtgaaaccccgtctctactaaaaatagaaaaattagccgggcgtggtggcacgtgcctatagtcccagctactcaggaggctgaggcaggagaatcacttgaacccgggaggtggaggatgcagtgagccgagatcgcatcactgcagtccagcctgggtgacagagtgagactccacctctaaaaaaaaaaaaaaaagtcccctgatcttatcccacttctcctcctacagatacaaactggactctcaggacaaaacgacaccagccaaaccagcagcccctcagcatccagcaacataagcggaggcattttccttttcttcgtg

SEQ ID NO: 2360 - DNA, 4001 bp, Homo sapiens
gagcagacattaccacatgcaactgttgatttaaatatagcaaacttattgaatctaactcctccttcctaacccactagtttagccaatcatctcggactccaaccattttaagagatgtctagcttctctcactttattccaacctgccctgcacacttaaaagcacaataaaccttaattatgaaaataatgtcatttcagcattaaaatatatttgataggtaaatccccagtcactacagggcaattcaaactatacaacatggcatacaatctgtcctcagtttatcttttcagtttcagatccaaataaatattcctccagtctgctatattatgttctagtcactttgctagctgttggctaacccatatactttaacatcactactgtttatgcttttccttctggctgtgctcctccatgacctgtgtacttttaacattttgtatatactctaacatagcaattaacacaccatattatagtttgactgtcaattattcgaaacagcagttatggtttattcacatgaaaatttcccaatccttgggtgggcgcgtggctcacgcctgtaatcccaacactttgggaggccgaggcgggtggatcacgaggtcaggagctgagaccagcctggccagcatggtgaaaccctgtctctactaaaaaaaaaaaaattagccgggcatggtggcgcgtgcctgtaatcccagctactcgggaggctgaagtaggagattcgcttgaccccgagagatggaggttgcagtgggccaagatcgcgccactgcactccagcctgggcgacagagcgagactctgtctcaaacaaaaaaaagaaaatttcccaatccttaccactgtgcctgagatatagaagatgaacaacatatgcttgataaatgacattccaaatattaagctgtgtacaacaggcaatatctacatcaacgtttaattgttaatcccgcgtaaaagttttaacatcgtagagtcaataacacttgggaaatagataaaaacgtactgtccaaagaagagactaagaacaagataaatagggaaggataaaaagtaaaatgtgttgattatttaggacgaaaggcactaaatacagccagagagaaactgtgaggaaagcatgtggcctctagtctagaacactagctcaagaaaactcacttcaccggaagccagaaatgagcagagagcggaaccagtgaagtggcctttcaggcccacgcagtcagcgtgtgtggacgtcccgaagagctattcacacattcaaggcgttctgctttgaataaccagaatctcgagttcctgggcggcttgagccgcagacacctcacccttgagaaggcgcaccctagggtggcttctgcaggactaatggcctgagcaatgcacttgacctcaccagcccgggataaggtgcgcgccgcagagaaggggcagtgcaaagggcaatacgtgcttaagagcttggggagcgagggccctcaagtcaattacaggatttgggtgccaggtcctgaggatgcagcaggcacaagactgacacgatccttgccctcgtggtgtggctctacaaattactgtggaaacgcgactgtctcgagctgaggagagggcagaacatctacatttcccccacccggactccaggttcctgaagtcacctctccagacgcggggcggcggtggccgcagggaaccactccatgcccagcttgggcctcctcccgtgaccccaggcccaggacggtccccttggttctcaccgaatcctttaatgagctcggtgaagaccccggggtcgctttccatgaggcaccactccccggcattgcccgtcatggccctggccacacaccgccccgatccacctctcgctctcagctgccccccgcaccagctgccgccggccacagatctcagcaaacccgccgccgagctcgtcaaccacacgtcaccccgcctacttcccgacagcctccgggcgccgtcacctgcagcgcgactgagcgcgggaggacgctctagccaccctagagacatcgaaactcttcccaggccttgcagcacccgtagcggattcggaagggctggggcctgagaagaaagggcggtgattcacagcgccgaggaggcaacatccgggatcctcgcccctctggggcggaggcggggcaaaagaagaggggcaggactcgttcccgggaaccgaacctggaatccccggcggcagtggggctgttgctgttgctgtggctgtcgctgcccgtcaggctgccttcttttgtcgtttcccagcgctgcgcaggacttctcctggcggcgctgcggatccagggggtcggctgccaggtacaggtgaggacattgcgggaggccggctgggagccttttgtgcggccccagggacgcgcaaattctgaccagtcctccatgtctctcacccgcatcccaggggttgaggctgggcaaacgccgcgaaactatcgctcttccccgtcccgcttccgcgcctgtccaccctgggtaacggaaccagcatcgcggtagggacatcctcgctaggcccggccggaccattcctcagggtgggccctttccgaagccgggaccgctcctgcttgtcggcatcgctccccacaggccgacgtcgagagggcctgctttactcctcctctttctcctccttctcccgcggcttctgcgcggagaggcgtcgcccgggatctgggttttggaagaaggatctttgtgggaagacagggtgaatttatcacagaggaataacgagggagaggagaaaggtttgtccatggggctgctagactagtggaaggggatgcggtgcgtcaagggaaaattaggttgaaaacaaatgtcgtgtattaatctaaaaacatttggaatggttctaaaactggatgatgagttaaaccaaatatttactaaatatttactaaattgccctcattcagcaggctcttatagaatactatagtgttaagattaaagtttttaagagtatattgaagtcgttaagtgtatatttactccttaaaagctacatattccaagaaagacctttggcttccagaaaaaaaaaatgttttagtgggtaaaactctgactccttccttctcaaataggtgacttgtgccctggagttagggagccttgtgctacagattatgtgaagccatgaaataaacgtggtaaattttattgagggaagcaacagagcagcttttgtattaaaaggagcctgagtacgctatggggtagaagccaaaatttgtatgaagtgttggtttaaaaaaaattttttttgtaactttcttgaagtttatctccggaaactctgccctcaacttggagactaggaggattctgtacagtatatttccttgagatactttattggaaaagtttaagaggcacagagtccagaatgattggcatcagagcccaaagtagtttgtggtattttttttaatctgtaatattgctatgaacttgaaaatgttttctgtgcaaaatacatcaaaactaaaatgtacttgatacccaacttaattaacatggtacctattgtagaaagaccaaactgaaaatttagcctttggcacaatctagaagtaagcagagaagggggttaagatgcctttcattatgttaacgtttaatcctgagagtttacataaaaagccagatttctgggtctttgagaaaaatgagatctggcaactactagttccataccacgtggcaaccagttggcagctcccctcagactagcatgctgtcatttttgccacagttccttcctcatcagtttttatagcatcacattgatcagtggattcagatacctgtatcatgggtaaacaaacctctatcatgggcccaattttctattgttgtttctttacatttgtcatgcactctcatagatatgtcagctttgacttcatttaaa

SEQ ID NO: 2361 - DNA, 4001 bp, Homo sapiens
ttaaaatttggaccccactacatgccaggcaggcattgtgctaggagggctgggaaaacagccatgaacaacaacaacaaaaaatgctcccaatccaacaggaatatgccagaagagcaagaataattctaaaagaacaggtaaagcttcctgaagggctagcattctggttttgctttgaattactagtataagtcatagtaaagaacatactcaaaaattacaaatttttttaaaagccttcaaccagggagcacacagaacagaaacttcaggacctaaagcaggccgattcctaaccccgggagctacggacgagatcaacttcatcaataaagaagtccagcagcgccagccgccgtgtctggctgggctccttgcgctaaagtagtccagaccaggagggaaaaatgtaaaaccaacatggaggaggggctactgacgagtcggttcgggagctaaaacctcgtggctctttcctcatggcgccaaccagccttcctgctctgctctccccagccgggagaagcatcatcctgcctctccaaaccagcacccagcacccagctctcaggatcccttgaggaacccgtgctccaaatgaagttggagggtgttaaacggtgggaaaaacaagtagccacatcttaaaggctgttaggggagcaaagaaagaaccatctgggaggactccacccttctccacctgcagaaaaaaccccgggtaaagctaggaagtcatttcccttgtctctccttgccttgcggataaaacaaaggaaacaggctcctaagagggtcagacacccatacgatgacccccttccgtggatccaagacgcgtacgtcctggacaccgaagagcttggagccagtacaactttctcattgaagccgaccacgtttcctcttataaccttaaaaaacagaagcccctactattatcgtttcattgatgtcacggcacctatttggctctcagacttttacccggaaacccctgtaatccccagcccttgcgtgcagccccacactgggctccccttccccgggatgccgcctcgcgcgttcccgccaccctcgccctctcggccgcgcttcccggctcgctccgccctcggcaccaggctgcgccgcggggcgagcacgtctgtgccagaccggggcttgagggagtccatcgggggttagtgggggatcctgcggaaagccctctcccccgacactggagttgcaaaacaataagcatccgcttccctgcccttcccccataggaccccggccacgagttattaacgcggggggagaaaagccggaggagcactcccgccctgcgatcgtggccgcgtacccccggaacccccaaggcccgagtcttcgcctgcccccgccgcagcgcccccaggccgcgcggggcgcactcggcgctggagcgcggccgggagcggaggcgcgcgggccacgcggtggctgccgcaactgacacggcccgcggccgccggccacatgcgccgcccagggacagaagccgggaagggagcgcggctccgggccccgccgtaccttgccgctagctgttcccccgctgacgcctataaggaagggctcgccgccgttgggctgctggtggttctgcagggtctgctcgctgtccccggccatggttcgcgccgcccctcctcccgctgcctgtgcgaacggacgcacgctccccgcccgcgcccgcgtcggactccctccgctttccgcagccgccgctgggcgctgccggggctgaggccgctgtcgctcgcctgcgagccgctcggagcccggtgacggggctgggtttcccgaaggagccaagagccttcctttgcccgcagcggctggtccggtttacatcccaggcagaggtcagcgtgatgctgctgctccaatccgggcgggcagcgcgctgctattcgccgaggcggaggcggcgaggcgtctggccccagcctccgcccctcccgggccccgccgccgcccgaggtctctgcgaaaggtgtgagcccgaccttccctcccacccgcccggttaaccctttctccgacgcgccctagtggaccctgggggaaagaaacaggctgttctgtattttaatttggtatgctaccacctattttcagaagggataaaaagcttgaaggaaataataggcagattagataagaaggaatggcccaggtttgagaagcaaaatttgaacaagcttgaaagattagtgtggaacgaagagttaatgtcatttacccattatccaggctaaaaacttgtgtttccaaaaaatgagggttctttttcccttctcccgttcgccaagataatatgtcagccgctggctttagatatttcctgtcttggaaaccccccagcgccatcctttttagcaggcctgtcctcgtgcgactctctagtgaagggcaatttgaggggcttatctgaagggtgccctccgttggaaaagcaattcccttctaaaccacagtatctcatcccatacactgagcttcctatggagttagggtatctgaaaacatactgacattttgatccattaatatcttcaattgaacggttttccagagattggcaatcagtcacttagaaaggcagtttcagactccacctctggagccagatttctgcattcacatccaggtccctgagcaagttacttaatctctctgtgcttcagtgttcttatctgttaaatgggaataataatggcaattacatcccaggatttttgtgagaattaaatgaattagtgtatgtaaagttctcagaacagtgctggtacagtctaggccctgtattagtgtttgaagagaaaaggtttctaaagcgctgaaactggaaagaaaagttttgctgggacacacctgagagaggcaggactagcctagtaacttccagtctcttctcctgtgaacttgggactagtatcaatgagctgatggggcctacaatctaaaacagaatttacgtcaatagcattatcttttgaaacttagtaaattaccttaaattgaagattattttgaaaaaaataattttctctcaagccagggaaatcgaggctgcagtgagccatgatctccccactgcactccagcctggtcagcagagccagagcctgtgtcaaaaaacaaaaacaaaaacaaaacaaaacaaaaaaaaggataccagagaaaacaaacttttttcacttttaaattaaagttgacacttgaacaacactggttcaaactgtgaggttcacttttatgcagctttttttttaaaccaagggcagatggaaaacacaatatttgtgcagtttcctcaggactgactgtgggacttcatgtgtggatttggttacatgtaggctgtcctgggaccagtccctccgcatatatctaggaattactgtattttatgtcaccatctaacatcaaactcggtagcagctcagacaggagacaaagatggggagagtggccactacctggtacccagaagcaggcatttgggtgaagtttcctaaaggggtgccttaccaaatagctatggagtgggtgagttttaggtggtcctagagttagcctcttctccaaaaggtcttttctctactagatagatttattagtcatcatggacttttgtagaactctttatagcccattggaatttggaagttgaacctacagctaagggttagcatggggatattaggtagttaaggagaagaggaggaggataaaggaatgccaaaggccagtggggtggctcatgcctgtaatcccaacattttgggaggcagaagagtgaggatcacttgaggctaggagtttgagaccagcctgggcaacataatgagacccccatctccacaaaaagtacaaaaattaactgggcatggtagtgcacacctgtagtcccagctacaccagaggctgaggcaggaggatcacttgagcccaggagttcgagg

SEQ ID NO: 2362 - DNA, 4001 bp, Homo sapiens
tctttgaccctccctatcccttactacactaatccatgttatgctaattttaccttctgaatattctacaaatctacctctcctctctatcctcacaactgcctagtttagattgccttttgtttcgctgagattaatgacagcctaacttgtctcttaccttcagtcttgtccctgtcaattgtattttccccttattgccaatgtgactgatctaaacccaaatcggccatgtaattcctcagcttaataacttttaacggtatcccaaagcctccaagagaaaattcaagtgctcaaatatgtctcctagctttgtctaccattccctgcctcacatttgatgctctaacaactctgagctactttgtttcttcaaacacatcatgctggtgcctgtgccgtttctagattctatgcctttgctcatgctgtcccttttggcttgaatgtccttctactcttatgttttatcaggctagcttatgtttactctttaagtttcagctcaagcattacctcttccaggaaaccttccgtgaccgaatgcaaactggatgtctcctcttatgctctcaaaacatcctagccatttctcgctttatatctgtccatatctgtctcagtctctctccacttaaacactgtattataatgatctggttttgtctacctcagtaagttcctccttattcggcttggtatctcctccctaggttctatatgcacagtaattttttttttttagtgaatgaatacatgaggtaggagaactagaactgctggtctttgaagcaggcagaaactacaaggaagacaaacttttctcaccttccacagtagagataactgagaagacagcccgtttctaactatgagctaaactccccaactctctgtagttaacacctacttgaattttcagccctaatgtggcttgaaagagtgaagagtgaggccaggcgcggtggctcacgcctgtaatctcagcactttgggaggccgaggcgggtggatcaggatcacgaggtcaggggatcgagaccatcctggccaacacggtgaaaccccgtctctactgaaaatacaaaaattagctgggtgtggtggcgcgcgcctgtagtcccagctactcaggaggctgaggcaggagactcgcttgaacccgggagtcggaggttgcagtgagccgagatcgcgccactgcactccagcctagcaacagagcgagactccgtcaaacaaacaaacaaaacagtgaagagtgaagaagggggcagagagatgcggactgggagttggcgccctgaggatttttgttcacatccaggtgaacaaacacctgtagccagggagacacgtcaccttctggggaagcgtatccctaaaataactgctgcttttagccgcaaggtctggccccactgtgcacctcacccgagtcttttttgccctctccccaccatccctccttagtccccgagccccacaatagtcccatttctatgaatttgggcgttaaacttaaaaaccggaagcggcttccacacggagcctattattgaggacacctgatttctcccaacccttatgctacgcgttagactgtagaaacacaactaacccggataagggactgatattcctccttcagtcgctgcacccacaactcacgatctcggggtccggcgttagtcttcagcaccgggatctcagacacaacacgtcgcgtggcttcatccgccatcttggaccagggcgcaagagaaacgcggaagtggtgttgcctgtagcttacctcaaggcgccgtcatctttactatgggaagatgagacgttgggttgctgtaagacctcttttgaataagatctttgttttcttgtcacctagttacccgcttgtgagtgcatcgagaagaacagaatgtaaacagattactccgtcctatatatgacacctatcattaaaatcaccgcataaggcacaaagggtgacttccgttcatgctcagagaagtaatcgcagaaaacccggacaccttcccaaacttggaaagctcttagaacttcaggctgctgaaggcatttttacttatttatttatttttattataccttaagttctagagtacatgtgcacaacgtgcaagtttgatacataggtatacttgtgccatgttggtttgctgcacccatcaactcgtcatttacattaggtatttctcctaatgctatccctcccccagccccgagcccccaaccccaaggcgcttttcaaggcactgacttcctaaaacgagcgattcgtgtttcctcttcgaagaacttttcctttgcttatatatagtcctgcctctagatgcagttatcctgtagaaggatgtttaactcctgataaagattagaaaccatgcagaatcaaaagacaaatccctgcaagatttctgccttagtctagccattcactgagtcctagacttttttttttttagacagtgtctcaatctgttgcccaggctggagtacagtggtacgatcatagcttactgcatcttccatctcccgggctcaagcgatcctcctgccccagcctccccaaagtgctgggattacttgtggggaaacaataaacaaactccagttggacttaaaatctaaacacattaatttttgctttttttttttttttttttggagaccgagtttcactcttgttgcccaggctggagtgcaatggcatgatctcggctcaccgcaacctccgcctcccgggttcaattgattctcctgcctcagcgtcctgagtagctgggattacaggcatgtgctaccacgcccggctgattttgtatttttagtagagaccgggtttcgccatgttggccaggttggtcttgaactcctgacctcaggtgatccacctgcctcagcctcccaaggtgctgggattacaggcgtgagccaccgcgccggccattttggctttaatttaaatatcctgtttggctggcgtggtggctcaagcctgtaatcccagcaacttgggaggccaaggcaggtggatcacttgaggtcaggagctccagaccagcctgactggtgaaacccgtctctactaacaatacaaaattagctaggcatggtggcgcacgcttgtagtcccggctacttggaggctgaggcgggagaatcgcttgaacccgggaggcggaggttacaatgagccgagatcctgccattgcactccagcctgggcaacaagaacaagattccgtctcaaaaaataaataaaacctaaaaacgttaattatagatttaaatatcttgtttggccgggtgcggtgattcacgcagataaccccagcactttcagaggccggggtgggcagatggcttgagcccaggagttcgaaaatagcttaggcaacgtggtgaaaccccagctgtacaaaaaatacaaaaattagccggagtggtggcgggcacctgtagtcccaactattttgggggctgaagcaggaggatctcttgaaccccggaggtcgagattgcaaatgagccaagattataccacttcactccagcctggggggtcaaagtaagaccaaaatttttaaaaatatatttatttattttatttatgtttatttcactgtttattcagtgaatcattccagcctgtggcagtaagtttttttgtttgtttgttttgttttgtttttgagacagagtctcactctgtcacccaggctagagtgcagtgacatgattttggcttactgcaacctccacctcctgggttcaagcgattctcctacctcagccatccgggtagctgggattacaggcatgcagcaccacgctcggctaattttgtacttttagtagagatggagtttcaccatgttggccaggctggcttcgagctcctgacctcaggtgatccagcccgctcggcctcccaaagtgctaagattacaggcgtgagccaccgtgctcag

SEQ ID NO: 2363 - DNA, 4001 bp, Homo sapiens
aaaataaacagctctctataatctaaatactaacaaagagattaagacttttcggatgaaattttaatcttgcagagatcaggcaagtccctaggcttgcaaaatttttcccttttcaataccaaggttatagtaacagaccatttagtaaactaaaaaaatgtagcactagtgttaattcttctccaaaatgatattataaaaaaactcactcttcaaattaactatgcatcatacttgctaggaaataagacttttctttaataaccaaagctataactaatgataagctttctgtcgtgtaatgaaaatgaaaccttttcacagatcaatcatcagtgatcattacatatcttacattctgagtatctgattcttgaaacagtctcaagagagcaaaggtatagtgttcctaaatttcacacttctataaaggctcccatggaatagtgcatcatttcttccaaatccgtactaaagatataataggtgagctatacgagttactagcattgatgtcacaaggcccagacgtagttcccattttctactggtatgcaaagattcaaaaatttccacacaagacacgacaatctagcaaagacatgcctcctctcactagaaaagatatttctgtatgctaatgaatgcggcattctccgatgagactcgaagcaagacaatttactgagcatctatgtgacacctggcaaagcagaccaccaactccactataccgcagacagtaataaagtgaaaggggaaaggggcctggatggggtgataaagagggctaaacccgcttctcccgcagaaggggaggaagatggaacgccagacagcgagaggaagagtgtgctcggactgtgacctgggcaagaagagaaaggagacagcggcaattaccgatgtttctgtgaccctgcaactgttccagcgccgccctctctttgcggaaaccatactcggcggcagaggccgcagccccggtggttcctggcggcaagaactgcttgagggcgccggggggcgagccagggttgccgcagcagcgaacccgatacaccgaggcggaggagccgctacccagacggctctgtacctgccacagccgcccgaaggcctccagaaaacgcggcggctccgcgccccaggcgcagccggatcccgccatcggtgtgggttaagggcacggacacgggagctgacgcgacgcctgaggcaggccggccgggcccgcggtcacatctccgccagccggaccagcggctccgcagggagggacctgcagccgcctcaccgactcccgggacttcaagcagccatgacaccggaagccgtggtgcacccgagtcccagaagccggaaatggaggaagagcctatcatacaggccgaaggagggggggctcagaaggggcggggcctagaagagattagacgcgctaggtttggaaaaaagaaccgagaataagaagtaaccttaattattgagtatctaccattccaggcccagtgttaaccgctttcacatagacctgaagccaaaactggtcctttttcttgttgaggcacctcaccttacctcaccactaggaacccgaaaaataaaacccggcctacatttctcatagaaaggatcccaaggaaaacaccccaggaacaaaaagagagtttaccatcacctccaggtccacggtcaccagaacccatgattctggaagcctagacctttgttcttcttttagatgtaaaccgaaaatacaattctaagccccccgtgtcgccaaccatcggaatggactttctcccaggccagggcactctaaaattctggttcagtccatgacgggaagtgggggtccgactagcctcatacctctccggttaaggtcaacacagaccttcggtctggtaagaaacatttacaatctattttcttggaagcctggtacctggaggcttcatctgcatgacaaaactttggtctccacaagttcttatgacaacccagacattcctttctattgataactctttcaaccaattgccaattagaaaaattttaaatctacctataacctggaaggacccatttctccccccaccaattcccgcttcgagttttcccacctttctgggccaaatcaatgtatttcttaaatatatttgattgaagtctcatgtctcccaaaatgtataaaaccaagctgcaccccaaccaccttgggtacatgttctcaggatctcctgagggctgtgtcacagaccatggtcactcatagttggctcagaataaatctcttcaaatattttacagagtttaactctttttatcaacatagtccaccttgcctatggctccctcatcaaaaagcattcaccctgggcaaacacggatctgttccaaatttttatttttcatttatttattcaattattttattcattcagcaaacgtttattgagtaacaaatgtagcaaataggcatctcaatccacaaactcgagtgtgtaagaaatgtagccttctttacttttcagtcattcaaccttttctatttcaagatctattctgattgtgtggcaaaaacttagtatcagacaataggccctatcttcttttcttcaggttttgtgtaagttcccagccagatgagatggttcatgtagtgctaagtggaaagtttgaggagaggttgaggactaaactctgacctgtcttctctcttgctcaattttttttttttttttttttttttttggtaagacggagtttcgctcttgttgcccaggctggggtgcaatggcatgatctcggcatctccgcccaccgcaacctcctcctcctggggtccagcgattctcctgcctcagcctcccaagtagctggaattacaggaatttgccaccatgccagctaattttgtatttttagtagagatgaagtttctccatgttggtcaggctggtctcgaactcctgcccttgtgatccgcctgcctcaccttcccaaagtgctgggattacaagcgtgagccactgcacctggccccaaattcttatctaagggatgtgaggagtcacagcctacaaaccataaaatctcatcagattgtcagaggtgttcaaaccagagcaactccatcttgaataggagctgggtaaaataaggctcagatctactgggctgcatttccaggaagttaggtattctaagtcacaggatgagataggaggtcaacacaagatacaggtcacaaagaccttgctgataaaacagattgcagtaaagaagccagccaaaacccaccaaaaccaaaatggtggtgaaggtgacctctggtcgtccttactactcattagatgctaattataatacattagcatgctaaaggaaactcttaccagcaccattacaatttacaaatggtatggcaacgtcctggaagttaccctacatggtctaaaaagaggaggaaccctcagttccaggaattgcccactcctttcctggaaaactcatgaataatccaccccttgtttagcatataatcaagaaataactataaatatgaataactataagtcgagcagcctaagctgttgctctgcctatggagtagccattcttttatcccttttacttcctaataaacttgctttatggactcattctgaattctttcttgcgtgaggtccaagaaccctctcctggggtctggattgagaccactttccagtaacaagataggttggttggttggtttgtttgtttgagacaaagtctcactctatcacccaggctggagtgcagtggcgtgatctcagctcactgcaacctctgcctcctgggttcaaggaattctcccacctcagcctcccgagtagctgggattataggcatgcgccaccatgcccggttaaattttgtatttttagtagagacggggttttgccatgttggtcaggctggcctcgaactcctgacctcaggtaatc

SEQ ID NO: 2364 - DNA, 4001 bp, Homo sapiens
atcttttggcaattgggttattttaataaaaataagatgagacagcctacaacagctgattaccattcacagatactaaatatggtacaattattcaatttgtgtttcaccaagtactcattggtgatgaacacgaacttggagtgccaagcaaaaatgattaaaagtaaaaaacctaaatataaataaataaaacttactgttgcatcatgaggtcctttaaaaaaaaagaaatttttaaaagtaaaaacccaaatattaagtaactcttttaaaaggaatgtcacaatgcgcaaaaaccaaactaaacattgcttcttcatccaaaacagcagtctaggtctgccacggtggctcatgcccgtgatcccagcattctgagagaccgaggcaggaggactgcttgagcccaggagtttggagaccagcctgggtaacaaaaggggacctcttctctacaaaaaattagccaggcttggtgctacgtgcctgtagtcccagctacctgggaggctgaggtaggagcatggctttaggaggaattggaggctggagtgaactgtgatctcgccattgtactccagcctgggtgacagagtaagaacttgtctcaaaaaaaaaaactaaaacaaaaataaacagctctctataatctaaatactaacaaagagattaagacttttcggatgaaattttaatcttgcagagatcaggcaagtccctaggcttgcaaaatttttcccttttcaataccaaggttatagtaacagaccatttagtaaactaaaaaaatgtagcactagtgttaattcttctccaaaatgatattataaaaaaactcactcttcaaattaactatgcatcatacttgctaggaaataagacttttctttaataaccaaagctataactaatgataagctttctgtcgtgtaatgaaaatgaaaccttttcacagatcaatcatcagtgatcattacatatcttacattctgagtatctgattcttgaaacagtctcaagagagcaaaggtatagtgttcctaaatttcacacttctataaaggctcccatggaatagtgcatcatttcttccaaatccgtactaaagatataataggtgagctatacgagttactagcattgatgtcacaaggcccagacgtagttcccattttctactggtatgcaaagattcaaaaatttccacacaagacacgacaatctagcaaagacatgcctcctctcactagaaaagatatttctgtatgctaatgaatgcggcattctccgatgagactcgaagcaagacaatttactgagcatctatgtgacacctggcaaagcagaccaccaactccactataccgcagacagtaataaagtgaaaggggaaaggggcctggatggggtgataaagagggctaaacccgcttctcccgcagaaggggaggaagatggaacgccagacagcgagaggaagagtgtgctcggactgtgacctgggcaagaagagaaaggagacagcggcaattaccgatgtttctgtgaccctgcaactgttccagcgccgccctctctttgcggaaaccatactcggcggcagaggccgcagccccggtggttcctggcggcaagaactgcttgagggcgccggggggcgagccagggttgccgcagcagcgaacccgatacaccgaggcggaggagccgctacccagacggctctgtacctgccacagccgcccgaaggcctccagaaaacgcggcggctccgcgccccaggcgcagccggatcccgccatcggtgtgggttaagggcacggacacgggagctgacgcgacgcctgaggcaggccggccgggcccgcggtcacatctccgccagccggaccagcggctccgcagggagggacctgcagccgcctcaccgactcccgggacttcaagcagccatgacaccggaagccgtggtgcacccgagtcccagaagccggaaatggaggaagagcctatcatacaggccgaaggagggggggctcagaaggggcggggcctagaagagattagacgcgctaggtttggaaaaaagaaccgagaataagaagtaaccttaattattgagtatctaccattccaggcccagtgttaaccgctttcacatagacctgaagccaaaactggtcctttttcttgttgaggcacctcaccttacctcaccactaggaacccgaaaaataaaacccggcctacatttctcatagaaaggatcccaaggaaaacaccccaggaacaaaaagagagtttaccatcacctccaggtccacggtcaccagaacccatgattctggaagcctagacctttgttcttcttttagatgtaaaccgaaaatacaattctaagccccccgtgtcgccaaccatcggaatggactttctcccaggccagggcactctaaaattctggttcagtccatgacgggaagtgggggtccgactagcctcatacctctccggttaaggtcaacacagaccttcggtctggtaagaaacatttacaatctattttcttggaagcctggtacctggaggcttcatctgcatgacaaaactttggtctccacaagttcttatgacaacccagacattcctttctattgataactctttcaaccaattgccaattagaaaaattttaaatctacctataacctggaaggacccatttctccccccaccaattcccgcttcgagttttcccacctttctgggccaaatcaatgtatttcttaaatatatttgattgaagtctcatgtctcccaaaatgtataaaaccaagctgcaccccaaccaccttgggtacatgttctcaggatctcctgagggctgtgtcacagaccatggtcactcatagttggctcagaataaatctcttcaaatattttacagagtttaactctttttatcaacatagtccaccttgcctatggctccctcatcaaaaagcattcaccctgggcaaacacggatctgttccaaatttttatttttcatttatttattcaattattttattcattcagcaaacgtttattgagtaacaaatgtagcaaataggcatctcaatccacaaactcgagtgtgtaagaaatgtagccttctttacttttcagtcattcaaccttttctatttcaagatctattctgattgtgtggcaaaaacttagtatcagacaataggccctatcttcttttcttcaggttttgtgtaagttcccagccagatgagatggttcatgtagtgctaagtggaaagtttgaggagaggttgaggactaaactctgacctgtcttctctcttgctcaattttttttttttttttttttttttttggtaagacggagtttcgctcttgttgcccaggctggggtgcaatggcatgatctcggcatctccgcccaccgcaacctcctcctcctggggtccagcgattctcctgcctcagcctcccaagtagctggaattacaggaatttgccaccatgccagctaattttgtatttttagtagagatgaagtttctccatgttggtcaggctggtctcgaactcctgcccttgtgatccgcctgcctcaccttcccaaagtgctgggattacaagcgtgagccactgcacctggccccaaattcttatctaagggatgtgaggagtcacagcctacaaaccataaaatctcatcagattgtcagaggtgttcaaaccagagcaactccatcttgaataggagctgggtaaaataaggctcagatctactgggctgcatttccaggaagttaggtattctaagtcacaggatgagataggaggtcaacacaagatacaggtcacaaagaccttgctgataaaacagattgcagtaaagaagccagccaaaacccaccaaaaccaaaatggtggtgaaggtgacctctggtcgtccttactactcattagatgct

SEQ ID NO: 2365 - DNA, 4001 bp, Homo sapiens
cccggctaattttttgtattttcagtagagaaggggtttcaccatgttagccaggatggtttggatctcctgacctcctgatccacccgcctcggcctcccgatccacccgcctcggcctcccgatccacccgcctcggcctcccaaagtgctgggattacaggcatgagccaccgcgcccggccagaataccctagtttaaaactgactgcttaattacttgctttttctcatctattgcagcggtggatcttgctgacctttctgaggcaggctccatttctttctttagtttttttttttttttttttttttgagacagggtctcactcgggttgcctcggctggagtgcagtgacacgatcacggctcactgcagcctggacttcctgggctcaaactcccgagcagttgagaccacaggcgttcaccaccatgcccggctaatttttatattttttgtagagacggggtttcgccacgttgcccaggctggtccaactcctggactcatgctacctgtctgcctcggccgtcctcctaaagtgttgggattacaggcgtgagccactgcgcccggcctcaggttctatttctttttagaaataataagactagaaaaattaagggataaataagtctccaattattctgaacccacagcccagaatggctgcccccaagtgaccagagaacagacggacaggaaatgagattagaaacaactagtagctgtgtcgcaaaattgataagagtcctggttctagaaccgcgctgcttggccgcaattcctggctgcaccaatttggtagctgcatgaccttagaaaagatatttaacctctatgcttgtttcctcatctgtaaaaatggcactaatagtacccaacacttacttcataggaatagtgtgtagatgaaatgaattagggccgggcgcggtggctcacgcctgtaatcccaggactttgggaggccggggtgggcggatcactaggtcaggagttcgagatcagcctggccaacagagtgaaacccccgtcgctactaaaaacacaaaaattagccaggcgtggtggcggacacctgtagtcccagctacctgggaggctgaggcaggagaatcgcttgaacccaggaggcggaggttgcagcgagccgagaccacgccactgcactccagcctgggcgacagagcgagattccatctcaaaaaaaaaaaaaaaattaattagtgcatataaagcacttggaatagcaagcagtcaataattatagcagcactctttctctgggaaagagctccctcttccatcacagaatcacatcgtacattctttcattgtccccaaagacacacaccttcctcaaagaaaaggaacacaaggccaggtcttccgaacctccatagaagatgtggtagggattcctaacctgagctggggcaaggcggtctgtttgctccccaaatctgtgaaacgcgggcttcagaacatctgactgactgcaaacataggtcatatttttacaagactttagtccacaaaacattttcgctctcaaaccttcactacattcacagaatgcagaagccgaggcccagagaaaaactagtcatctatctgtccaaagtcaccggacgaattctggggaaaggtcgagggaactagagctcccgactatgcaaaccctagagggtaaactgggggctaagagggccccgtgcgtgttttggcgggctaggtcctgggcttcagggcagagaagagggccgagtggatcgccttgccttacctcctcaggatctccggattcggtaagcatcttttgctcgtcctccagtcccatgtctggctacggttctagattcaacacgagcagcaacagcggcacctaacccagttcaggatcaagaaggacttgtaagggtcactcagcggaaatccggcgatctggccggaagtgcggcacactcatcgtggtcgcgaacacatgctcagattggcatgtactaccagccgcaggcagaggttaggggtagctgatgtttgcacccgaggaggctttgctaagaaacatccccttagtcataccacacccaagtataattgatctaggagtttatctaaaatagtagctcctaagagacttggaaagtgtgctaatttcttcgaaatttctttagaataattcacattcttccccatatcgcttatggagccgtcctaactgctgaccttttcaagatggcggtccgcgggcgacactctcgggctcgcgcacctccccaagatggcggcgcccgaggcctggcgcgcccggagttgctggttctgtgaggtagcggcggcaacgaccatggaggccacgtcccgggaggcggcgccagcgaagagctcggcctcgggccccaacgctccccccgccctgttcgagctgtgcgggcgggcggtgagcgcccatatgggggttctggagagcggggtgtggggtaagtcgcggggtgaggggctacctctggctaagagcaaggggcggcccagcggccggggggcgcggggggcgaggccgggaggcccggggcaaggcccagcctggggcgctgaaagccagctcgtaggatcggagaatgaattttgtgactgacagggctggacagagtaaagacggagacctaaatgggcaggctgacccgcaccgcggcctggctcgggggcgcggggggcgaggccaggaggcccggtctggagcgaagcaggctgggcccgggcgactgaggctggattgcggctgtgggccgcgcgaactgacactcggctgggccgggcaggagagtctcggatgtcgaaccggtgggcagcgatggcccggctgccctagggcaggggccgaggttaggaggcccggcctaaggcaaggccaggccaggcccggggccaccgaacctgactgatggccccggggctccagcatctgcctgacacgccacgggggtcgagattccggaggccaagccgatgggcggaggggaggacagcagattggagagcgagggaatggggcagggggagaggccgaacgaaagggtcggggcgccgcggcctgtctgacggcccagggctgacgggagcgaaccgacaaccggggtctcgggtgccaaactgactaagcgaccgagcgaccgtgcgacccgcaggacagggagcgccggaggccactcggatcggctcgagcggcgaggagggaccggagagcgagtggaggggggcccggagcggcttaaacaagcgagggaggctcgaatgacggacaggcgggaagggccaaggaggccccaagcggggcgacggcccggggatcccggactgccgggctgccgtggcagggggcgcggcgccgccaagaggccttgggctgaatgggagtgaacgggggccccaggcctgaaggcggccgggaccaaagggccgggcctggatggagggcggcctggggcgccgggatgaacggccggggagggcgaaccggccagttgggctgggaggcggggctgtgggttggggaccgctggccgcggcctggccgctgacgagggaaacttgggtccgacgtggggcaagtgaaagaggggaaagtgaggctctgccaagcaggcctagccgcgctggggacaggggaggcctcgggcctgagaggctgctggctctgtgagggtggggtcgggaggccggggttggagttgggcgaagaggtggcaggcccggccgaggcctgctggggaggggggcaggagagcaggccccgggcctggaagcggcgcgggggaggttccaccaggaggccttgcgggtggccgtggcgtctttgcaggaggaaggccctggtcaggacaggagtgaggactttgaggactcgaggttgcagggcgcggagtttgagttatgccatgaggagggggtgtggggaaaaggccctggagtttggggggactgaagctccggg

SEQ ID NO: 2366 - DNA, 4001 bp, Homo sapiens
cttgggaggctgaggcaggagaatcacttgaacctgggaggcggaggttttggtgagccaagatcacaccattacactccagcctgggcaacaagagcgaaactccgtctcaaaaaaaaaaacaaaaacaacaacaaaaaaaaactcccttaaggtgatgctcctgcggccagagttgagagcctcttttttcttttcttttttttttttttttgctctctgttgcccaggctggagtgcagtggcacaatctcagctcactgcaagctccgcctcctgcgttcacgccattctcttgcctcaacctcccgagtagctgggactacaggcacccaccaccacacccggctaattttttgtatttttagtagagacggggtttcaccgtgttagccaggatggtctcgatctcctgacctcgtgatctgcccgcctcggactcccaaagtgctgagattacaggcatgagccaccgtgcccagcctgagattctgttttaagatggcttttgatttattttgatggaggtaatgtatcaatttttttcctttatggtctttatttatttatttatttattgaggcggggtctcattctgtcacccaggttggagtgcagtagcgagatttctgctcaatcgatcctcccacctcaccctcctgggtagctgggatcacaggcacatgccaccgcacccagctaattttttgtatttttggtagagacagggtttcatgttgctcaggtgatcctcctgccttagactcccaaagtgctgggattacaggcatgagccatcaagcccggcctgcatttccttttatcttaagaaacttctcttcggttgggcgaggtggttcatgcctgtaatcccagcatttgggaggttgaggcaggcgggtcacctgaggtcaggagttggagaccagcctggccaacatggtgaaaccccgtctttactaaaaatacaaaaattagcagggcaaggtggcgggcgcctgtagtctcggctactcgggaggctgaggcaggagaatcacttgaacgcagcaggcagaggttgcagtgagccgaggagacgccactgcactccagcctgggtgacagagtgagactccatctcataaaaaaaaaaagaaacttctcttgtctgtttgtggctcgtacccataatcccaacactttgagaggctaaggcaggcggatcatctgagcccaggagtttgagaccagcctgggcaacatagcaagacttcatctcagaaaaaattaaaaatgaataagtaaattgtttaaaaaaagaaaaaaaaaattttttttgagacagagtattgctatgtcacccagactggagtgcagtggcataatctcagctcactgcaacctccacctcctggcgtcaagggattctcctgcctcagcctcccacgtagctgtgattacaggcatgtaccaccacacccggctaatttttttttttttttgcagatcacagaacttttatttagatggaatcactgcgaattacatagaagctaccagcctaagccaaaacccacgaggttcatgtgaacttacagttacacaaataagaaacaaatggtacatccgaaaccataaggaaatattctgatgcccagatgatgaaggctggggtgaattaagtccacacatttatttcaagttgttaaagagtttgtgggccacgcaatggtcctttgcatgcaagaagtcaaagagctcctccgtgcaatcctcttctgtatgtgatcgagaggatacatgctcatcatagagctctagccgctcccgggcctttacacatttctccaactgctcgcattgctctctcactgttgttaggggatccactaattcctcctcttcctcttcctcctcctcaggatctccggattcggtaagcatcttttgctcgtcctccagtcccatgtctggctacggttctagatttaacacgagcagcaacagcggcacctcaatttttgtatttttagtagagatggggtttcaccatgttggccaggctggtctcaaactcttggccacaggtgctccgccactgaaagtgctgggattacaggtgtgagccaccgttcccggccagaaacttctctttatcctgagctcttaacaatcatctcctataatttcctgaaagtattaaagtgtcactttcagctgggcgaggtggctcaagcctgtagtcccagcactttgggaggccgaggagggcggatcacttgaatccagaagttcaagatcaggctgggcaacatggtgaaaccgcatctctaccaaaaatacaaaaattagtcaggtgtggtggtgggcccctgtagtcccagctatttgggaggctgatgtgggaggatagtttgagcctgggaggcagagatcacagtgagcagagatcatgtcactgtactccagtctgggtgacagagagagaccctgtcttaaaataaaataaaataaaaaataaagtgttgctttcatatttaatatcttgactttttttttttttttgagctggagtctcgctctgtcacctggctggagagcagtggtgcgatcttggctcactgcaacctctacctcccaggttcaagcgatcctcctgtctcagcctcccaagtttgctcactagttcatcctttgcccccagtcagcaaagtcatgtgtgtggtgcctcaagtttccgtagtggtgtggatctgcagtggggctgcttttcctgacctattggccaggcttacctttctgtaattaattgtttgtttgttttttgagacagagtcttgctctgtcaccccggctggagtttagtggcgtgttctcggctcactgcaacctccaccttccagactcaagcgattcttgtgcctcacccttccgagtacctgagactacaggcatgcgccaccacgcccagctaatgttttgtatttttagtagatacagggtttcaccatgtttgaccaggctggtctcaaactcctgagctcaggcaatctgcccgccttggcctcccaaagtgccaggattacaggcgtgaggcactgcacctggccacctttctgtaattaatactgatagtttgtgtaatacattttatttttccatggaaaacacgcacacacacacgcacgcacactactgtcaagaaaaactctgaggctcattcacccagatttgtgattgttaactggtgttaaaatgatgtcacctggaggcttttttgaatttatcaggactcacacttaatgcaaaaggaagaaagctctctcaggtgagacagccatggagtgggagggtgcaggaggaggccaacatcatcagcaaggatcccctgcaaacatgccgcccaggaggcaaggcctgtttggcatgtagaccagtcctagtccacaggtaaacattccatgcactggggcagaggggacttgaggaatttatttacttctttattggatggaggagggtggtgagggaagaatgggaagtatttggttcacccctgccatttatcctgggattcctggcatctgaggaatctgcatccatactgatttgttgactctgattctttctgtttttgttttgttttgtttttgagacagagtctcactctgttgcccaggctggagtgcagtggcacgatctccgctcactgcaacctctgcctcccggattcaagtgattctcctaccttagcctcccgagtagctggaattacaggcatgcaccaccatgcccggctaatttttgtatttttagtaaagacggggttttgccatgttgtccaggctggtctggaattcctgacctcaagtgatccacccgcctcggcctcccaaagtgctgggattataggcgtgagccaccgcacctgactgaccctgattctttctccagggccaaaatcggcctttgcacaacagagggtttttttaatttaatttttttttttttgagacaag

SEQ ID NO: 2367 - DNA, 4001 bp, Homo sapiens
atacatatataatatgtatatgtataatatatatacatatatattatatatattatatacatatatactatacatatactatatatattatatatatattatatatgtatatatacatatatatacatatataatatatataatttttttaagagatgggatctcattatgttgtccagtctggtctagaactcctggcctcaagcgatcccccgctttggcctcccaaaatagagatgacaggcatgagccactgtccccgacctaaatgaggttttttaacagaaaaaaaaaatgtattaatgaagtacctgactcattacttttttcattgacattacatttaacttccaacaaagttccctccccaactttttctctatttttttattttaaccaattgtcaatatccaaattataaaagtgataattatcttgacagactgtaaaaatatgagtttcacattaaacttacttgttctttatttggaagaaagcactggtgagaaatccaagcaaagtgagctagttttagtttatcttcccaggaagttgtcttgcttttaagcttaagggaaatgccagaataaacagcagccatggctaggctttatctaaaatttaaaaacaatgggaaaaaaaatactataacaatgtcagactgagcaggcaccagaaaaccaacagtattgcagtactgtatcttgtttacctaatatgtattcttttaaaagtttttaatgaatcaacagatttgtcggggtaaatctacatacaagatgcttgactccagaattttctgggggaaattcagacaaaagcaagcaaaagatggactgcacacacagaagatggactatatgtattccagctatgatcaaacatcacttccacaaaggtgagtgttcaggaattcaacaaggccaaaatcagtgattacattacttgtggaaagagtcattcatacatggtttcaaattgaaagaggaaaagatacataagcaatatccggagaaagtaatatgtctccaagtgaaaaagaaaaccccaaaggaatacagttatttcagctgcaacagtaaccttccactaacacttttattcagtcgtgtataaatttacaacgcacatacacttcaaaaaagactctacaagagatacttgcacaaggaaaagactaaaaatagaaaacaaaaaaccatgaaatctcgggggtagcaaacataccaaacacctacagttactattaaactgggtaaacttggctttgagtttcctaaaagttatagtaaaaaggaacgttaagacgttttcattttagaaattaagttatccttcactctactgcagagaacaagaacgtcaagtgctgtcagttttcctattttgtcaaaatgtccaaaacgaattcaacgatgcctgactttctaagttcaataccatagaaccgccatcgcgacagctacaaagtgcataacaggtgtttgctgaactggctacaaagacaaccgagatgctctccccggctccgccagagttcggctctccgggcctccaaccgcccttaccgggcaatgcgaagtccagggcggacagcacagccctgccagcactccctgcccagcagaaagagaccaagcaacaagaaccaggggagagcagctaggagccaggagggagttcgccttcgcgaatggagcgtgccgaagccgctccagcccagagtctgctggcggcaccggaactgggcagggttggggggccccccatctgggcccggccttaggtagggggatctcctctggaccagccccgggtggggggactcacctcgggacctggctgcccgcaggggctgaccgcaggtgggggactcacctcgggatccggcccggtagggggctcagctcgagacagctccgggtagacaggggaggacggcggcagcggcggcggctgctgtcccggtgcggcggaggccgctgtacgggtcccgcgtccccaccacgtgggaccggtacccgcgctccttccgccggacgccggcggcgcagcggggaggggctgcacgcacgccaggcgtcgccagccgagcgccgaggcgcctcgcccattggcggagacggttgcgcgttggaggcccgagcggcccagcccgcggcccgctccgtgtcagtcagtcatggagcggccgcccagagcggcggcgggggcggcggggcgcggggcgcgggggcccagctgagccggccgtcggagtgagaccctgcggcagagacgacggaggcggaagcaacccgatcccggaggcggcggcggcggggggagccggagccgcctgggatgttcagtgagtgccgggagcacgggcggggagggccgggagggtcgcgaggcgcgcgcgcgcgcgggcgggcgggggccggggcggtggggcctcggcggggcgcgccttggctcccgccggcgggcggtgggggtggggcgcgggaggcggggctggggggcggcgggcggctctgcgcgggcgcgacggccgcgcctccgccctcggcctcccgagtcccgggctgcggccggcggcgtggcctgcagtcggcggctacacctggactggcgtcgcgttcctgcgcaggggtgggtcctgcgggttggatgccgggctcggggaggaggtggcgggcgcccgcggggaaggtatcccagtgcccgacagccaagcagggagcacggctccacagctcctttgcatgtaggggaaaaggaaatgtctttgcggcgaagtcgggattcaactttgcacatggtgatcgtgcgtgggtgggtgtggagtcgatctccgcgtgtgacacgggggagccagagttagactagctgctgcaggagagtgcttacctgcaagggtgtctctcggggctcgttgcctcatgacagcaaggtaaggttggtgcgcccatggtgtgggacgggttcaccacctccagctcgcgaagctgccaggcttttgaaaatgtattcgataaggcgttggtccgaagtgagtggatggttagaaacagtggtgtcattttagacttagcggaagtggagtgcaggaacgctacatgcagttctcccatcagttgtgaaagtcgttgtaatgcggatctcgcagtctttgtggttctgggatcagaaggtaagtgccagtcccatgcagtgtctgtcttaaattactgtacctaaactgaccttgcagattggaatctcggaatggtgactcctgctaacaagcagttgggagctgtgctgagaggaacattaagtgcggagcgtgtcttatatcaggcgattcaagtgtgccaacacctgagttggggatgtaggggaggacacggaggctgtgccccagttcctggtcacagctctacttggaagggggagtaggaaagggagttttgtgcttaataggttaaatgcatctggccacatctttaaactttggaacagcataatgtagtggatagagcttggtgacagtagacctaggatggaaaccatgtagccatctgcataacctctctgaactgtagtttcctcatctataaaatgcgatgataaggaataacttaaacgtggatttttttttatctttaagagacagggtgcctctatgttgcccaggcctgggctcaagcagtcctcccgcctcagcctcccaaaaaacgacctttttaaaggtacccagaaaaagaatgatgtgtatgaaaatagctaaatgttagctattatcgtttcctttttggcaaaataccttctaggttccctgtagtcctaagtttttgcgttaaatggaatatatgctaattttttaatgaatcgtaaattcttcctgccttaaaaatcagcgctaagctagaaaattaaaaggtgggcttgttttgagtatttttctttgtcatcaacaacaaattaaattagtgtatcttggaatagttttgttgctcctgcctgtaaatgtg

SEQ ID NO: 2368 - DNA, 4001 bp, Homo sapiens
cactcttgcttctggtccttacagaccaaatcccagcctatttctctctctctcaggactcacctgggcaccagccaccacttgtcctaccagatatgggaccagagcatcagtgaggatgcgaagcagctggtgactagcctgaggtctctgatagagccagcgcttggcctgagccatggtgcttgagccaccaccctcaaccatgtatgtcatcagggtccactagagaaggatagaaagatggtgtcacagaagccagactgacccttccttttgtctaccccagaccttccagagtgatctccccgcgccccgagtccctgccctgtcccacattactggggcaccagcaaagccaatcagcggcacacgtccagccagtcgttgtcgggtaagggtgatggcttggaacacatagcctagctcagaggctaccacttctggatcccgtaggcgttctaggtcctgctcttctcttaatggctctgggaagctgggtcctttgccaggtaccatggtcacctccatgcccagtgcctggagggggagaaaacatctgggttcccaaaatggaatccaggaggaaaggttctgttcagctcattccaggaggaaggaaaaggagaataaaactctgccaaactccatttctttcaaccttagtttttccctcgatccagttaggataagtgcttattgtaaaccttgactggactgatagaaggattttcaaggcgtccttggattatattctaggatcaggtttgagtgggtacctggggtacaacaaggatgtcggagaaaatgatggcagcatccagagggaagcgacgcagtggctgtaggaaacaggagacaggttgctaggtggcagactgaaggcataaatctttccctcttttgtggacccctcacctgcagagtcagttcacagcaggcctcaggagagcgacacgtgctgaaaaagtcctgggcagcccgggtttccctaaactctgcatacagagggaagacagggctcagccttgaggccctccagagccctcccctgcccctcgaaaacttttctccctccggagttttatctagatttccagaccctgactcttacctggtaagtaacggcctgcctggcgcatgcaccaaacgggagtgtagtctgtttcctctccccaggctgctcgcaggaatgtgtcattcttcagctccggaaaaccctgaggtctggcgatcaggtgggggtgggggtaggtgtcagtatgctacgctggaggctggggaaagcgcgggttcataaggccgattcagtccaggaccgctatctacctcctccaggccagctcccaaaccctggctttccgcccgttccgcctcctctctgcctatcaggtggtgcacaaactccagaagggcccgccctggggcctcttccctccacttagtctctactcttccaagctcgaagcaaccagagggactggggggagggaatgaaggcccactaaggatagtttgggggtcttcgaactagtgagcctcagaaacgggaatgtcactgggctggttcaggggctgagaaatacccaggctgggggataaagagggatcagagttgatggtcccagaatagagatcctggttggaaatcctgaggcatcccttgaattaaggccctgggatgaacatctcaaaaatccatggttttaggattcaggatcccagctaacggagttcaggttgggaggtctccagggtggggaaaggggagtagagggatagagtcctgagttggaagactcaaattagaagcccggctagccacaccgcgtgctctggagaactcaccccaacccattcgcttccatggtcagctgtctgtaactgcgagctcaatccacaatttaacctgaatctgagcctgccccccagtccaggctccgcccctttctgtagggaaccaagagcgtcgccatgttgaagatcacatgatcggactccagcgacagctccagggctgccctggctgctgcccgtaggacccctaccttttttcaccgtaaagtttgctgtagcgacgcaacaacaaaggcccaaaagaaaactccgctgtaaatgtatcttacggtgacatgaggaatttgttctcatctgacagtctgggtatccggaggcttggcgcaagtcccactcatgataccaacagtcttatccagccaggtccatactatagcctggacctatagtaggtgcagaggttagctctgctcaagacagccccagcctttaaggagctacaagactggggaaacagaaatcagcaatcacattaaaatgaataatgatctccagtgtccttgggattaggagtgacaaacagaatcaaccctaatgactcaagactcctgtcagtggcaggggaaggggccattgtctcaaacactttaatcacaccacccataggatagggagtccagcagattcgctgggagtgggaggaaaaacagcaggccgaagaaccagaaaaatgactgttggcaatgacccaggctagctagaatggtgacttgaatgagggtagtagcagtagagataaaatggtagtcacaaggaaatggagagagggagattgatcaggtagcaatcaccaatcttgggtttggtcggctgggttagggtggcacagagataagtaatatggttgagtgtgggagtacacagtccaatacagtgagagctggggtgcgcttagtccagaacatacggcaaaggctggccaaaggcggggaagggcgtggtgggaagctctgtccgcggtcgcgccagctgttccccgggcagggtcgcctctaggtgctcacctccgccacttcgccatggcgggtcctggcccgggcgcggtgctggagtccccccggcagctgctgggccgcgtgcgcttcttggcagaggcagcgcggagcctccgcgccgggcggccgctgccagcagcgctggctttcgtgccgcgagaggtgctctacaagctttacaaggacccagcgggaccgtcgcgcgtgcttctgccggtgtgggaggcagagggcctggggctgcgtgtgggcgccgcaggcccagcccccggtaccggctccgggcccctccgcgccgcccgcgacagcattgagctccggcgcggcgcctgcgtgcgcaccacgggcgaggagctgtgcaatggccacgggctctgggtgaagctgacaaaggtgcgctcttccctgcccaggacccggtaaaagacccctggggccagagaaacctctggctgtttgccttttctcccctgtattgagttggcattgcgttcggcgccctttgccctgggctgggcacgacaggcggctgggcagttccctgacggctgtccccatcctacgcgtcccggcaggagcagctggcagagcacctgggcgactgcgggctgcaggaaggctggctgctggtgtgccgcccggcggagggcggagcccgcctggtacccatcgacactcccaaccacctccagcggcagcagcagctctttggcgtggattatcggccggtgctcaggtactgcacttgaaggagcggggctggctgtcagaaggccgggccaggagggcttgggaacacttcagccacagcctggggtgggtgggatactggagcggaggcagggttaagagcagaaaggggcgggacgtgaagggggctcggagggagactgggagatagagccctgaagaaggctacacggcatggaggtagtgtcttgctgaccgctgatgtctccccatcccactccctactctgtgcccacaggtgggaacaggtggtggacctgacatactcacatcgcctgggatcgagacctcagccggcagaggcatacgcagaagctgtacaaaggctactgtgagtgagctggaatggggtggggaggaaggagctctgcgtctgggcccagtctaattaggggcttg

SEQ ID NO: 2369 - DNA, 4001 bp, Homo sapiens
cactggcccagtaacatatggctgcaaactcattggcattcccaacagaagctgggttaggttagaataacaactagtgtttactgtttactatgtacataagcactaagctaagtacattacatgtaatcttatttagtactaaaaacagcaccacgagatagatagcactacttccattttatagatagagaaaccaaatcacacagtaagtgatagagtagaacctgaatccaggtctgcctgactccagaggcagtgctcttggtcattttgcattcttccaggccacccatctttcatcccagaccctacctcttcttcactcaccccttcatctctctgtgagggggcacatccgaggaactggtccttttttggaggtctttgtatctcctgattcacaggcctgagtgctaagtcctggtagaaatcatgaagtttgcaatgagtttaggaaacagaacagtatctctggttctagaacttaggttccatgaacacatagccaggaaaataacccagtcatctgcaggggacaatcagcctccaccatactgatgttgaggactggcctacagtgattgaaaaagcaaggctacaaatagtgttccccatccctccattatcactccaactcctggtggagagtggataattatactggaagacagaaacaacactttttttttttttttttttttgagacagagtctctctctgtcacccaggctggagtgcagtggcgcgatctcagctcactgcaacctctgcctcccaggttcaagtgattctcctgcctcagcctccggagtagctgggattacaggtgcacaccaccacgcctggctaatttttgtatttttagtagagacggggtttcaccatgttggcccggctggtctcgaactcctgagagcatgatctgtccacctcggcagcctcccaaagtgctgggattacaggtgtgagccactgcacctggccgaaacaacacatttctttcttttttttttttttttttctgagacagaatcttgctctgtcacccaggctggagtgcagtggcacaatctcggcttacaacctccatctcctgggttcaagtgattctcctgcctcagcctcctgaatagctgggattataggtgcccaccaccacgcccagctaatttttgtattttcagtagagatggggttttaccatattggccaggctggtctggaactcctgacctcaggtgatccgcctgcctcggcctcccaaagtgcttggattacaggcatgagccaccgcacccagccaacaacacatctctaaatggatcattaaagctattatgacctgccatgatggcagcttcatgggaatcaggaagggccatgtattggccccaccatcaaaaaatacagtgtcatggacactgatgcttcttccagtttctcagccacatgttgtccatcaagacatttctgttttcaaacctaggaagaggaaatctgaagcccactaccactggaagaatatccctgaccacaaagactagacttggcatttgggccccattctactgacaggactcttgttttggggtatccagatttatataatctgttagaaaccctaaagcccaagtggatcctcttcaagcattctctattttattcatcaagccttcctgcagaacaacactgttgctaaaatgttgctatgacaactccaaatcaactaagcctgagcaagaaggggtaaaaaaaaaaaaaacagggttctgaagaagagacaaagggggaagaatccacctacaagctctgccttaggaccctgacacccagccagagggcaggaaaaacaaagagctgggcagacatgcctccagaaagaaacagctacacagtacaaagcaataagataatcccaacacaaaaggggcaagatttttggaaattctctacccataaggtcctccaaacctttcctatccaaggaaaattttcaatggataagcctcggaaagaccgcgtccgaggaaaatgttgaaaaaggaactgaaagtgaaaccgtacagacgaagtaacgctgcaaggagatcccagtcgataaggggaagtagcactagtgttttgggaccacctacatttccatcttcaaacctgaagaggaaatgccctgcgaagcttgccgcgctgactgcaggggaaggcaatgaaatagagggcccggcacaggaggcatctctattggccacagctgtcagccggggcagtctctgaggacacccagcaacggggtcagggtacttattcaaatcttagttggacatccggaagcatttcctaggcattagggatcggtgacacggaaacagggatgggacgttgtggtgtgcacgctcaggccagaagggcccagtaagagcccttgctaagtctggacacaaagggaaaaaaaatcaactcccgaaagaagtcaggcacctagaccttgccttagaatgaggcgtctccctgcaggctcaccaaccagaaggcgcttacggagctgagcgcccgccaggcgcgagcccgggagcctgcgccgtgaccccgcagccccgcagtcttagccccgcgccccagctgctccgcggaggaggcaggaaagggcctcggggactagggagctcaagcgcccggtgccggcggctgcggcgcgcagctggacagcgcaggagggctgggacgctcgcgctctggggaagggagagagtttggcccacaaagcagggtatgagataaagaaccagcacagccccctcccccaaaacaaaggcttcctccccagcagtgttctctaacttgaaaaacggaaacaaaatcaaagctgccctgccttgccagtccacccagtttccagacttctgcccggtcctacactcaccggccaaggccgtctcagctgccgattttctccaactgtgttctccctctcccggcctaggtatctccatagacagctgctcatgcgcacttccagcccgcggccatgttggtgaggggcggaagtgtcgctctcgccccgcccataaactcaaactcagaactgccccacttccgctcactccatcttgatgagagttggtgtttgtgggttatttgtgaagccggaaagaagccgtgtcctggagaatgtagctgaaggcctggccactttcgacaagaacgggaaagagacgactaacttgtactaatatcttagtgcttggcagggcattttttcattccaggaaagaagagaatccagctgagatcaagggagggacgtccgacggaggcgccatctttaacaagggctatttgggaggccatcttggcgcagggcgtctttttgaaaggttacctgctagagattacgacctatcggggcatgcatagaattggatatgttccttgttattcgcgtcagcagtcactcatccaaagaccccaaagcttctagtgttctaaaggctcacaccttctgtgacaggaatcttgattcccattcttctcaatcaagacctaccctgaatggatttggagtagtgtggtataatgggaaaaattcaagcttgggggccaggcagatccaggtttcaaacccatctctgccacttcttacctctgagacctttggcaaacattttgacttaattgagccttagtttcctcatctataaactggagatactagcaccaaccttccagaattgtgtggattaaataaaatcaaggacatagattttgtgagcacaggatacttagtccagttcctggcacataatgaacgcattatgtaaatataagtttctcttccttatttcctgaccaccatgaacctagctctagtttctggccactagtctccatgacaacaactgaggaagagcacccaaacaagaagaagaaaaagaatgttttgccaaatatgtgaagatataatacctatcaccaaagactttaataagaataatgagactcca

SEQ ID NO: 2370 - DNA, 4001 bp, Homo sapiens
ctgtcacccaggctggagtgcagtggcacaatctcggcttacaacctccatctcctgggttcaagtgattctcctgcctcagcctcctgaatagctgggattataggtgcccaccaccacgcccagctaatttttgtattttcagtagagatggggttttaccatattggccaggctggtctggaactcctgacctcaggtgatccgcctgcctcggcctcccaaagtgcttggattacaggcatgagccaccgcacccagccaacaacacatctctaaatggatcattaaagctattatgacctgccatgatggcagcttcatgggaatcaggaagggccatgtattggccccaccatcaaaaaatacagtgtcatggacactgatgcttcttccagtttctcagccacatgttgtccatcaagacatttctgttttcaaacctaggaagaggaaatctgaagcccactaccactggaagaatatccctgaccacaaagactagacttggcatttgggccccattctactgacaggactcttgttttggggtatccagatttatataatctgttagaaaccctaaagcccaagtggatcctcttcaagcattctctattttattcatcaagccttcctgcagaacaacactgttgctaaaatgttgctatgacaactccaaatcaactaagcctgagcaagaaggggtaaaaaaaaaaaaaacagggttctgaagaagagacaaagggggaagaatccacctacaagctctgccttaggaccctgacacccagccagagggcaggaaaaacaaagagctgggcagacatgcctccagaaagaaacagctacacagtacaaagcaataagataatcccaacacaaaaggggcaagatttttggaaattctctacccataaggtcctccaaacctttcctatccaaggaaaattttcaatggataagcctcggaaagaccgcgtccgaggaaaatgttgaaaaaggaactgaaagtgaaaccgtacagacgaagtaacgctgcaaggagatcccagtcgataaggggaagtagcactagtgttttgggaccacctacatttccatcttcaaacctgaagaggaaatgccctgcgaagcttgccgcgctgactgcaggggaaggcaatgaaatagagggcccggcacaggaggcatctctattggccacagctgtcagccggggcagtctctgaggacacccagcaacggggtcagggtacttattcaaatcttagttggacatccggaagcatttcctaggcattagggatcggtgacacggaaacagggatgggacgttgtggtgtgcacgctcaggccagaagggcccagtaagagcccttgctaagtctggacacaaagggaaaaaaaatcaactcccgaaagaagtcaggcacctagaccttgccttagaatgaggcgtctccctgcaggctcaccaaccagaaggcgcttacggagctgagcgcccgccaggcgcgagcccgggagcctgcgccgtgaccccgcagccccgcagtcttagccccgcgccccagctgctccgcggaggaggcaggaaagggcctcggggactagggagctcaagcgcccggtgccggcggctgcggcgcgcagctggacagcgcaggagggctgggacgctcgcgctctggggaagggagagagtttggcccacaaagcagggtatgagataaagaaccagcacagccccctcccccaaaacaaaggcttcctccccagcagtgttctctaacttgaaaaacggaaacaaaatcaaagctgccctgccttgccagtccacccagtttccagacttctgcccggtcctacactcaccggccaaggccgtctcagctgccgattttctccaactgtgttctccctctcccggcctaggtatctccatagacagctgctcatgcgcacttccagcccgcggccatgttggtgaggggcggaagtgtcgctctcgccccgcccataaactcaaactcagaactgccccacttccgctcactccatcttgatgagagttggtgtttgtgggttatttgtgaagccggaaagaagccgtgtcctggagaatgtagctgaaggcctggccactttcgacaagaacgggaaagagacgactaacttgtactaatatcttagtgcttggcagggcattttttcattccaggaaagaagagaatccagctgagatcaagggagggacgtccgacggaggcgccatctttaacaagggctatttgggaggccatcttggcgcagggcgtctttttgaaaggttacctgctagagattacgacctatcggggcatgcatagaattggatatgttccttgttattcgcgtcagcagtcactcatccaaagaccccaaagcttctagtgttctaaaggctcacaccttctgtgacaggaatcttgattcccattcttctcaatcaagacctaccctgaatggatttggagtagtgtggtataatgggaaaaattcaagcttgggggccaggcagatccaggtttcaaacccatctctgccacttcttacctctgagacctttggcaaacattttgacttaattgagccttagtttcctcatctataaactggagatactagcaccaaccttccagaattgtgtggattaaataaaatcaaggacatagattttgtgagcacaggatacttagtccagttcctggcacataatgaacgcattatgtaaatataagtttctcttccttatttcctgaccaccatgaacctagctctagtttctggccactagtctccatgacaacaactgaggaagagcacccaaacaagaagaagaaaaagaatgttttgccaaatatgtgaagatataatacctatcaccaaagactttaataagaataatgagactccacactatgtgtaaaaatacagcttttattctgagacattgaccttcactagagtgggacctgtggccccagcctggctggagaagcagtcccagggcctgagtgacaccatttccctttcctgaaataggaacaagttattccaaaggagaaaggagagcccagagagatctgtacaggacctctcttgcacatggtgactggaggcagagggtggggagctggagaggagtccagtccctccaacaaatattgagggcttcaaagagctcttcctggacgtttctcttaatctggatttaaaagggacaggaggtatcttagggtccaagaacataacaggaatgggcaactctagaagtgtttgtgtgtggaaggccctaacctggccctgtcctccctgtctctacctttggctttcatgaagagagattcacagctcagaggaagggaggaatttctccagtcttcactttaacaaactcttttaagttttctgcctaccttatgttccctttggccaatgacccactccctgggaacaagatcttgttgactttcttgggaatctcctaagagataagtgctttgtgtcggagacaagttcaggtaaaccaaccaaggcagtgcctcccacagtcaaagagagaagctggagggccaaagcctatagagttgggcactacagctgctcatgctgcagaggagacagctagtcaggaaccctggagattcaagacaacttgctggtcccctttgcccagggctgtggtcctaatcacagtccttcacctttcccagggttagcctgtgtttcaaatgcatatgacctgcgctgagaggacaacagggggtcaggaacctggggttctctggggggcagactaagacgactccgggatccagacccttctgcaccttcagatgggagctccaggcagctaaggggccgaggagaatgggcagagatcatgctacaaggggaggttctggggatgaggcagtaatccccaccctcagtacaggtctgggttcgccgaactc

SEQ ID NO: 2371 - DNA, 4001 bp, Homo sapiens
aggatgaagaaaacagtcccaaggactgggagaactatctgcctaatgaaaatgttataccctagtaaggaaatgttgattatataaacccagttcaagattttgaaaatattaattatttgtattaattacaagtttccatgccttaaaactcactctgagtcttctttaggctttgaaggctaagaccaaaggtcgcgctaagctatagaaaataaatgattcctgcataaacacatttgcctttgataaactattttcacattttttttcatggtccatttcatccatagaagagaaaaaaattttaattggggaaacaactggaagagttagtcttcaataccatgaattctatatagccttcacttccggtttggaattcaggctgaaatgatcttcactactactggttttggggacctatgaaagcttatacctacactactacttacattacaccttgttgctcaggtttcagccatacagctaaggtaaatgatgccatcagctttggagaaggaggagaagaaaagcagctcttgtgatttccaaaaataaaacttgcagaattgctatgggcgttaggatgcagatcattcttgtctggtgtgatgcagctactgaggcctgctgagaaaagggcagtgtaggtagggtgtgaagatctgtatgggcaatcctgaatacaaaaccgctgggtacagaactgaatactttcagcagcagcagagctgtgacaaaaagtgcttcggtctgggagtccacatactgcttgggttggcacgatggaaactttcttgaaagctcccacgttctccagccttgggaaaagacctcgtgactcagtcaaggatattgaagcaaaataggcaaagatcaacatttcaatgacctgaaacaagaagccagagcccaatgaaagaactgggcaattcatgtttacaaaaaagcattctcctcctgataaagcatttctaaataaataatcaggcccacgccacttgccagcaatactttgaagcagggtactttaagtgatgttgcgatactccattttctggaaactgcagacacgttctcagagtaaggtaataccaacgacgttcttagcaatggcgaagacatgagtagctgctggtatctgggaatcaaaaacgtagggcgtcaagggaaagctgctgcacctttaaaactgaagctcatcccaggcctgaggactttgagctcctagaagcaacactactgaacttctcaaaaaacattttgaagcacagtgctcagagtaaaatactcatccttttggtaaatctcttgattgcattgggcaaatcaagcactttataagtccacaggacaaccagtaatatttataaccagttatacataaatatttatataatatatgtgtgtgttttatatatatataattattaataatatattacacatacaataattttgtgttgttacttcaccccagggaattagcaatggcattaccagctctacttaacagggaaaagaatcttgtagattttctttacacatgcactgtacattgtaacccagagctaacttacagatgcccaaaataaagctggcaaaggactttgggcctttccccttatcccagcatgtgcagcaactttaagctcagagtaaagctgattagaaacccaacaccatctgtctgtcctatgctttaatatttagcaaaatgtttctgtgtttcctcatatgactatgaatttgtaggttacacatggatccctaatactgtgcaagtaattgtattgataaataagctgagttaccatttctttattgcatttcaaccagtcccctcagtgtgacaaatggctcttcaacaggaccgctgtccctcgttgcctggcaacgctgctgtaacccctggttactcagcaaataggctgtagcagcaggaatgctggaaggaagacttgggtgcccaggtaaagtattctgcagagcaaacacttggttacctgaagctcagagcgtggtctgcttggtggccctcttggaactgagctgcccaagctttccgctggtacctcaagcagtgggagggacctggatgggatcatgcatacataattttaaagtagcagtacaccttatcctataatcccccctcttgcccctcctctttcttgctctcatgcacctcaatccatttaattccttaatcaaaatgatctaccactattaaacaccacacaaggaataatttccagtgctctttctttttgggggagaagaggatacaaaatggaattctaaacttttatatattgatgctcccaaagcttggcccattgatagaagtttcggttgactattcagttgttgctgtacctttcacccaggataacctctccataatacatgcttccttacattatgagtagcatctgatgtgatctctaaatgttgggtttggaaaatcagtgactttaattaaactaaagaagcaatgggattgctgactttttggctgcttaattggataggaacgtgtgtgtgtgtgtatatgtgcacatttgccaccaattctatagagtttcaattatatccaaaactctctctactctgccatctgggacatctcatcctagatgagaaatattctaaatcagctaatacttgtagctttccctttgtattgtaaaaatggaaaatttgtttgggaaataactggtcgattgtgattttgttctctataagttatcttttttatagaaatgtttagaaatgagagaaatgtttcatggtgtttcttgttagtaaagcagccagagaaaaaccaacattgttctttattagattcccttttatttctctcccagaagagagctggaaaccacaacccatttatatatcaattttatcaattagcattagttgcttccagaagaagcctttctcaccctttgtcaaaatacgctattacattcttaccagaaaaactttaatttaaaacaaattttagggcaaagcacaatggctcatgcttgtgcctcctagggatttgggaggccaaggtgggaggattgcttgaagccaggagttcaagaccatgctgtgcaacatagtgaaatcccacgtctccaaaaaaaaaataaaaataaaaataaaaataaaaaaatttaagccaggcatggtggcacacactcgtagtcccagctacttaggatgctgaggtgggagggttgttgagcccaggatttcgaggctgcagtaaactattatcacaccaccactgcactttaacctggatgacagagtgagaccatgtctctaaaaaaaaatttttttaaacccaaattttagtataaagtcagctaatatgtaaggacttctcagaacttgggaaactatctttgaaaataggtattatagagcacagtgaattagacaaatggattattcagacctgctacaaaacatgaagtcaacctactttcaaacaaggtattcaatggctggcttctctttatatcttgtgaatccaagaactaattctcattttttctaaacttttattttaggttcaggggtacatttggaggtttgttatataggtaaattgtgtgtcatgggggttagatgtacagattatgtcatcatccaggtaataagcacagtacctgataggtagtttttcaatcttccacctcctcccacccttcagcctcaagtaggtcctagagtctgtagagtctgttgttcccttctacgtgtccatgtctaactctaattttttactgtagtgcttcaacttatctttgtcattcctgggataaaaattcttctaccccataacaactcctgctttgtatagtaggaaatcatgactcaaatggataatctaagattagcaactctagtccacattaagaaactctgcctattatttgcaaaggcaaacaatggattcacatatccctcaacctttgcaattcagggctatcaat

SEQ ID NO: 2372 - DNA, 4001 bp, Homo sapiens
atggcaacatttgtaggagtgtaggagttaatattttctacatcaggcctatttttcaggacatgggaggaaaaattatctgactagagtattaccataaaattacttaaagcccaaaacttcagcaacgagtttcaaatttaaaatgcagagtaataaaatgaactacacaagactcactcaaatttcatccttaataagcatttcacatggctgacactgatctaggaattcatactgaactcagcacactgaaaccatttctgagacccaaatcaggaagcactggaaagctgatccatctctccattctgtctccaacttcacttactctcctgtctacctaatgcttctgaggaagcgctgtcttctgaatgataaaccaacctgcgctaagttctcagggatcgccaagcattaatgattctgataaaaggtttttctcgagagccaatttaatggatgacagaaactggatctcaaaccgacagagtaaccagactacacagaagggaagaatgattaggcaggtgaaatagcggatcgtcagcttaatcaaaaaaccaaacctcctagcccctcaaagcaaagctcacaccgagaatgtaacattttgccaggtgcagtatcttccttgctatttcttgctcctggctttccttgtaactggggggctgttacatccaaaatatttctcctgtaactaaatcaactttcgcagaaagcacgacgaatcgaccattatctgttgacagcgtgaacactcagtcccaatagttttaaattctttataagatgacacgactcgattccgatttttcaacaaaaatctacaaggacatcttcgccaaggtttaagacacgcggcgttctaaacacttcttgaaaaagtgtaagtgaaagaaaatgcgcggtaaaatttcgcaattaccgacacagggcaacctgcgtggaaacgtttctttctccccatccttcaccgctctcgggaacggaaagaaagctggaaggacgagcagcgaccaggctgcccggtcgggggaggctggcggcggcgtcctcggcccacacccccgcgccgggcgccctcgccgcggagttggcctatttacgcccagcccgcacctgccttctcgcgtcccggcggcggcaagacaggcgccacgcccgaggcacacacggctccccctggcaggtcgaccagggtgcgaggccaacacggtcccggggtctccccggcagctcctctcccgcgccggccgaacttgcccccgcgcccgggagccggcccctcctcccaggccctccttacctggtcatggcccaaagcgaagtccgcggcggtgacgccggcaagtccaacccgaatgagtgtgggtgcgacaggtgagtccctgccccgagcccgccgggtccccggccccaggaaaatctggtcggctcgccctccccgcgggggagtgaccatccgctcccaagagcgggaaccccgaccgccgctcgctcccgtcttgcaccaacaccaactacatcccgggagcggcgcccatctgcgcccgccccgggagagccaggagcgcaacaagcagcggccccgctcgccgaacgcctgaaccgctagggtctttagcactccgccaccgaggggaacttggcgcgttttcctcagtctcaggacccccgtgttttagcctccgcccgcgccagcgctgcgattgaacgtggcgtcctttgaaattgccggttccagtctccacgctgcagagacacgaaaggcaggagccgtctcgcgacggccactcgcccctggcacgcacgggctccggagccagctgggactgtagttccccaaaagcctaacgggttccacagtttcaaacaacgcaggcacagagccgggcagctcgtgcgggtcctcgctgagggcgcgcgcgaggtgctagcggcctggctggcgggctcgagcctcacaccctttttttaaccattcgtgcgcgcgagttgagggaaaagcgtacgggtcgggagacgggacagagagcagacgggatgggccaccacctcgagaaggagcccaaattcaccaatccatgatgaacaatccccaaaaccgcgcctcccaccgcccgggggaagccaatcagaagtacctagaccaaagccaattagatgggcgggagcagcaagcccatctaatagcaaaaaagaagaaaggtgggctccagccaatcattgttcgacatacggagtgttcctcaggcgcggtgcccctccttccgctctcattggcgctcgagtgcgcgctttcgctgccgactgttaaaatcttgtttggcgttttgttaatcctcgacggtgggacgccgcggagggtgcggcttccggagcgaggccctcgcggtaagccccgcctccgttcgtgcgtacgcgcccgggcggggttaccaagagagcagcttcggaaaatggctgcccggctggacgccgccgcgcttgggctttcagttcggagtcgcggccacactaggcctagggccatccaatgagacaaggcgctgccacggataacaatacatgctcaggcgaatgctgtagagctgaggcccggtcctcagcccctgctcgcctcattttcgcctgtttacctcttccctttctcggccgcaggaggaaacgaaagaacagtttcaggcccagctccggccgcgggagcttcccagggttcccgcgcgagccctcccaaagggttcaggagcggcaggcaggcctcatctggttgtgtgcttccttttgtgtttgtgtgcctgctttggtgaggtgacctcagctcaagtgctgcagttaagcaggatacgttcagcccaaatccatttaatcaagtatttttaaggtgcctactatgtgccaggcatttttcaaggcgcgagggatgtaaaggcattccctgtcataaaggagcattacattctggagagggagatacaagtgacgctaagataagtgatagatacgatagcctggaaagacctctttgagttgacatttgagcagagctgaatgaaaaagcttggaggaatctgagggaagaatggtgcgggcagagagaacagcaagttacaaacgtcctgaagcttaatgtggttggtgttttgaaaagaagcaaggaggccagggcgcttagagcgcagtcaatttgggaaataagatgggaggagatgagatgagtgagaaaggcaggaccctgggtaagccgagtaaggagatgggagtcgttagatgattctgagctggggagtggcgggattacacgttgaccttcaagagtacaagcagggtcgggcgtggtggctcacgcttgtaatcccagcacgttgggaggccaaggcgggctgatctcttgaggtcgggaattcgagaccagcctgaccaacatggagaaaccccgtccctactaaaaatacaaaattagccgggcgtggtggcgcaggcctgtaatcccagctactccggaggctgaggcaggagaatcgcttgaacccaggaggcggaggttgcggtgagccgagatcgcctcactgcactccagcctgggcaaccagagcaaaactctgtctcaaaaaaagaaaagtaccagcggaaaggtcagccaagatgctggttcaataagccaaggaataaattatggtagtctggaataagatggtgggatgttgaaaactggtagggttcaagatatattttgagcacagccaacgagctctactgatggattggctgtatgataatgtaagaaaaaacaggtcgggtagccagggccggtggaccgcttgaacccaggagttcaagatcagcctgggcaacatggcaagacccatcgctacaaaaaactccaaaaattggccgtgcgtggtggcacgtgcctgtagtcccagccactcgggaggatgagggaggaggatcccctggctgcagtgagccgagatgcaccactgcactccagc

SEQ ID NO: 2373 - DNA, 4001 bp, Homo sapiens
cgccaagcattaatgattctgataaaaggtttttctcgagagccaatttaatggatgacagaaactggatctcaaaccgacagagtaaccagactacacagaagggaagaatgattaggcaggtgaaatagcggatcgtcagcttaatcaaaaaaccaaacctcctagcccctcaaagcaaagctcacaccgagaatgtaacattttgccaggtgcagtatcttccttgctatttcttgctcctggctttccttgtaactggggggctgttacatccaaaatatttctcctgtaactaaatcaactttcgcagaaagcacgacgaatcgaccattatctgttgacagcgtgaacactcagtcccaatagttttaaattctttataagatgacacgactcgattccgatttttcaacaaaaatctacaaggacatcttcgccaaggtttaagacacgcggcgttctaaacacttcttgaaaaagtgtaagtgaaagaaaatgcgcggtaaaatttcgcaattaccgacacagggcaacctgcgtggaaacgtttctttctccccatccttcaccgctctcgggaacggaaagaaagctggaaggacgagcagcgaccaggctgcccggtcgggggaggctggcggcggcgtcctcggcccacacccccgcgccgggcgccctcgccgcggagttggcctatttacgcccagcccgcacctgccttctcgcgtcccggcggcggcaagacaggcgccacgcccgaggcacacacggctccccctggcaggtcgaccagggtgcgaggccaacacggtcccggggtctccccggcagctcctctcccgcgccggccgaacttgcccccgcgcccgggagccggcccctcctcccaggccctccttacctggtcatggcccaaagcgaagtccgcggcggtgacgccggcaagtccaacccgaatgagtgtgggtgcgacaggtgagtccctgccccgagcccgccgggtccccggccccaggaaaatctggtcggctcgccctccccgcgggggagtgaccatccgctcccaagagcgggaaccccgaccgccgctcgctcccgtcttgcaccaacaccaactacatcccgggagcggcgcccatctgcgcccgccccgggagagccaggagcgcaacaagcagcggccccgctcgccgaacgcctgaaccgctagggtctttagcactccgccaccgaggggaacttggcgcgttttcctcagtctcaggacccccgtgttttagcctccgcccgcgccagcgctgcgattgaacgtggcgtcctttgaaattgccggttccagtctccacgctgcagagacacgaaaggcaggagccgtctcgcgacggccactcgcccctggcacgcacgggctccggagccagctgggactgtagttccccaaaagcctaacgggttccacagtttcaaacaacgcaggcacagagccgggcagctcgtgcgggtcctcgctgagggcgcgcgcgaggtgctagcggcctggctggcgggctcgagcctcacaccctttttttaaccattcgtgcgcgcgagttgagggaaaagcgtacgggtcgggagacgggacagagagcagacgggatgggccaccacctcgagaaggagcccaaattcaccaatccatgatgaacaatccccaaaaccgcgcctcccaccgcccgggggaagccaatcagaagtacctagaccaaagccaattagatgggcgggagcagcaagcccatctaatagcaaaaaagaagaaaggtgggctccagccaatcattgttcgacatacggagtgttcctcaggcgcggtgcccctccttccgctctcattggcgctcgagtgcgcgctttcgctgccgactgttaaaatcttgtttggcgttttgttaatcctcgacggtgggacgccgcggagggtgcggcttccggagcgaggccctcgcggtaagccccgcctccgttcgtgcgtacgcgcccgggcggggttaccaagagagcagcttcggaaaatggctgcccggctggacgccgccgcgcttgggctttcagttcggagtcgcggccacactaggcctagggccatccaatgagacaaggcgctgccacggataacaatacatgctcaggcgaatgctgtagagctgaggcccggtcctcagcccctgctcgcctcattttcgcctgtttacctcttccctttctcggccgcaggaggaaacgaaagaacagtttcaggcccagctccggccgcgggagcttcccagggttcccgcgcgagccctcccaaagggttcaggagcggcaggcaggcctcatctggttgtgtgcttccttttgtgtttgtgtgcctgctttggtgaggtgacctcagctcaagtgctgcagttaagcaggatacgttcagcccaaatccatttaatcaagtatttttaaggtgcctactatgtgccaggcatttttcaaggcgcgagggatgtaaaggcattccctgtcataaaggagcattacattctggagagggagatacaagtgacgctaagataagtgatagatacgatagcctggaaagacctctttgagttgacatttgagcagagctgaatgaaaaagcttggaggaatctgagggaagaatggtgcgggcagagagaacagcaagttacaaacgtcctgaagcttaatgtggttggtgttttgaaaagaagcaaggaggccagggcgcttagagcgcagtcaatttgggaaataagatgggaggagatgagatgagtgagaaaggcaggaccctgggtaagccgagtaaggagatgggagtcgttagatgattctgagctggggagtggcgggattacacgttgaccttcaagagtacaagcagggtcgggcgtggtggctcacgcttgtaatcccagcacgttgggaggccaaggcgggctgatctcttgaggtcgggaattcgagaccagcctgaccaacatggagaaaccccgtccctactaaaaatacaaaattagccgggcgtggtggcgcaggcctgtaatcccagctactccggaggctgaggcaggagaatcgcttgaacccaggaggcggaggttgcggtgagccgagatcgcctcactgcactccagcctgggcaaccagagcaaaactctgtctcaaaaaaagaaaagtaccagcggaaaggtcagccaagatgctggttcaataagccaaggaataaattatggtagtctggaataagatggtgggatgttgaaaactggtagggttcaagatatattttgagcacagccaacgagctctactgatggattggctgtatgataatgtaagaaaaaacaggtcgggtagccagggccggtggaccgcttgaacccaggagttcaagatcagcctgggcaacatggcaagacccatcgctacaaaaaactccaaaaattggccgtgcgtggtggcacgtgcctgtagtcccagccactcgggaggatgagggaggaggatcccctggctgcagtgagccgagatgcaccactgcactccagcctgggcaacagtgtgaggccctgccctccaccctcccacccgaaaaaagaaaaaaaaacaaagagtaacgattttttttttaacctgagcaactcagtgttggtccttgctaaaatgggggtcttagtaggctcaatgggaaggatcatcgttcttagaatattaagattgaggtgtttaacgtacaaacagatgttgaaccagcagatcacgaaatacacaaggacaagattagaaaatgtatataggtcagtcttagccattgtgcaccacagagtggcagtgtctcattttctagtactagcataattattgctactttcaaactctacgagaacagataagcaattctactttcccatattcctgagatcctattgtctgcagccactattcttcctgtacaca

SEQ ID NO: 2374 - DNA, 4001 bp, Homo sapiens
cccctggggaccgaaatggcacaccatgctgaagagtcaccaacaacccaaaaaagggtctaggaggctcaagggtatttaagcaagggagaggcatgtccaaactgctgtaatgaagggctgagaaaggaacttcagggaaatgggggacagaaaaggcagaggatggcaggaaagcacagaggaacatgggcatgaaggccatgtgtgtggcaagtcctcaccatcttgtcatcagagtagaaaggctcagaggaccgggcggatatcatgtggaaggagccatgggaagcagggggctctgtccgtatgctgaacagggtagggggtccaggaaagccccctaggcggcggagagaagtgctacgtctcaaagtgggtggctcaggccggagggccaagcggctcagtgcagccccaagctctccggtgccacggtgccctcccaaggcaatccccattggacgcaagtccccactgctcacagacttggaacgggctaagttggtccgagatgggagaggcaaagccactgttgggggtggtgagccaggcaggggaaccccatgatctgctcgaagggggcctctgggacgagggcctgaggtccgtccccgtcccagctccagtttcttgagccgttcatcaggcagacctggccggggaggcagaggtcgtaacatggggtttggcccagaggctgggtttctgcgctccttgctgcgggccctgggggcaaatggtagcttggatcccactcggggctggatattaacaggtggctctcgggtacggcccaggcggtgctcagaggcctggggcattgtggacaccacaggctggacctgggaggagaagagagtgtcagcatttgaatatggggggaaatgggaacccaggctgctgtactgaaccctgccacactaattttcccttattgctttgccccattccatacccacaatcttgctgtcctctcatttccacattaggtggttggctcagtcatcaccactaccacatcaacgaaagtggggagcagtatacgcactgagggcaggaaccagatctatcgaatcagccatcgtatccccagtacctggcatcgtgtttggtacaaagtaaatacttagtatctattgggtaaacaaatgaatgaaagataagcagcccatggctttgaccctttctatactcccgacccctccctgcagaacacatctttactgaaaagccagtgataactcctatctcggctctaacgtaacatgggaccccatacccggctagtaaagtaggatgtgcctcgggtcacttaagaccctagccaaatggtagtgtagatgcaagaataacagcccaaaagacagccctccatcctcgaatccctgcctctctgggctgcaaatgaagcagactatatgggtgacttacgatccattccctcccccacctccgacctccgacatggtgtcgaggttcagaaagcagtagtcggggatggaggacgaacaactccttgacccttaatctctgcacttctcccaccacagcagggctttagccgggtccgcccccctcgagggcagaaaggccgagaccgctgattggctacggaatccggcggcgtattccccgcggtccagggatgctgtccctccagcccagttctcccaggccccgccgggccccacgcgcctttgtggagagtgtcctctcgggtctggagcagtcttccctctgcgcccccccacaccccgccatgccataacgccccggcccgtacctgtcccccagtgaggcggcgggagaggccagccagggccaggccccagttcagggccaccccctactacccccgtgcagcccccccgtgggcccggctgcagctttagccgcagccgttgcccagatcgctcccgccgcaggggccgccgccatctttgttggtcccgcccggccaccggccaccggcttcaccgtctctcaaagcgcctgcgcatccacacccgaactcctcccaccggtcccttggcgcttgcgtgagcccgcccccacggctccgcgatcgacaccatggaaacgcagccaagtttagggtcgctggttctcaacgctgcccagagaggtctttaatccatgactccaaagcaagtccctgaggtatagggtgccgtcgccccatcctatagcccatagggatggagatctgacagtcgtagtatggccgcgaggcttacagcacagatccttcccaaacagcaggggcgcaagtatggcaaactgcaggcctgggtccagcccgcagaccagtggagaagcatctagcacttcacagagggctgggaagatccctggagggcgggaagtgctggtccggcaaaaccacttcttgcaggctaacacggtagggcaaagcatggctcaccactaaaggacaaaggtagatctgagcagcagggggaacagtcaacatttcattcccactcctgaccagagcatcccctatttccgactctttcccaacccaacccggcgtagctgttcatgtgcctcaggtttcagcccacttgccctctgttaacagctcccaatgagaaccacaggctaccagaggaagcagcttttattgatgggttatctccagaaaccagaaagactatatgtactcactttcagttacccccgtgcctccagaatcgcatgttgctccacctgggggcggatataaattacctctagattgtccaaagcccagtctttcccttccctgtgcagccttagaaactaagtagcagtactgtttggtgtgtgtttgtttcttccccagcaatgcctactgcagctacttagtaacaactagaggtggagggtgtccggggaagcagttagatgagttaagtgtgatgcacaggaaaatagtatcgtagcctatcaaaggtccctctgccctgcctcagtggcttgattcttcattggttgcatttctctttgtgttggatgacgcccttctgaatcagatcagggatttccactgccagccatggacccagctgcaatacaaggaaaatcctgtgagattactaccagtcaatgcttcttgttccattagaagctccttcctggagacagattctgggggaacatgcttaagggacatcactgttattccttttattcttagctgcttttcttgtactgctcagggcctaagtccctctttctccttttatgccaaatacacaaaacttacccccagagccatgagatgagctagtccaaatttgggcacattcctggcccacaaaggtttgaaatgatccgtcaggcatattttgccacccctatgagagggacatgaagaaggtgttgacatgcaaagtttaccataaagcacagcagcctcttgggggcataggaagactactagtgatcagaattgagaacaagttcagctaagtactttgcttaggctcagcaaaggagggcctggcaccccactaggccagcagaccctgggaaaatctctgcctccaaagttcttcctttttttttttttccttacatcttttaagttcagaggtacacatgcaggatgtataggtttgttacataggtaaacgtgccatggtgatttacacatagatcatcccatcacccagacatcaagccaagcatccattagctattcttcctgatgctctccctcccgccacgaagttcttccttaaggctttctttgactctttgccatctcctattcagtcctacctgtacatctttgctgtctttccatccagctcaggaactgcaatttctggggcagtagtaggatatgtgataggaatctggagaaattataaaaccttaataaaacagaatcaggatagaaaggaactaatataatcagacatacatatttcttggttaaactgaaatgttaagtaaaactccccaaggagcacatccataccaggattctggatgtggagatgagtaaa

SEQ ID NO: 2375 - DNA, 4001 bp, Homo sapiens
gtctaagtgtggaagccaaagaaatcttgtgcagaaacctgttctttttaagtgccaccttcttgttcaagctacttcagcccgaggaactgttgcaaaagcatacaattaaaaggatataacactgctcaggaaaaagtgtttcaaaaggcttagcttcactaagcttaattcttcattaagaacgaaccaaattcgtatctctacctaataacgcaatcccaataatttgagatctgtgcttttctgtggtcaggccaagctgctctactggcccctgaaatgaactacccaacgaatctgaccaaaattcctgccatgagctactatgtttctgcaaagtaattattcaaaagcactgctgcttctggtcgatcttttttctttattatagaagagtccgttttcttcccccacgttccttgctcacaccccaaactaaacaggcatagtcttctccacctagacttgaggtctctgatcaaagccattagcctcaagactcctcctccacccccactgcgctcccaccctgttccgcgcccctctgcatagcaccctcagtatgactaccatctctttccccggtctaattttctctcatttctgaccttatcgatgaccagtactccctctttacccagacctggtgccagctctatcttccaattccagtccccatccctgcctagaccctcctcagctcccacccctgcccaggcctcccacctctgccctctcagtgcaatccccactgctctcatacctgattttattcaagtcctcattcctggccgcggccccttccctcttcattttaaatcctactcaatgccccccctttccgacccttggctaaaaccccaacctcactcctaaccccaacagttttcctgtgatcctgtcaaagaccactactctggccggcccacaccgctttttctgactctgagcctggtgcctccgccaatccttcactgaaacctcgtgccacaaaatctccgacctagcctagtgcactagtaccccatttccgaccccctactgcacgcatccttcccactatatgctcaagtgtctgtcctcccatctcggatgatagccctggagcctcctccccatcgtcggcgtgcatagccggaagcctaagggacccctcctcaccccaacccacagctccgctgcgcatccctaattccctttcacacgcctctcctatgggtccctctccccacttacccccaatcaagtgacttcggttcccaactggagcctggggcttctctctctctctccgccccgcccccactaaagccccagtcgaatgccctctctccccacaccaagcccagcggggtgtgtcccctcccaggaactccagcccagtggcttcccacagaggtctggggttgcccctcctcacctccgcgtccaccacctcgtggtaggcgggcggggggtcgaagccgcccccgcctccggtgctcccgccgcgggaggggccgccgccgccgccgtcacctccgccgtcgccccgcgggcccccgccgggcccggggctggggccaccgccgctgtccatgggctcgtagccgccgtagtcgaggcccggccgctcgttggtgagcagtgccacggcctcgttaatgtcgttcttggccaggcgcagggccttgcggatggtggcggggtctgagaagcccatgcacagcagcgtggtcatgtgctgctcctcctccgattccatggcttgggcctcctggccgccccggccagcgcacggcgaagctacgggtcccgggcctggcgggccgcgcggcgcaccctccgcgccgcctccgcgcccaggttggcccctgcgttcctgccccgggtgctccgcagcagccgggccaggctgggtgcgggcttgggtcctgcgagccgagctagtgcggtgaggcgctcaggcgcggctgcggcccggcccagccctgcgcgccgccatgttggcctcctccccctccgcctcctcctccccgggcggcggggccgcgcctcggctcccggaagcggcacgggaggcgaccgtgctcgccgttggcaggctagggttggcggcggcgtattctgtttgttttaaacgaaggagcggagggaggggccgcgccgcggagcgtgcctaaggtgaaagggctgccgtgcagccaggcagaggcgaggaaggcttctccatcgtcgccaccgcccgcctgtttcgccggcaacaggttcccccgggacgggaggggccgcagcgccgcgcagctcgcagcgctgaacgtcgcggaaatcccttggccggccgagcctccgcagccgcgacccggcttctctccgtccgagtcccccgagcctctccgaacccccgttggacttcccctccctggccggcgccgcccgacccgctcccccatcctagagggaattccctgcgccgcggctgtgaggcacctccaccccggcctgaaatgcaccgcagtcctgaaggaaatccaccctcatcccacgcagattcacccgcaacgctgcctgaatacgcctcgctgcccacagaaattcctgcccaaaccagacgcgtggaccacccaagacgaaattcacactcgaccctagccccgccagcccttgccgaaatcaccctaaacccgttgaaattaattcccagctgtccgaattttccttccaacattaactgactacctgtctccgccaagctgactgaactctaccgaactcttaccctgaaagcccctgagagtccaaaatatatttttccagcccgaaatctaaatcccagttctctgtatgaaaacctccagaaacccagactcttacttccttcggccacggactcgttcgaacatcgtggacatcaccttcccacatttttaccgcagtctttggctccgattctttgtccctgcctcttgggcagcatcctatccctgtttctttccacctttgaggattcctctacctctttaaaggcctgctttctttgctttctcttctcacctttggcattggcacactggggtcatatctttagttcccttgactccaccatctaagccaagggtgtccaatcttttggcttccctgggctacattggaaggagaaaaattgtcttggaccacatataaaatattctaacgctaatggtagctgatgaaacttttaaaaaatctcatcatgttttaagaagtttacgaatttgtgctgagccgcattcaaagccgtcctgggcctaagtccttgctatttttcctcttcaatttccttcaatccatagttctctaggttattttcccaccctttcccaagattcggatatcccttcattcttgctgagttcatctcctatgcctattcctacatacttgctgagttcatcttctaatgtcctcatcctggtttcttcctgaacctgaaatccagctaaccttactttttcatcccatcaaacccctgctgttgccagcccagcactcacgaagatctttacatacaccaaatattaaattagggccggtacctagacattgtctctgcactctgctggcatattttcccctggaccacgaacccttcgtacctagtaacttgccacctgtgtttataaataccagcaatttgatttacagggtgaatttgtcactattgtttacttttaaatgaagttactgtatttgttgtttccattaaaggcgacattataaagcctaggcctcatatccaaagcaaataaagtctcaattttttaattaaaagtaacaaaaggaaacctcacacttctgaacaacaatgacaagaaggaatgcctataattggtttgggtcacaatgtacatattgaaataaaatttttattaagtatcaacttccaggtacacaatgaagttttaaatgtttatctgtgacatatgaagaacaaagcaatctaaactgatgtaagcaggctgtcataaggtacatgctga

SEQ ID NO: 2376 - DNA, 4001 bp, Homo sapiens
gtgtaagtgaaaggtcacagaaaattctaatactactacataaatgtaagaattatcatctcaattctgaatttcaaatatttaaaatcacctatttactacaatctaatgtcattaaactgcagttatataaaaagacttgcttactgttaagttataaaaagttcagaaaagacagaaaaaaagtgaaactggccataaaccagatcataaataggaagcaatcttaagtagactatccctcttgcacatatcaggtcaaatattttattccaataatattttttgtactgtcctttttttttttttttttttttttgagacagagtctcgctctgctgcccaggctggagtgcagtggcatgatctcggctcattgcaagctctgcctcccggattcacgccattctcctgcctcagcctcccaagtagctgggactacaggcacctgccaccatgcccggctaattttttgtaatttttagtacagacggggtttcaccgtattacccaggatggtctcgatctcctgacctcgtgatcgtcggcctcccagagtgctgggattacaggcgtgagccaccgtgcccagccctgacctttctttcaatcctgccaaagtaatgaaataatacaaagctcctagcattgtgtaactatttctattattttttcataaaactagcattgtctttaagattcctattttctctcttatttataatagtatgaattcactaacaatatttgtattatgctcaaatcaaatagcctatgacgataatgtgacttggtcagacctttccaaataagacagtaggaaaaacggaactaggacggccttgttactttttgtaacacgtttttcttaaaggaaaaataatctgattaaacttaaaaattctctacatccacatagttattaagcaaaaggcctagagatcgttacggtaaaattcaccttcaatttaagtctatgctcctgccagaatttcaccctctggctcaattttccaggcctaatactgattctatgagaatgtaaactccaacggtacttgagtgcaaaacacccaggaaaatctcatcgtccaagagctcaacgtaaaaccctgtaaatattcaaatgaagagcgttttgtatacgagaaatataagtaaaggtctgggaaaccacacactatggatctttcatccaaacaaaggctgcagatggacagaaggtaaggggtaacctctcagtcaagatcaaacattggtcgaagaaaaattccagggacgatgacacctcggtttttccgttcacaacaacaaacaacggggccggccccctcaacagcgccgaaaagcgaaaccagaacccaggagccggcgcgctgcagggctttcagtcacccactgagagggactggcaagcctgagtggggagaccgaggaagggagcagagcccccgcttctcgggctcacctgcacctcccgcttccagggaagaacccctgaggacccttcctcaaatcaacgaccggttcccatcctccaccgaccgttgacagggcgaccactagattatctctgcaacgcagagcaccgaggggccaaggccttcttcccgcccgcgaacccgccgccacccaggaccaagaaaaagaggctgctgcagcggccgcaaccccagcgcgcggaagcgagaacagagaccggaccccggacgcgagcgaaacgcccttgggccccgcgcccctcccagcagcgccgcgctcacctccacggcctggcccgcgggacccgccagctcgaccaacaacggcctgcagccgcacctccgcaagctcctcttttccttctcagctctcggagaggggcagtgtcgcgtcaggagggccggaaaacggccccgcagcgctgccctcggggggtccgcctcctgaactggccacttcccgcagcagccgcggctccttccggtgtctccggggccgccgcaggcgtctccggcgataggggaggtgggggcggagcctcgatgggagcccgccccaggggcggggccacgggagccaggcccaggtgcggggacccaggccggctccctactctgactgcaaactaactgtacagggtatgtgcagcagtttgaggctgtgagctttttttttttcgtttttcacatgttttctccttctctttcacagtcacacactacgaccattataaggtcttgtctcgatgcattacaaaaactgcattaaggctggccactgaagggcctcaggtttccaaacttgagcaaagaaatattagacttaacttatcccaattcaacattgtatttcctcctttcatctttcttcccccaacttcttaggacctagattctctgaaagcaattatgtttcccttttccacctatgcaaagaagaaatttatctcaccattttctccttaggctaaaatcaagaggatcaaatcaaatatttattgaaaccttagtatctgcttaatgcctggagcatggaaggagtcctgccttctaattatgtaactgttaaaatgcactcgattgaggttcaaatctatgaataaaaaaggttatattaataaaaaattgttaaaattgccagtttcaatctgtctcatgacatctgactttttggtctccaaaatgggagcatgtaccaaagtatcatgcaagatgctcagtctccattggaataggtagaaaatataaaagcttctacttatttttatggtaaaaatgaaataaattaaccatgatacaaaattctaggtagggattgacactcaggcctcaatttgcaccacaaatgattgcctatcctcggttcactgaggagaatagaaatttcacagaatagaagtttcacaggcaggcgccatggttcatgcctgtaatcccagcactttgggaggccgaggcgggtgaatcacttgagttcgagactagcctgggcaacatggcgaaaccccatttctactaaaaatacaaaaattcgccaggcatggtgacaggcacctgtagtcccagctactcaagaggctaagagtggaggatcacttgagaccaggagtttgaggttgcagtgagccatgattgtgccactgcacttcagcctgggtgacaaagtgagatattctctgggaaaaaaaaaaaaagatgccgttaggagatgaaaagttgtctccagccgggcacagagcctcacacctgtaatcccagcattttgggaggccaaggcgggtggattacctgaggtcaggagttcaagaccagcctgaccaacatggtgaaacccccatctctacgaaaaatacaaaaattagccaggtgtggtggcgcgtgcctgtaatcccagccactcaggaggctgaggcaggagaattacttgaacccaggaggcagaggttgcagtgagccaagatagagccactgaactccagcctgggcaacagaggaggaccctgtctcaaaaaaaaaaaaaaaaaaaaaaaaagctgtccacagaggagatctacagaagaaaaaaaaagaagagagacagagagagaagaaaagttaggccagcaaatagaatttatttgaaatacatataattgaaaaggggctcaactccatatgtatttccagaaatcaatttttaaaaaaacaggcgaccaaatagaaaaatagacaaaagtcacttccccagaaattcttctattgaaaatgtatcaggggtattctgttcttacagtgtcctagcaaattcaattcagcctccaagtcccaccaccatcctgcttagtaaccaaggttctctctgggcttacctgtcctggaggagttctagggcagtgtcaatgcaaggaagacaactgacaaggctgttcaagatcaccaggtgcggtggctcatgcctgtaatcccagcactttgggaggcccagcagggcagatcacctgagatcgggagtttgagactagtgcgtagataatagtaggc

SEQ ID NO: 2377 - DNA, 4001 bp, Homo sapiens
attatctgaggtcaggagttcgagaccagcctgaccaacatggagaaaccctgtctctactaaaaatacaaaaaataaaaataataaaaaaaaattagccgggcatgatggtgcatgcctgtaatcccagctattcaggaggctgaggcaggagaatcgcttgaaccaaggaggcagaggttgcagtgagccgagatcacgccattgcactctagcctgggcaataagagcgaaacaccgtctcaataaataaataaatatcagaaattggcccagcatggtggctcacgcctgtaatcccagaagaggtgggcagatcgcttgagcccagagctcgagaccagcctggccaacatggcgaaaacccgtctccactaaaaatacaaaactgagtcgggcgtggtggcccgtgcctctaatcccagctactccggaggccgaggtgggaggatcgcttgagcctgggaaacggaggttgcagtgagccgagctcgtgacactgcactccagcctgtgtgacagagtgagaccctgtctcaaaaaccaccagaactattagtagtttacattatttggttagtctggaaactaattacgttgagaaactgactgaagcttgattatttctattatacacagacttcaaacattccagaacttactgttaaagtcagatttaccctccttgtgagacagacgcccagagcttggacttattcgtttgctttatagaaactccctaacttatttcacttctcatactagactttaagctccaaagccagagaccatgacttccattccttccggatcccccagcggaatgtaaaaactccagaaagcatttcctaaatgcctgccgaaagacggctactgagcatgcccggcttggccaagtcaatttcaacaacattctgaaacaaaaactatagttcccgcgttacaaggtggaaaaaagggaataaacgggagcaaagcctaaggattcaatctatatgagggggttaaggaaaggtaaagttcaagggcggcgcagacgtgaaggacagcactatcacagcttaaacttggtactcggtaaactggtgtcgaaccagaacgaccaaagaaaggcttaaaaaaaatactagattaacgagtgagggaaggccaacgggggtgcagggtatcgatgacgtaggctgaccacagttttttctaaagctgccctctacaaaaataatactaagatgatcaggccttcggtgtcaacaccaacaagatacactgtgatgaagctcacttccaaaaagttcctttttacaaacgaaagagccgtgctgtggccaagataccccaaccatcaacgcttgctaagctctcagctcctgccttcatctccaccgccatcttctggatgggaacccaaaccttcctaaagtgctttggccagcatcacctccgcgcacagcccgggaagcctgcgtttcccaggtcgcgcagacggcgcaaagggggaaactccacctcgctcggctccgcgcctcccaaatgcacgcaaagggctgccgtcttcctttcccctaccccgcccgggctttccaaggtccggcgcgaggagcccgcgaggcgcggtgcgcgggcctcacctgcacacgccgcgaatgcagggctccagccagatgcggtaagcggtctcgatgtgctcctgcgacacctcctcgggccgcaccgtctccgcccagcgccaggccgccttctccagctgcagccgcggggccatggccttggccccaggaacgcctcccgagccagaccgccgcagccgccgccgcggtctgcaccgccgccccaatgggcttcgccacctgccagcaaggaggacctggcgctccttcaggcagctggccagtcaatcacctgtgcgcgccactgccgccgcgcccgcccgcgcccgacccgcacgaccggccgcaaagcgccgccgtcgacacccgacacaccccgcgcccgcggacgttaaaggtggactccccgccgcgctgagcgcatgcgcgttcccagcagcctctgcgcctcccgcgcccctaacccgacgggctgaggtagaggaagcgtacgtccgaggcggtcttgccacgtcctcactggcacttctggaaaagcagcgtctcagcccccgttcagggcggcgcactacgtaccactactctaacaaaccagtgcctcgaaagctatttcttgcctccggtacttcccttttaaccatgaagttttcacgctagaggctactcaacgcacacacaggcccgcccagactgtggagcgggacctgtttagagtagaaaccgagtcgccaaagaaaccagtgttggctctttagagggagatttaacttgagcctagaccggttccgaacccctttcccgagccctcctgacgtcatgggaccttccggccttttcccgtgctagggtgggactacgtgtcccggcatgccctgcgtcctgccactgactgtgaggcatgctgggatttgtagtcttcgaggtgggagtgctcagtgcgccgcagactgtgcgggcgggggtccgaggtgccagggtggagtttctctggtgcgcaaggtcatgtttgctgttggctcccttctcaagactgttacctctatgccaggattttctagttcctctctagctcctggtttaaaacatttcctttctgcgactcctgccccaggacataaagagtagctttatgagaattgttttgcaaactgtaaagaactctactaaagtgaggatatttaagaattttgaatttgaattagagctctgccagaatctaagcgctaacttctgactcagctgcttgcctgctggaaaaccttaggctgaattctttagataaacattcactgggccgagcaccgtggctcaaggatccaatcccagcactttgggaggccgaggtgggcggatcacctgaggtcaggagttcgaggccagcctgaccaaaatggagaaaccccgtctctactaaaaatacaaaattagcaaggcgcggtcgcgcatgcctgtaatcccagctagtcgggaggcagaggcaggagaatcgcttgaacccgggaggcggaggttgtggttagccgagataacgccattgcactccagcctgggcaacaagagtaaaactccgtctcaaaaaaaacaaaaaaattcgctgaaggcagaagaaagtaagatgtggtccctgcccttggaagtgggttagggagtgagcggtagaaatacaaagatccccatcccagtcttgggaggcttcggggtacttgagaaaaggcttcccagaagtaattccgaagcccgcttttaacgggtgagttggacttatccaggatagaagaaagacaccattccagaaaaaaagaaaccacaaggagcaaaggcacagaagagaaaagcttggcgtgagagggccacaatttctgagacagggacaggtgagagttatggcttgaaaggaagaccttgccgccgggcgcggtggctcacgcctgtaatcccagcactttgggaggccaaggcgggcggatcacgagatcaggagatcgagaccatcctggctaacacggtgaaaccccctctctactaaaaatacaaaaaaaatagccgggcgtagtggcgggcgcctgtagtcccagctactctggaggctgaggcaggagaagggcgggaacccaggaggcggagcttacagtgagcggagatcgcgccactgccctccggcctgggcgactgagcgagactctgtctccaaaaaaaaaacaaaaacaaaacaaaacaacaataacaacaacaataaaacaacaataacaacaaaaaaaaaaacaaaaaaaggaagacctttattcaaagtacccactgaagatatacagctgttgagtgctataatggagatttgcattttgtatagtgaggcagagaagacttttttttttcctgagacggagttttgctctt

SEQ ID NO: 2378 - DNA, 4001 bp, Homo sapiens
gtgagccgtgattgccccactcactccagccttggcaacagagggagacactatctcaaaaacataagtaaaataataccaaacctcccctaataattttaactttaattacagcaaagggaggttaacagagtagagaaagcaagctaaagggtcaaaaaagcaacaacatgaggtgaggcagaaatcttgaaatctctcatgtccacctgaatgtacaatcgcattacaaaaggaaacctggtattgtatctgaaatagtttacgtaataacacatacaccctccatacaaaatatcttcagtagctcccctgctgccctactgaaggatctgcaggataaagtccaaactacccaaatatggaacgtttgtgtcaacggtttacccaccttttcaggatggtcttcttctcacctcttctacacaggccatctgttcctactcagccatggccatgccatgtccacagccagctctgaaagccctctgtcttctctgctaatccaattccactacttacaactgtgactttggatatactattcaatctctttaagcaccagattcctcatttgtaaaatgaggaatgagggtaacatccacttcagagggatgttgtaggattacatgagacaattgtaaaaacatgcagggctgtgcctagcatatagtaagtgctcaaaaggtgatagttttggccgggtgcaggggctcacgcctgtaatcccagcactttgggaggccaaggcgggtggatcaccagaggtcaggagttcgagaccagcctggccaatctgacaaaaccccgtctctactaaaaatacaaaaattagcagggcatggtagtgtgcacctgcagtcccagctactcgagaggctgaggcaggagaaccgcttgaacctgggaggcggaggttgtagtgaggcgagatcgtgccactgcactccaacctgggcaacagagtgagactccatctcaaaaaaaaaaagtttgatatatgctattaagcaggaagactgaactgtagttaagaggccttagttctatcccatcagtcagctgcacaactctttcccctgtcttcctcatctgtaaaactaagttggagcacatatgtatgtctaagggcctttctgaatcagatattaagcacgggattcctgacagtgtatcaactgattctgcatataagcttatttctactcaacctccctacacagacacacccaccatagaaatcctagaactgtttactctgcctgaatctggtgtttgtaactggacaagtcaccactctggacctcagtttcctcatctgtataatgggaatggaaaaggccaacattaaggggtaaggcttaaacaaaaagcacatatggcagatcttcatgaaccacaagcccagcgtgatgatgataccacattagtaaccacagtctcttcggtcagggcccccatatgcagcaggcggagctgcccattagacgtgggatccaatttcagcccagcagttgttgcctacatgagctctgacctcaactcctcagaagagaccaggcacttgacagacatcttactcaatcaccacactgaaatcttccagagcaggttttatatccccaaggaaaggggggcacccctgcttttcctagaacggaaacgacaaatcccctccactcgttcccacgaagctccgccccagccacgccagcgtcattaacatacatttacgtgcatttatatactatacagtttggacccggatcccacggtggcgacagggttggggcaagggtaacacatggcgacaaaggccagcacttgtggggcctgtatggtcctacctggcttcgctctctgtgttcccgctgccgggacttagccgccttccgaaaagccgccgccatgtctgtacagccttggaaaagatcagtggagaacgccggatccgcactgcctctgccgccaagtccactgattcctaccggaaataggcctagccgccggcggtttagaaccgcctacttcctctaagcaacctatccggagccggctttcaggaagtacgtcatttaacagaggcagtcaccgcaggctgcttctgggaagtgtagtttcccagatatagtctcgtgactctataagagccagttcttattcgctagcgcctgtccacgctacccagatctcgccttcgcgcttggcccgcgtgggcacctgggaacacgtggctggcactggcctccgtctgagctgggcttagcgtgtgcgcatgtgcagtcacttacagctcggcacgggttgctgtatctagaaggtatgtttaaagctagagcagtacggatttaacagttttggggctggctgggcgcggtggctcacgcctgtaatcccagcactttgggaggccaaggcaggcggatcacgaggtcaggagcctgcccaacatggtgaaaccccgtctctacttaaaaaaaatacaaaaattagctgtgcttggtggtgcgcgcctgtaatcccagctactcgggaggctgaggcaggagaatcacttgaacctgggaggcagaggttgcagtgagtcgagatggcgccattgcactccagcctgggcaatagagtgagactccgtctcaaaaaaaaaaaaaaaaaaaaaaaaaacactgttggggctcaggactcaccactccaaaatatgactgtgggaggccagaatatgccaccccaaaatatatatttctctggcttgtttcttaaagctggttatgctgagaaactgcagatacaggagttgctctgaaaagctgtccttccttttgtagaaataaatttatcacctacaaaggaaatctacatttttagtgaggtatctgtgtcaagaagagggctgacaactattacttcctgagagattttatctccataacaggacatttcctcctctcaccttcccataatatgtgttgccaccagcccccagaggccccatgccactattcttttctgtaacttgggacactatataaacttcattcatctgacctgtccattttttgctcctctacaacagtgtacaggaaaaaatattctatagagagacaagagaccttaaaaccataactggctctgccattcacttacaggctgtgtgacttttggcaggtttcttgactttaatgagcatcatttttctcaagcataaaatgaggataataataacatacacttcttgcctcatattgctgtcaagagctcacagttgaactgaggagtcatatctgtaaagagcatagaaggaaatcacccaatgacaatagctataaagttctgagtccctcacatccctaagggaatggctggttgacgatatgcgaatcagaggcagtacaaggtaatgacccatgaggtgtgttctgatgccaccccagtcaaggtaaagttagattcactgagcctccatctccccatctgtaaaactgaggtaataataatactatacccacaggactgttttgatgattaaacgaaatatgttggttttttgttttttgtttttttttttgagacagagtctcgctctgttgcccaggctggagtgtagtggcatcatctcggctcactgcaagctccgcctcccggattcacaccattctcctgcctcagcctgctgactagctgggagtacaggtgcccaccaccacgccaggctaattttttgtatttttagtagagatggggtttcaccgtgttagccaggatggtctcaatctcctgacctcgtgatccgcctgcctcagcctcccaaagtgctgggattacaggcgtaagccaccgcacccggccaaaacgaactatgtttaaagtgcttaatgctgtttttattccttagcaagttcacaataaaatggagttactattgttatttttattattactaaacctgcttctaagtttagagagaggattgggcacagtagagcattccagaggtatttggt

SEQ ID NO: 2379 - DNA, 4001 bp, Homo sapiens
gttcatgacgtgtcatcagtggtattctagaagaggtggaaatgctaccagcccgtgtgccagccagcagaatgggaagccgggagacgtggatctgacacccgcgtgatgagccaagcccctcggctgcctcgaacaagagctgagggataagccacagcctttctcaaaaccattttggttcaaaaagtctgactctccctcatttctgcttatctactgctgcctactgcctttttgcttttagatatttgggtggtgacattggagaggaaaaagaaagatcgtttacaatcttcctataaagccagtaggatggtatcacctcttcttttactgaacttcaagatttcaatacaattattatacttagaattggcttcaaaatcatctgtaaggaacttgattgtggcatttcctatgtgaaatgtggtcgaccagatggcatatagaatgcatggtaagtgcgcttaaggtgtgtggaaagggcacaccggagtgtgaggcgtggtaagtgcagacctgctgctgtgttgcgattcgaggctgtgggagtcagggtgggaggccatgtgtgggaccagcgtgccacaggcttacaaatagctgcaaccttgattggaggacagtgagcagatcatcataaaggcatcagagcacattcacagcacttctaaagactgttaatgaaaatctataaaatttcatcatctgtaaatgctgataggaaagcacatttctggagaaataaatgagaacaaattctgcgataagctgccacttgtttcgaatttgtgtgagatgctacactcatttcatctatgtttcttaaattacttgtaaaattttttaagatgacagtagtagctgagtattttcacttatttcatcttgagatgtgtgctgtttctttgtaaatagcagagattcagtaaagttaatgccagtgtttaactattagtaggacagccaatgatcatctcggtgactcgggaagttggttggcagtgcctgatgacagtgcttgacgatcatcagaaagctgcttgggatgaacttttagagacgagaaactataaaatccttggcttaaaagagggtttgtttgttttttttctttatttaaaaaaagcctatttaaaaagtactcaagattaaagataagattaaatctagttaagtttttgatggaacctaatccccaagcattagctttctcatttctctaactaaatggaaagataatggcaaaatgagaaactacttgactgatgtgtatttctttaactcaacttagacttaaactgaattaacataaatcaaaaggaaacgatcaatatacttggaagtctatgaactccctagttccctagtttgtcatttactaaaaaatttttagtaaacatttttgtttcgtagaacacatatcagatgatttttttaaacaaaaggtgaaacaaataaatccattaataatctataattagaacaaccagtgctacattcaaccagttcatttaaagtaaaaactaaaagtaatgatgttttaaatttcatgcaatttttaaaattggaaaaatgtatatattacccaaaacaagagtacagaggtaacatgaaacaagcaattatcctcttctccttttacattgtagagacagaaaaaaaactgtatccattactacatctaaaatgtgcagtaaggatcctttaatattcttttcaaagctgggactattgagagaacaagactccagactccttcgagcaggaatcccattcttatctctaacattgaatttaagactagtaaaggctctttcaagactaacataaggggaaaaaaaaaatcttacctgagagttgaaaggatatttccctggagtcaaggagaggaagagataagagaggatttaagaatcctatgaaaagcaaacagcaggaggccagcttatacatgatcgccacaagatagacggcttccttcttggcttctgttgtagagaactttcaactgtctcctcattctgcctgctcactgattatatatatcatcctatgacctgacatcatcctctccaaaaaaaaaaaaaaaatgaatttattggctatggaggctaaaaggcaatcactttgcattgatgtaatttttcaaggtaacaagtcatagacaataaattaactgtcttgttgcctagtgtacaaagtaggtattatataaagaacagtgagtttataaatctggcaaaagaggcaacttacagcaataaatcatgaattaaaggaaggcttggatatgagttgaagtggccaaagcaaagagacgtggatttatgagtccgagcagaagtgacgcagagcataagatgaaatacgttggtttccattttttaatctttcatgagtgagtagatgagttgccatgctgtgtttagggctgccatccctgaagaatgacaatctgtggattaaaacgtaaaaccagctatttcctttaaaacagtgaaaagttaaaatacatagcaaacattgctccaggctcaagacaattctgtacatacacgtggcctcatgtgaagccgcaagcacttcaatcttcagagaaaggaaataacttcataaagttgattattattcagcaaggagggaggaaggacttaacaccagaaaactcgctgataaacatttccagaatgtggcctctactcccaactgtactctgcccaagctggtccaagcccggatgggtggaaaggtccccgacaggcgtcctgaagtctgccttcgggcctgccacaggctcagcacagcagagtgatgccagaagcatctgcataagtcagatcatggtagttctttgctcaaaactttctgtggacctaaacacaaaagttacaaagataggccaggcacggtggctcatgcctgtaatttcagcactttgagaggccgaggcaggaggatcacttgagtttaggatttcaagaccagcctgggcaacatagagaaacactgtctcggccgggtgcagtggctcacgcctgtaatcccagcactttgggaggctgaggcggatggatcacgaggtcaggagtttgagaccagcctgaccaacatggtgaaaccccgtctctactaaaaatacaaaaattagccaggcatggtggcacgtgcctgtaatcccagctactcaggaggctgaggcaggagaattgcttgaatccaggaggcggagggtgcagtgagccaagattgcgccacagcagtccagcctgggtgacagagcgagactctgtctaaaaaaaaaaaaaaagagaaggagaaacactgtctctaccaaaaatacaacaattaaccaggtgtggtggtgcatgcctgtatcacttgagcctgggaagttgaggctgcagtgagccaagatcgtcccactgcactccagcctgggtgacagagcgagaccatgtctcaaaaaaaaaaaaaaaaagaagaaagaaaagtggttacaacgtaatgatagaactactaggggaaaaaacatgaacaccttcacaacctcaggttaggcaaatatttcttagacaagacacaaatcacacaggaaaaaaattgagacaggaggaataagttcaagagatctatgtacctcagggtgactctgattaataacaatgtatagttgaagatttctaaaaatcgattttgtgttctcatcacaaaaaaatgctaaaaacgtgaagtaatacacatgcgaattagcttgattcagccattccacaatgtatgcatatatcaaaacatcaaactaataacaataataataataataataatcatggccaggcacagtggctcacacctgtaatcccagcactttgggaggccgaggcaggtggatcacctgaggtcaggagctcaagaccagcctggccaatgtggtgaaaccctgtctccactaaaaatacaaaaattagctgggcgtggtggcaggtgcctgtagtccc

SEQ ID NO: 2380 - DNA, 4001 bp, Homo sapiens
tatagaatgcatggtaagtgcgcttaaggtgtgtggaaagggcacaccggagtgtgaggcgtggtaagtgcagacctgctgctgtgttgcgattcgaggctgtgggagtcagggtgggaggccatgtgtgggaccagcgtgccacaggcttacaaatagctgcaaccttgattggaggacagtgagcagatcatcataaaggcatcagagcacattcacagcacttctaaagactgttaatgaaaatctataaaatttcatcatctgtaaatgctgataggaaagcacatttctggagaaataaatgagaacaaattctgcgataagctgccacttgtttcgaatttgtgtgagatgctacactcatttcatctatgtttcttaaattacttgtaaaattttttaagatgacagtagtagctgagtattttcacttatttcatcttgagatgtgtgctgtttctttgtaaatagcagagattcagtaaagttaatgccagtgtttaactattagtaggacagccaatgatcatctcggtgactcgggaagttggttggcagtgcctgatgacagtgcttgacgatcatcagaaagctgcttgggatgaacttttagagacgagaaactataaaatccttggcttaaaagagggtttgtttgttttttttctttatttaaaaaaagcctatttaaaaagtactcaagattaaagataagattaaatctagttaagtttttgatggaacctaatccccaagcattagctttctcatttctctaactaaatggaaagataatggcaaaatgagaaactacttgactgatgtgtatttctttaactcaacttagacttaaactgaattaacataaatcaaaaggaaacgatcaatatacttggaagtctatgaactccctagttccctagtttgtcatttactaaaaaatttttagtaaacatttttgtttcgtagaacacatatcagatgatttttttaaacaaaaggtgaaacaaataaatccattaataatctataattagaacaaccagtgctacattcaaccagttcatttaaagtaaaaactaaaagtaatgatgttttaaatttcatgcaatttttaaaattggaaaaatgtatatattacccaaaacaagagtacagaggtaacatgaaacaagcaattatcctcttctccttttacattgtagagacagaaaaaaaactgtatccattactacatctaaaatgtgcagtaaggatcctttaatattcttttcaaagctgggactattgagagaacaagactccagactccttcgagcaggaatcccattcttatctctaacattgaatttaagactagtaaaggctctttcaagactaacataaggggaaaaaaaaaatcttacctgagagttgaaaggatatttccctggagtcaaggagaggaagagataagagaggatttaagaatcctatgaaaagcaaacagcaggaggccagcttatacatgatcgccacaagatagacggcttccttcttggcttctgttgtagagaactttcaactgtctcctcattctgcctgctcactgattatatatatcatcctatgacctgacatcatcctctccaaaaaaaaaaaaaaaatgaatttattggctatggaggctaaaaggcaatcactttgcattgatgtaatttttcaaggtaacaagtcatagacaataaattaactgtcttgttgcctagtgtacaaagtaggtattatataaagaacagtgagtttataaatctggcaaaagaggcaacttacagcaataaatcatgaattaaaggaaggcttggatatgagttgaagtggccaaagcaaagagacgtggatttatgagtccgagcagaagtgacgcagagcataagatgaaatacgttggtttccattttttaatctttcatgagtgagtagatgagttgccatgctgtgtttagggctgccatccctgaagaatgacaatctgtggattaaaacgtaaaaccagctatttcctttaaaacagtgaaaagttaaaatacatagcaaacattgctccaggctcaagacaattctgtacatacacgtggcctcatgtgaagccgcaagcacttcaatcttcagagaaaggaaataacttcataaagttgattattattcagcaaggagggaggaaggacttaacaccagaaaactcgctgataaacatttccagaatgtggcctctactcccaactgtactctgcccaagctggtccaagcccggatgggtggaaaggtccccgacaggcgtcctgaagtctgccttcgggcctgccacaggctcagcacagcagagtgatgccagaagcatctgcataagtcagatcatggtagttctttgctcaaaactttctgtggacctaaacacaaaagttacaaagataggccaggcacggtggctcatgcctgtaatttcagcactttgagaggccgaggcaggaggatcacttgagtttaggatttcaagaccagcctgggcaacatagagaaacactgtctcggccgggtgcagtggctcacgcctgtaatcccagcactttgggaggctgaggcggatggatcacgaggtcaggagtttgagaccagcctgaccaacatggtgaaaccccgtctctactaaaaatacaaaaattagccaggcatggtggcacgtgcctgtaatcccagctactcaggaggctgaggcaggagaattgcttgaatccaggaggcggagggtgcagtgagccaagattgcgccacagcagtccagcctgggtgacagagcgagactctgtctaaaaaaaaaaaaaaagagaaggagaaacactgtctctaccaaaaatacaacaattaaccaggtgtggtggtgcatgcctgtatcacttgagcctgggaagttgaggctgcagtgagccaagatcgtcccactgcactccagcctgggtgacagagcgagaccatgtctcaaaaaaaaaaaaaaaaagaagaaagaaaagtggttacaacgtaatgatagaactactaggggaaaaaacatgaacaccttcacaacctcaggttaggcaaatatttcttagacaagacacaaatcacacaggaaaaaaattgagacaggaggaataagttcaagagatctatgtacctcagggtgactctgattaataacaatgtatagttgaagatttctaaaaatcgattttgtgttctcatcacaaaaaaatgctaaaaacgtgaagtaatacacatgcgaattagcttgattcagccattccacaatgtatgcatatatcaaaacatcaaactaataacaataataataataataataatcatggccaggcacagtggctcacacctgtaatcccagcactttgggaggccgaggcaggtggatcacctgaggtcaggagctcaagaccagcctggccaatgtggtgaaaccctgtctccactaaaaatacaaaaattagctgggcgtggtggcaggtgcctgtagtcccagctacttgggaggctgaggcaggagaattgcttgaacctgggaggcagaggttgcagtgagccaaaatcacaccactgcactccagcctgggtggcaagagcaaaactccttctcaaaacaaacaaacaagtcatgatgtataccatagataccatttttgtaaattaatcaatagatgaacaaaactgataaattggactttatcaaaattagaaacatttgctcaagatactggtaagaaaatgaaaaagccgagcaaggcgcggtggctcacgcctataatcccagcattttgggaggctgaggcgggcagatcacctgaggtcaagagtttgagacaagcctggccaacatggtgaaaccctgtctctacagaagataaaagaattagccaggcgtggtggcgggcccctgtagtcacagctactccggaggctgaggcagg

SEQ ID NO: 2381 - DNA, 4001 bp, Homo sapiens
taatttctctataatttccaagactgtcccacctactaaagggacaaatgttaagctttaataggacctactttgtatccctgaagtatctgatcccacgataggtaagctctactgtccttttttgaaacttgttctaaggcacacatctgcttgaatgtactcagtactttcctgatcttttcattgtggaaggaactgttttcatagttacaaacagttacagaatgccctttttccaatatggaaaaatagattaatttacagaaacagagtcaggaacactgggatgcagggagtgggtggtgtgagtggaaaggtgtgttgaagaaatgcctcctcttttaggaaggtactctttctttttccccctcttttgagagacggagtttcgctcctgttgcccgggctggagtgcaatggcgcgatctcggctcactgtaacctccgcttcctgggtccaagcaattctcttgcctcagtctcccaagcagctgggattacaggcatgtgccaccacgcccggctaattttgtattttttagtagagacggggtttcaccatgttggtcaagctggtctcgaactcctgacctcaagtgatccgtccacctcggcctcccaaagtgctgggattacaggcatgagccaccgcgcccggcccaggaaggtactcatcttttaaaatcttcatcaaaggctttatttctccccatgcagatctttcttaaccactctgactctgaagtcattattggctccattacttggaaagtatcactttggtttttcaggtataaagtcccgcctcctcgaatagatcacaggttcctgggtcttcttactctcttctctgtatcctagatagcacctagcatgtgccttggtatacaacagtctgatgggctgtttgaacagtcactttacatctgtcatgtgtcaatgaccagggctacaacagatctcatcaccgtcctcacggagtttagtatctggtagataagtaaggaccatgccgtggcgctagactctttccatgcttttcctcctttaaccctcataactctctgaggggaatattactcctattttacaaatgagtaaagtgaggtttagagagtcaacacagctggctgcaggacagcttgtttttagatcaggtcctgtgtaccttggctctagatcttaaccactgtgatctattggcacagcagcctcagcaggaacattcgaggggggtccccagctcctggaagaaacccggggcttcctccgacggtgagcaatgagcagaatggaggtggaagagggagtccttgtgattcttaaccattagcattctctgagtcttaccactggaagcaggggtttgcaacgtgctttcgcttaagagagcgaaggcccacggttaagtgatctttccagtgcagatgcccctagctaggcaaggagctcttcggcccacaggggctcaggacagggccgaggtcctttctttcgcaacttctggggcccagcgcagcaccgggccgagagcgggcgctcccgaaccagggctgtcgtccccattcctctcagggacgtcggggactagaaagggaaggggcgaggagcgggctgcgggcgggcagctcacttcctccgggaagcgtctcgccgccccgcccttgccccttccgcgtccgcccgatggccgcgggacccgcccggcccgtctgcagcccgcgacccaagggccaccgcccacccccaggcctcgggatccccgcgcagccccggcctgcgtccgagtggcggccggcggcaactgggcagtatggcggtcccagcgcgagctgccgcctgcggggcccgaagccgcccgcgtcgcgtagcgtcactcacattttggcagctgcggcggcggcagcggcgacgagagagggtcagcagagaagcgaagttgggaccggaggccagggagatgggtgggacggcgcggcgcggggcaaagacgtcactaggcggagccgggggagtgggcggggcgaagagggggcgcgccggaagtgggcgggggcgtcgtgggtgggtgcgtccagggcggggtcagagcgagacgtcccctccccggacgaggtcacttgggaacttgagggccacaggggtcccagggcggtccgggctctgaaacgcagaacgcaggtcaatacagctccctgtccgcaccgccgtccgcgctggcgcttggggacgtggtctgtaaacgtggtgcattagccactggcgagggactgcgtggataagtgagggtgggggcaattcatgttattctgggctcgggaccatttctaacagtattagagacagatgactggcttctgctgagtgttccagagtaacctagtgatcctgagggcaccatgtttctctaaagtagttgaaataggaagtccatttcgggtatttgtcacatggtgttgggtgaggttcccgctcatgttttcatcggtgacacaaatatttgtcactgcagatcatattataatctgcttacgagagccttggcatcaaggctgtagttcctttatttctgtattttcaggccctagcacagaataggtcctcaggttttggtcgaagggagggaagcacaaatctgaacgcagtgagttaccttgtatatatttgttactgaaatattcctaccaacatagttacctacaccaaaaaataaaacactaataggtcattggtgggtctcttagatgagaagtgaaaaatacagtacttaaatactatgctgttttttccaactctaaatagaatactttgaaaagggaaacgttagtatatatcgaataaacgagtgtcacaaaggcggtgggatttgagctgggtactagtggaaaagaactttccaagtaagggttgggcaaacaccatgaacaaagacagcagtgaaaatggacgcagtgtgcacagaccacctagagggtgcaggttgggtacaagtgaaaagaagactgaataaagaggataaacaaacaagaaaaatgtcatttaattgtagtgggccctggaaaccattgacttacggacgtgggagatccatgatgcaaaatttctctggcagtagtggccagatggattagatggaagagggagcactagggagataaggagaggctctgcagtgaacgggaagggagcggcgatgacacaatactcagaaaggacgacgttcgtaatctgctggaaaatgccttttagaagactttagaggattgtaactgaaaaggtgaattaaattaatgtctttatctttcaaataattgcactgccttacacaaatgattgacatgttgagaggtgcctggaaagataggggaaaagctctctgaatggtggctggaagacattttttctttcatggacctagctgaaacaatgtaacattcaatgtcaaaacattacatctggatcagaaggaaatccttgacattattacatatgttttgaaacatgtgcccatcaccttagatttcactacccggtcatattaaagcaaaacacacacgtagtatggggaaattttcttcatttttaatttacagcagaaagaatataaagcattcagaaaacattttccatattttaagggcaattcaaaacattttgcatggtttccagcagctgagttcttcaacagatccattgattcaatgatgctttacatgcacaattacaaaaataaaacttacaaaaaaagaagacatctagactagttttacatgcaagtctcagggaccccccattgggcgccaactactgtgtggaactgccataagcgaccgtgcagccagagaggggttcgtattattgtctttatttcgttcacacagtacagctgatttcgaatgggtaacaatagcaattaaatcttcaggagatagaataagattagctattaattttataatgaaatcctactcctggcacttgggaattcagattatcca

SEQ ID NO: 2382 - DNA, 4001 bp, Homo sapiens
gtttacagaattctgttctagaaagactcacttcctgctaacaacccaatagtcctgcttccttttccataagaagaaacacttagacctttaaattaggtatagttagacatcagtttgtttgttaatgatatacacttaaaaaagaataatcccaggatctggcttcacgaaccaaataaaagtaatgttttaagtcagctgcttgtcaaaaccaaaggacacacttttctttgataagaaatgcttccaaatcagaaattattcacttgtaacaaaaaccaaattcttgctgcctgagtaacagctcttgagttcttggttccacaatatttctgtcacatacatctggcccttttattcctcatactttgatgtcagaatacttcattcatgcagaaatgtaacagaatgcatggaaaaacagatgacaaggcaaattactgaagaacttgtgcttttaactattatctgtatttagattttaacccctgcaatgaggctgcctcaacatcccaaagcaaacaacgggcagacttatataatgcctttataagacatacagtaaaactacaatcttaaggatgagcaaacaccatattcaggtctcttaatcccaagaaaccatgtgcaacaaatagcccatcagcaaagcagtaggcagattaattagctaccttgatgaactttgatgttatttgcaactgattattagtaactgatatgtgtatcaaacaactagtagaaataaatcatgctcagaaagtagactaggatatagtctgcctaagatttctcctacaaaaaaagacatgtgaattcagctgtttgtgactaggtatacatgtaaataagagagccatcatgtacttccacattgaggatagaccaccactatacaattcactcaaatgagtcacatcaccgtatgcttcttatacatcagcatatacttaaatgtctatgtgtgcgtttttgtaagtagtacgttatctagtcaatagctttgaatctgggcaaaggctctccttttcccagcctccattctctttctgattcgtcttccttgtctgtcatcagccttcttgcttgatgcagtttcacagaaataaagtgacttggatggacacagaccggagatattatttgcaaaacctgtcaagtgtaacgattcacccccaccttccggtcattataaacacagcagggttggcgctctttcccccgggccctttaaatacacaatttcaggcagctccgttcaccccccacacccaatctgtcacaccaggccacgtcccacgatatatctgctcctaacgctggcccttcctgccccattgtaccccctggaattcctcactacatcccactcttaacaaaccttccccatccatggtactgttctcttcccatcaccccagagtacccctcaattccaattcttctctccctcaactgctcctcgtccgcatacccctgtcctcgtcttccttcctcacggcacccccggccccaaccttttcccactccggggtcccttcctagatccccgaggcccgccgaccagcccgactaggacgtcggggggcggcaaggcaggggcgtcttcttcgtttccttcctcctcacaccagcccctcccgctgcgaacaggccagcgccagtacctgaggctcccggggaactcccggcagctctcccgggctggcggtgctgggcgggcgggggaaggagtaggaagccgaggtaagaagctgggagggggagacagttggtgcggacccggcgtcggccgcagcgccgcagcagcgcctccgctcatcgagccgatcggcgctcggcggcctggcgccaggcggagggggcgggtccagggcacggagataatcgaggaagtcgatccgccgagccctattcacctaaaagagcccgaacccacacgcagtttagatgcatctctccaaatttatgctgtgctttaggggaggaacaaccactggttgtccacgttccggtcgtgatccggcgtgcgtggagggcgattaggggaggagtgggaaacttccgagaaccgctcgggactgggcgccgcgccggagtgcgtggctggggtgatgaggcgttagaaagaaggtggtgcttggtggcacatccgtccctctggctgactacgttgagtggcaagtggagagtggctcgcagctcgaggacctgcttcgggttcgtctggggccttttctgaagaaaggagatctgtttgatcccctgtttacagaattagagctagacttggaaagagatgttaaggccaggctcctccctttagataggaggaatatctggttcagagaggagattgacttaaagttaacacggctagtttagatagatacgggacgagggctcggtgttcttttcccggtatcccttagttgtaacctgaaagccttcaggaaatcgccctcgccaggccattccgccactctgcccattccttcctcactccctccccctccgcccaatttggtatcatgtttagatctccacgcccgcagtagctgtctaccagaaacaattcctaattttgtttttccgttctcttatttgttttattatccgttcctcccacgccccagctggattattttactcattgaatcatattcactacacatcttttaaaattaatacagtatctatgggtcctttgttgatacagtattttaactgtctgaaatactgtgccaggcactttctaaagacataaaaataagagggggtgttcaagaacaagagtagacaagaaaacagcaggaggaaagatctgcggacactaaaggaaaggaaagaatagacaccctcttaccaaaaagttgttcttcttttgtttgatgtttatttttatgtaaaaatgtactaacgaatttgaaagatgccatgactaaggcaacgatgctccactctgattcacttggagttgaatcacttggaaagcttttaaaactacgtaggtgcccacgtgctacctagattctgatttaaatgttctgagatttagaaacagccgttgagttgtcagttgaaggttctgaaagcttaatgctaaactcagttgcctgtgtttattcagtccaagttgctgtccaagtcagcaacttggactgaaacggcccacttagaagagaagcctctcatggtttgtatccctgtctaggtgtgatagtgggtctacccccagactccacaggtaaccctgacattattttttcttctacagctgatcttttttttttttttgagatgaagtctcacttcttcccccaggctggagtgcagtgacacaatcatagcgcacagcagctctgaactcctgagctaaagtgatcttcctgcctctgcctcccaagtagctgggattacaggcatgagcagctgtgcccagcacttacagttgattttatgtctgtatatttgcatgttatgggctattttctggctttggtgccttagccaattagagtttagctagttatagcctcatctcttagacaacttaaggtgtggtcagtgagctctaacaggcacgtcattgcatagcttttacagataatccattctttgggtttttttgttttttaaacataattctttagtcctgccagtcattttggaatgatcgcttaggagaggggtaatgcaagccccacccttaatcacctgaacaaagtccctttgactaaccccaatatttgtgaaacttagaaaatgtcattttacagttaacatgaatcaaatataccagtaagcctaaaagattataatagcactgagcttagagtcagaactccaagcaacttgagttacttatttcctccattttctttttagtgagcttcagttattcagatgttagtcctctaattttcttttcccctttttcaacatgacaccttcatccttaagagggcctgctgtcctcctagctagagaatcagcgt

SEQ ID NO: 2383 - DNA, 4001 bp, Homo sapiens
gccccaatgtggagacctccaattaaaacacaatgtgacaagggcccatcccaccaaaatagctgataaggcctagggtagcaagcacagtgtgtgtatataagtgtgttaaggggatgatgaaggggaggatgccttcttcattcaacacatttatccttcaaacaaagggtgacatggaattgttgcttggtaaagaaactttaaatttcctttatggttttgtcctgttgcttaatacataagacaataaaaatgtactgcttggcaagcagtccttacaaatatatcactctcaaaattcttctcccattttacttacaaattaagttgcaagcaagcctcactgccaacattgttaatagtgaaattccacactgagtgttttcactaattatactgagagacatcaacgtttgggaatgtttaatgctcatggataggtgaagcgtgttatttctttgaactggaaaaagaaacagtttcctcccacaaatcaaagccccaactatatcacattgatttaattcaaccctaaaaactctataattagtggttacagaaaatggctaattacctctccctgtattcagacaatttctgccatctcacttgcagagcctgggagctgtgtactcaacccacccactgacgggagaatgctaattagcattgttgactggtgatacaagttataatatttttcagcagccccgtaaaatttataaacatgtcagtgaaaatgccagattcttttacagtttgttagcttttggactaagtgtctaagaatacattcatttctaaccaaagccaggtcaagagttttaacaaaatgcatgggccatctacacaatcatcatcataaggcgctctaacacttcctaaggagaatctaagagagctcacaacaccttcgcagcgtgggcattagacctggtttggagaagtgaaaactgagcaacagattcctcagctccaagtctcatctgctcatcacacagcagccaggccgcggctccgccccactgctgccgccaccacggacgcgtttaaatttttataaagcttcacacttctctaggcgcgatgcttggggcagttcaaagactgcagaaggaaatgaggtcctgccggtggcgaaggctgccccggcgcggtgagatttcctccagcagggacaccttgggcagagacccgccaggcgcctctgctccaccccggcgtttttgaaagtaaactcctacctgcctgttgcgctctccgaggcgcaaccggactcgccccccaggcctccagggccggctcaattttttgtgagcgaggtgtgcacacagaccagctctgtcccggttcctggcgaagggccaggcggcgcccgggtcgagccccgccaggggtgggaaccccggtgcgcgcccggctcccgccctgcacggctgctgcagccgcccggtgcctccaacgctcggccactccctgccggcctgcccgccgccccggcacgcgcaccgaaggggcgcactccaaaggccagcccggggagaaagggacgtccgaggtgtgagcagggaaccccgggaccccaaggagtggggtgcggcggagatcgcacggcagggccaggaggggcgcaacgcatggggagaagagtggagtcagaggaagcactacccggagcgctccggaggaggggagggagcccccggcccgaggcgggagccggccacccggggtcgaagtccggcggggcgaatgcgggaggagggcgcaggggcacgcggggtccgaggtgggggcgtctcccagccaacggtctgccccggggaccgccgccgcgcagcgctcggcctctcgcgggactcacctccgcgccggccgcccgagctccgcggcccgcggtctcggctcacagcggccccggctctgcggcctgcgctgggctcctggagaggcagagccccgccgccgccgccgctgcactgctgctttccgcttcctgtcccggcgccgccccgcagcccgagcccagccctgcgagcccggcgcggccgcgagccaagaacagctagcgctgccggccccgccgcggggccggcccacctgcagcggagggcggggctcggccggcgtccccctcacctcgtcaccgccccgaccccacacacccgggacacacacgaaggcgtgcgcggtcacactcttacacacggaccagggaatgacacctcccacactcattcaccctcatacacacactcaccctacacagacgtgcacagcccagtaacccactctcttctgggcagacacacacactataaacacatggcccagggattgatctccgacaccgccccctccctcccccacatacttggaatctcaagctcacacacacacacacacacacacaatcatgcacaaaatccgagcccatttgccctcacgagtgcccccatccacatattcacacggctcagggactaaccccccaaccccactcaacacacactcatatacacactttccaagaactgaccgacaaatatccatatacaccatatctcaacccatatacacacacttaaactcacatgtagccctggaaatgaccccacaaatagacacacacacacacacacacacacacacacacacaccccctacaagccaccacagcaagcctctcccctcctcctcccttatcagagcaggcactgccgccagcctagtctcctagaaactgctagatgagcacatctctgcaggcaggtagctgaagcttcagtgctgattccaaccaggtactgtttcctttctgagcctttgtttacctgtctgaaaagtggtgaggatgctgctgtccaccttgcaggattgtggtgaggattacaaaacagttggcaacgattttcatgaatatttgcacttttcttagttgtcttgtgttggtagcattagggttccttactgatcatctccaatctagctgggacccaaagctgcttacgtggcaggattttccagtggaagcagtgtataatgaagtgctgaatttcctaagagttgtctacaggagtattgcgggcatttggggtggggaaatgcaggcccaccctgactagccttaatcagggaaccttggctccaagaacccctcactcccttgatcacctcttcctcatcccttctagactccattttctctcgcatatgtcacatttccttgagaagacacccatatgttcaatgtggctgattttcaccactcctagtccccaggctctgctgccccactcagtggcctagaccatcttcctcccccacccccagcctcccagtaggctccagagagcagatgttgctgactcaggcagccaggttcctatgggtaaagccaatggtctattcacccaaatcagcactcagggtcagaaatgtagaacattataaaaacatgtctctctcatctctaaaatgtagaactttcaaagttcaaacaggccagggatttccaattctagtcatgtacctgaatagctccaattaacacagagatcttcaatgagttttcagaaagtaattctaattcacttaggttcttatgtctagccaccttaccagatgatgttttgtgggaaagaggggtagttgcaaataacctattttaaaataataaattcacctttaaatgccatgtagaggccgggcttggtggctgaagcttgtaatcccaacactttgggaggctgagatgggcagatcacttggggtcatgcgttcaagaccagcctggccaacatggcgaaaccccatctctactaaaaataaaaaaattagccaggcgtggtggcaggcacctgtaatcccagctactcaggaggctgaggcaggagaattgcttgaacctaggaggcagatgttgcagtgagctgatatcatgccactgcactccagcctgggcaaaacgagactccatctcaattaaaaaaaaaaaa

SEQ ID NO: 2384 - DNA, 4001 bp, Homo sapiens
gtcctgtaactgggattcagaaggacactgctagagacaacagcacacacatgtatccttgcatcaaacttcaatactgctaacatcaaaccaatactgctaacaccaaaccaatattgctaacagaaacatggtccaatcacaagcccacctaatcttttccatcttaaggaaaatagaatagcatgatgcccaaatcacatgccctatacagcgagaccctaaccagctagctgattttacagagatgatggtaatagtctaacagtttctagttgtcaagtgtttactatgtgttagatgctgttttaagtcacttacatgtaatatctcacttaatccgcataacaagtgtttaagaaaaataagacattaatatcatgttagttagggaaaccagactgccacaggagccagggcttaaacgttgagagtctaactccagaacctgtgttcttagctacagaaaattgacagcactgtagcaattactagaattgtttgtttatatagaggagtataagcaacaatcacaaattgtcccaaaccacatataaccccactaagaattttgcaatttcaacttctactcacaggttcagtgttccaagcatcgtggggcactcaggagaaaagaaatggatctaaaatagttctaactcccaatgagctcacagccccaatgtggagacctccaattaaaacacaatgtgacaagggcccatcccaccaaaatagctgataaggcctagggtagcaagcacagtgtgtgtatataagtgtgttaaggggatgatgaaggggaggatgccttcttcattcaacacatttatccttcaaacaaagggtgacatggaattgttgcttggtaaagaaactttaaatttcctttatggttttgtcctgttgcttaatacataagacaataaaaatgtactgcttggcaagcagtccttacaaatatatcactctcaaaattcttctcccattttacttacaaattaagttgcaagcaagcctcactgccaacattgttaatagtgaaattccacactgagtgttttcactaattatactgagagacatcaacgtttgggaatgtttaatgctcatggataggtgaagcgtgttatttctttgaactggaaaaagaaacagtttcctcccacaaatcaaagccccaactatatcacattgatttaattcaaccctaaaaactctataattagtggttacagaaaatggctaattacctctccctgtattcagacaatttctgccatctcacttgcagagcctgggagctgtgtactcaacccacccactgacgggagaatgctaattagcattgttgactggtgatacaagttataatatttttcagcagccccgtaaaatttataaacatgtcagtgaaaatgccagattcttttacagtttgttagcttttggactaagtgtctaagaatacattcatttctaaccaaagccaggtcaagagttttaacaaaatgcatgggccatctacacaatcatcatcataaggcgctctaacacttcctaaggagaatctaagagagctcacaacaccttcgcagcgtgggcattagacctggtttggagaagtgaaaactgagcaacagattcctcagctccaagtctcatctgctcatcacacagcagccaggccgcggctccgccccactgctgccgccaccacggacgcgtttaaatttttataaagcttcacacttctctaggcgcgatgcttggggcagttcaaagactgcagaaggaaatgaggtcctgccggtggcgaaggctgccccggcgcggtgagatttcctccagcagggacaccttgggcagagacccgccaggcgcctctgctccaccccggcgtttttgaaagtaaactcctacctgcctgttgcgctctccgaggcgcaaccggactcgccccccaggcctccagggccggctcaattttttgtgagcgaggtgtgcacacagaccagctctgtcccggttcctggcgaagggccaggcggcgcccgggtcgagccccgccaggggtgggaaccccggtgcgcgcccggctcccgccctgcacggctgctgcagccgcccggtgcctccaacgctcggccactccctgccggcctgcccgccgccccggcacgcgcaccgaaggggcgcactccaaaggccagcccggggagaaagggacgtccgaggtgtgagcagggaaccccgggaccccaaggagtggggtgcggcggagatcgcacggcagggccaggaggggcgcaacgcatggggagaagagtggagtcagaggaagcactacccggagcgctccggaggaggggagggagcccccggcccgaggcgggagccggccacccggggtcgaagtccggcggggcgaatgcgggaggagggcgcaggggcacgcggggtccgaggtgggggcgtctcccagccaacggtctgccccggggaccgccgccgcgcagcgctcggcctctcgcgggactcacctccgcgccggccgcccgagctccgcggcccgcggtctcggctcacagcggccccggctctgcggcctgcgctgggctcctggagaggcagagccccgccgccgccgccgctgcactgctgctttccgcttcctgtcccggcgccgccccgcagcccgagcccagccctgcgagcccggcgcggccgcgagccaagaacagctagcgctgccggccccgccgcggggccggcccacctgcagcggagggcggggctcggccggcgtccccctcacctcgtcaccgccccgaccccacacacccgggacacacacgaaggcgtgcgcggtcacactcttacacacggaccagggaatgacacctcccacactcattcaccctcatacacacactcaccctacacagacgtgcacagcccagtaacccactctcttctgggcagacacacacactataaacacatggcccagggattgatctccgacaccgccccctccctcccccacatacttggaatctcaagctcacacacacacacacacacacacaatcatgcacaaaatccgagcccatttgccctcacgagtgcccccatccacatattcacacggctcagggactaaccccccaaccccactcaacacacactcatatacacactttccaagaactgaccgacaaatatccatatacaccatatctcaacccatatacacacacttaaactcacatgtagccctggaaatgaccccacaaatagacacacacacacacacacacacacacacacacacaccccctacaagccaccacagcaagcctctcccctcctcctcccttatcagagcaggcactgccgccagcctagtctcctagaaactgctagatgagcacatctctgcaggcaggtagctgaagcttcagtgctgattccaaccaggtactgtttcctttctgagcctttgtttacctgtctgaaaagtggtgaggatgctgctgtccaccttgcaggattgtggtgaggattacaaaacagttggcaacgattttcatgaatatttgcacttttcttagttgtcttgtgttggtagcattagggttccttactgatcatctccaatctagctgggacccaaagctgcttacgtggcaggattttccagtggaagcagtgtataatgaagtgctgaatttcctaagagttgtctacaggagtattgcgggcatttggggtggggaaatgcaggcccaccctgactagccttaatcagggaaccttggctccaagaacccctcactcccttgatcacctcttcctcatcccttctagactccattttctctcgcatatgtcacatttccttgagaagacacccatatgttcaatgtggctgattttcaccactcctagtccccaggctctgctgccccactcagtggcctagaccatcttcctcc

SEQ ID NO: 2385 - DNA, 4001 bp, Homo sapiens
cacacagactcacttgcaaaagctgctgaagaaacaccctatgccaccttctcaaccccatgggcagggaacccaagctgttccccaccaggtctcaaccctccagacatgcttcctcctcttgtttccatcccacaccaaaatctcaagactcctcaggaactttaggatcttagagtcagggcagagttagaaggctatgaagcagcaaactctgagacggctttccaagagaactgtggcctgaagcttttacctaaggctgggaatccaagagtgtagcttctccaagcgctggaacccagcctatgacgatgggggaggaagttcctcttattcttctccctgaccccgccaatcttccaaattcctctaggactacaaccagaccccttgttccctattccccacaacacacgccctcttccagaaaaacccatcccccaaaaacaggcacttcataagacaactcattccctcccacccataggtctcagatacttaaggtactacccctaaacccaggcgaggccatccacgaagtctcaaaatcctgcagacagccttcttttcgggatttttgccaggaaaatctgcctgcagagtctagaggtacccccgacacacactcagaaacatacataccagctaaggcaggcacacacattgatacccatcaacacaggttacacacaagagaacacagattcacaccccttcccagtacacaggtgcacacacacctatccacatacactccattctgctcttacacacccaccttcctcagtacctacacacctctttcccgtgaacccctctcccagtacacacacatagacatacacgccctcccctaagtatacatataaacacatatccaaacacacagcagatgcatggtcagccgctccctgggtgcacacacactcaagcacagaaaaacacctacacatccaaaccaggggcccacctgcaggaacatgcagcacgtcaaggcgtgcacacacaccaaaacaaagaatcatgcacacggatcctccaccaacccttcaaaactcactaacgcagagcccacagtcccccagatgggtaaatatgagtggggagagggatgccagcgcctgtcccctcggcccctatacacagtctaccgcctccagccccatcctcggtctgtacatacaccctatctactctgcccaacccgcccccctgactccactctacacccttaacgcatacctgcctccgtccctccccacgctcctgaggggtgtatgcaccccaaaacacccttggcttccaatacctccagactccgatccttccacgcctctccccccacctccaacacaagctccccgtctccggcttcaaccggctcccctgggatcattaaggcccccgcccgggcccaggaaagtccccggctctccaggcctgggctccgccccctccccacgagccccttcccctccccaaagttggggggggtactccgctgtgcagtggggaagcggaccggaagggggttgcccggagtccagccccccttcccccataagccaccccgctcgctctggggtcgggcaccccctggccccttgcatgattttcctccttttccatttctttttttctctctctttctttcttctttttttttcaaactttgcccgcgcccccgcggcccggcactcacccgccgctgcgaactgccgggtgggctccgcgggcgccccgctcggcccgtcgcctttgtatccgcagcgctccgggtcgctccgaactcggcgctcctggacaggcagcgcgcgcgatgggggatgttgaggggggggttcttgagtctggtcaccccctgctccgtcccagaccgctgcctcttccccctcaaggccccgggggctgggggccaggggggaatagggggcgctcaggctcccatggcgggaccaaggatcaaggaatcaaggatcaggaatcagatcgggagccggcggcgcaggggggagggggcggagggggaggggatgagggtggggggtgcagggggcgggggagcgcgagctcccgggtgccgcctcccggctgttcccacagccgccgcccctcctaccgccgcgtccattgtctgcggccccgctcttcccggagtcgccgctcccccagccctgcgccttcagatgcccagcggccctccccgatcctgggaatccgcggtggggctgacactcgggtcccgaacggtgggcaggggaatgcctcgattcttggacttggcccagcccgcagtccctcctggggctgtcttcctggacccctcctgtcggagaaggagcccccagatccctggggctggccatattctctttagggccacggacccgactacacaaaatccaatggaatctgggacgtgggaagattgattttttttttccccctaggggtccgagaagggagggtcatccctgattttaattagtggcgagaggcgcacgcctcttcccatgcatacggggatttccctgacaccatcaccaccatatcccctccttccaaaaataatttaattacttggagttctagctgcgagcagcgaccgccccagtcagtctgggacgctccctcattaacacatttttcctcccctctggtttgagtgttgggattaattacaaagggaaccctgccttagggaagaaggggaggaggaaaagacgcgggcgcctgggagtttgaatggcagaggagagggggccttctcccaggaaacctccaagaggaaaaatgccttggccagttgggtccccaaccccaagcaggcagattgtccatcccaggagtttcagatactttagagttgaaggtgccacacagggattgtaggatctcacaaaatatcctacacgtttggggcatttgtgcctcccagtatgccaagaaaccagttagggttcttttacatgtgaccctacaagagtgaacccacaccgtaaaagcctgggctgtgggaagtccatgttccccttggagtaagtgaaagcagtattcaattatcattaatgttattgccgtgcaacccgccacttagagtagtatcatttcaaaagcatcttcacatacttctccctaagcaggccaaggccttttcaatatctcagcctccttcagtttccaatcctggcacctgcttgaacaaccctgtgattaaggaatcccagagaaagagactcccagcctctgttcctcacttgtttgggaatttttgctcctccctgatgaaaactatttcctgagacctaatctcaccccttttgatggttcattctaacctgtccaaagatgaggacagaaccaactatgctgcattgttcaaagatgcagaacagtaaaacacacttcctttctcctttgcccaaactctgtctttcctcatcccctcctccagtagtatgggtaagcaggtgactcagcatcaagactacatgaaatatgcagaatcatcatttcaggtacccaagtccctgcatgcgtccaggcactcattcaccttgtgcctatcatgtgcaggcactgggccgcactggggctcctggcagtgaccacgaccaggtgtatgagggagtggcaggagagctggggaagggttaagggaagtagggaggacatgggtgtccccagccctgccccaaagcacaccccagtgctaggcagctagtgtgtaatttgacacagagtcggggctgccgtggcactgtcttgactctcaggcagatttagtgtgaattatcttcacatgctgctagcctgtttcacagaccccaaaatggcccaaagaactggaaaaagggcttctgatgccagaattacagataattccatagtctggccccactgaaagcttgaaacctaagtcaggatgttaacagacaaggcttcccaattaacaggtatcaggcatcaggctagaataagcttagtccctcctttct

SEQ ID NO: 2386 - DNA, 4001 bp, Homo sapiens
ctatccagtgagactaattcatcatgtgtactggaaagtcccttttaagtctcagccaaaagtctttcttttttcttggagcacaaataagctgggaagagagagagagagttcaccgttttgcaagtttcagaggtgaaagtcactgtcacacacacacacacaaaaaaaccagaaagaaaagaaaaaaaactggcaaaaagtctggaaattattcacactgagaagtctgactggttgatttcaaattcattcacagcttaataaatcatttgctgggggaagaggggagcagaggaggagcaagacactccaaagagaacaagcagggtgggatccctggggtctgtgcattctttggcatcgctggtacctggtggctctagcttttgctgaaggaggatgtatgtgggggtgagtaaataatagagtttggctggagcttcaaagacaccttggcacaatccaattacacagtcccaggatagcaagcccgctacctctcccttccccatttcttaggcttccaatctaaatatctcaattagaaaagggctggcaggaaggaatggggagaggaagggagtttgtagcaggactaggaaaatggagattgcctgtgtttgctatgtataggctgaaacggtcccatcgctgcctacctacccccagccccccaactccgccctggaagccactgacctttgccaagaaggcggcgttcctgatggcgcccaccatttctccccccttagggtgcaccttggccacgtgcatccacatgcgctcccaggtgtggctgtcgatggggaagccgctcttgttgacgtggaacagcaccccgccgtctttgtcctcctcctctgagcccccgctggtggcgaggctcacgggccgcgcgtggctgctccgggaccgggtgcctttggcgcctttggggtgggggcagcggtgagtgtcggccgcggagccggtcatggtggggcctgggcggggagcgaggtactgggggcgcgcggcggcggcagcggcggcggcggcggggggcgtgtgcgcgcgggcgcggcgaggggatcagcgccccgcgggggcggccttctccatgcctctcgctgcggcaggactcaccaagggggagcggcggcgggagctccgcggaggctccctgcttaccggcggtgcctgaaatcagcggagacacagctgacaccacagctaagtggacgcacagcggaaccgagtgaggggtcccggagtgtctccacgacactccccgctcccccctgcacgctgacagcctccctgagaatcgatgacgggcttccagccctgcgattacctagaaaggcagctcaaaatgtgccacgaagcttcacacacacctaaacccggggggttggggatggaggggcacaaggagcttgggggatgcggagcgcaagatgtggggagaagaaagacagcttgtgtagcatgaaggaacaggaggttcccgcaaggctccacacattcctgggtcctcagatgtggccaagagaggaggggagccacgaacgtgctggcatgtgagcgcccagagctggcgcgagggcgctgcagcagccttggcttgcaaggcggcccgctttcttccaggaagccctcccggaccccggcggggatctagtggaaagagctccatccgcccccttttccccgagttccagcgcctatcaccgggagggactggctgcaggcgggcggcgcgcaggaagggcgcgcggcagctccaagatcctacctcgggacggttggcttcatggctgcagagcctctccgggcggcgggagagcaggggctgctgctgctgctgctgggcctggggctggggctggggctgctggggcttgctggggccgtcgcctcattccatgtcccattctcgaatgttattctgtgacatataaccaagtcacccgggcagccgccgatgttccgaatgcgtctattggccaccgcaacaaagaggggcgggtcccgggctcgggactctacaaccccgggctccgcgacgctctgattggctccaggggttctctggcgggaggggacaggagtagggggagcctggcggccacgcgaaatccgatcgctgtggtgtcctgagagccccgcgggctggagcgtttggccatgggacttaagatcgagtttccccaggggtcgtggcacttcgagggtttgcaactgtggaagcagaggagaaacaaaaccacccgagaagtgaccccgcggaagcagagggtttggcatcagaagagcattccctgagggacgctggacacacttacctgcctctacccgggatgatgagttgttcatcctctacctgggatgatgaggggctgttcatacctatgcgtgaaattaaatcttttttaaatcccgcatttaaaaattcctcaaaattaacaagtgggtgcagctttggatcctctggtattagtcatggttaataaagtccctttaagcccaagttgagaggagacaataaaactcaagaggtcaggcaggccctgactgttctgccacagctgttgagtgagaggagggatggagagatgcttccaaaccatggtgaagtgggtggctatcccacactcactactgaaacaccttctctttctttttctttaagaaagaggagagcaggttgaggtgggaagagcaccagactgctgacctgaaggctggctcctggtccaggtttgtcactttgctcagctgtgtgaccctggacaagccacttccctgctctgggccttagcttctctttctgaaaggagagcagacctcccgctctccagggtctgttctggctgtaaggttctgtgattccctgacttcctctcttgtgacactgaggatcctggccatagcatcctttctctttaaactgcaggccagcaggccagctctgagcaaagcagttatgagacctatgctaagtgaaccttgaattaagaagacagttgtcaaagtgccactgatggcgggtcagtttctggatgcttatcctgacaagttgcctgtcatggaactggaacttctcttccacaggagggcagagacccctgaggggtagttgagagccagggcttgggtgaggagacctggattctggacttagccctgcactgctccctgagacagagcccatgccaagaactttatagattcaataatgagaatagggcagacgtggtgcctcacacctttaaacccagcactttgggagaaagaggaggaaggattacttgaggccaggaattagagactggaccaacatagcgagaccttgtctctactaaataaatattttgaaattagccagatgtggtggcacacacctgtagtcccagctactcaaaaggctgaagtggacatgtagaatgaaactggatcctcgtctctcaccttacacaaaaatcaactccagatggatcaaagacttaagtctaagacctgaaaccataaaaattctagaagataacatgagaaaaacacttctagacattagctcaggcaaagaaatcatgactaagacctcaaaagcaaatgtaacaaaaatgaaaataaataaatgagacctaattaaactaaaaagggtctgcacagcaaaagaaataatcagcggagtaaaccgacaatccacagagtgcgagcaaatattcacaaactgtgcatctgacaaaggaccagtatccagaatctacaaggaacccaaacagatcagccagataaaaccaatcccatcaaaaaattggcaaaggacatgaatagacaattttcaaaagaggatatacagtcaacaaacatatgaaaaaatgttcaacatcactaattatcagagacatacaaattaaaccaccataagataccatcttactcttgcgagaattgtcataaaagtcaaaaaataatagattttgatgtggatgtggcaaaaagggaacatgcat

SEQ ID NO: 2387 - DNA, 4001 bp, Homo sapiens
agagtgaacacacctggtatagggtgagagctgcttcttaatattagtttgctgtatttctcccttaaaacaaactcaagtttccaaatggattgactagcctcagagcttactataatcctccatccacacaaaacagagatttttagtacagtcacacagtaaataaaaattatacttatattgaagagtgaaacaagtcactaaaaaactgatgttatatatttttaaaaatcaatgtgaaaattaattccttgtatcataggcttacatgtaatttaaaaagtataaaagtgcctgtgagaattatttagtatcacatgaaaattattacccacttcttattggcatattttctttctgtaagcacacccacttcacattacttaattaaaatgaaaccatcttccttggaaaaaataatatatatatctaaaaggataagtgttaagtaacactgaggtaaagttcagaactctacaaggtttctttctcaataatataataatagcaatgagaaagtgaaagaaggctgctttgcaagatccttggcactgctggaagaatcctgatagccctagtgaaaaatcttacctgtcaatgaaacactaaaggaactctttggttaatttattttagctctaaagaaactcatatggcctattaaaaaaatcaccttgttatgcattctttggtctagactttaggttttaaaatataatcaacagatgcactgattaggtgcatatgagcctctttatatcacactcttgatatcctatatgttcaaattatgtacttatgcaaaaagtagagacaagcacctcttatattttgctgtactttttcttatttttactagatgttggattaaaaacatactaatatcacttttaaagagaggttttaattgttagatattaatttacaaatcataattttcatcgttactttgaaattttcagattactgtacttttggttcatataactaatcacacatagtttgtattttatttttctatgatttctaaaaatgttttgctatggccatttgtggggaggggcagtcaggtaagaaatctgttatttttggttgaaggtcaaggcaatgattgtctgggaaccattaaaatcttttctgtctgaaattttataattttggggaactctatataaacaacatcaaacaacaccattgacagtattttcaacaggaaagtatttaatgatgggcaacttgctgtttacttcctacatatcccatcatcttctgtatttttttaaataacttttttttggatttttaaagtaactttattctgagaggtaacatggattacatacttctaagccattaggagactctatgttaaaccaaaaggaaatgttactagatcttcatttgatcaataggatgtgataatcatcatctttctgctctaatggaaaagtactagaaacatggaaccataatcttagatgaacaacgttagaatttgcactaattctacggaatttcagtaattcggcaaatgtcgggcagtgacacaacatttcatgacggggacgcatctaccaacttctggcgataagggccacccttccctctgtacttacagtcccatttcatacacagtctttgattaaatattcacattttttctctacctaagaccttcggacagtgacagtgaacattccttggatttaacttttgcattttgttcacaatcacttggttgttccctctgtttctgtttatttctatttattttaaaaggcacatttaacagtgtaaaagcccaagcctggttaagttagcaaacaacttgaaatgcaaaggttataaaaaatatttaaaatgttaatcttacctctggtagtttgagtgtcccttgttctgaaagaaatgtaaaaattggcattgtcagtgtaaagttattttgtttggttagcaaccttagctttctctgcagagtggtaaaacaccactgctttgttttcttaactgatacctgtaatatatttccacggtccctcaggctgggctagtaattattttgcaaccttggttctcttaccctattggcttgtcaggaaagtgactcacagttttaaatgacttctaggttatgcttaactttttccattgtttattaagcaatgtcagtcctaccacataaagctccttaaaacaggggcttacactaaatttataggcataagagaaagctaaatgcaacctttctttcaacatgcctcgttttaagaatctaaaaacactaagctaacaaaggtactgcattgacgatttgtaacaatagcaaattatacatagtacaacatttcgtgtgaattgttttttgttaagtggctataacttttatttttaattttggcagaaatacagtttgagttaaagatggaacttaaaaaaaaactgagtcaggattgattttaatgctaattttcttttcatatttagtttacctccagaaataggaagaacaattccttcattacatttcaggccctgcaaatgcctaatggttataagggccctgagatcttcaaatgcgtactatagtagaagagcaaaggatcgttctggggataagggcgcacacggcacttggaaaactggtgggcagcatctttgcctcctttccccatacccaggagcacttatacatgttctaacttctccagacagacaggaaatccctcatcatcataagcccaggcctataccttccccatccaaaatgatcctctaaagaagcatctgaaaagatgccacagagagacatcaggacagaaagagcaggcctaagtgggagctctgcaggatgtttctttaagagattctaagaagctcccagccagagttgaaggggaaaactcctgccaggccacctgactagctgccacagattgctttacacaagaagattgcctggggcatggaacaggaggttggtttgttttttcttttctctctagcttttttttttcttttttttctttttttaacgaatacttctgattaatggaaatggaagatccatgggcagaaagtcaccttcagaagaaaagctaagtcctcatccctttgtcaatttcaaaccccatcaccttggctttcacaaataactgccttctatgaaggcatctttgctagccctgaaatcaacctttacaaaggagtattcctggacaaaaagttacttcatttcttcttttcctccctattggaaacacataacgtttcagaagaaagatcgcccaagagcgctggtttgggaagaggttctataaaagtgccatttggctggcccagtcttagaacccaggttaggggaatttgggttcttgacagaacagctgtgagacttgcttcactggtttgcccagaaagacccatatacaccagaatatccctattcccctactggtgagttagagcctgaactgagagtcataaactgcaggaagtgctaaacagtgggagcagtttaagttttccatccaaggagattgaggaaagctttctacacgagctccaaaattggggaaacctcagctcttttgggttcagtgttcataaatgagtgtgcacctgaatttcaattcaaaaataattatttttttctgattcttcccatagaagtgtttttaggtccttgcaaagtaagtcttttacaacatactttaaatgtattattcatggcataaaacctatgataaccccatgtgtcagtagttgtcacaccatgttccatgagggttctctgggtgacccccaggaagaggaaacaatggtatttacggtggtcaagtagctacggagacacttgcacctcttcatcagaggagcagatccaggaacagaagtcctgcatttacaggctcttcatatcttgtgcagggtttggctgccaggtggccagctcttggcagaagagaggatccatcatagaacaccagaggctgtgagac

SEQ ID NO: 2388 - DNA, 4001 bp, Homo sapiens
ccactagggaacagaactcttagagcattgtatgtgctcaattttcattaatgatgcttataatgacaatctttggtcatcagaaagattaaattacatctaacataagaggagaagagtgaaacacattcaaaacgattctcatccattgttagcattcaaataaaggcttcgaggtttaaaaaggtcttcagctgtccagaaaacgtgattattgagagcaactgctgagagttccaggaaacaagttccaggaaatgtgcacagtactgtactccctactggtgggccaaggcatcctgacccacgctgcctcctgaggctacaggcaaagtggaaaatggggatgtgtgagagtagctaactgcagctcccaccataatagaaaagtctgccaaacccctcaaaggaatttccagagttgagacaactctgaaggggtaccgagaggtagcaatcaccatgcatgtttatgggggtataaaataatttacctcacttttaaatacgtatggctctccccacttccatgcctgttctttcttagggactgcccaccagcaggttgaaggcaaacaggcaaggaatgcagaatctgaagtgcaggggaccctgatgaaacactgacaccaagaatcacagatgactgtgtgtgctctaactttaaatacatacttattaaatcatataaagtccgttccttcttaaaaggcgctgctctggttgctaagtagctgaggctctgcgtcatagaggattagtgctgaaatgtgtcagggagagggctctgtcctctcccttttaagttgaaagcagtttggttttttgttttgttttaacattctgaaagagaaagaggctctgaaccgagtttaacatccttctgtacaaaaattttccgacaggacaaataaactactcttccactgaactgtgacttttgagctgactctagggtgcacccaaccttccagaggtgtctggcttaaccctcaaagaggcagctccagccccaggagccgaccggcaccacagcacctgagcagggcactgcaggaaggaaagcggaatctctagtgaaacttctcatttcctgtcgctgctgagagaggctggactcgctccttctcacatggcttaggaagagctgtaaacgggagcttgccggctggccaccagctcaggggccctgggggcggcctccgggttctgctccctgttcttccctttgaccaatgtcactcctggacagataacgggaccaaacgcccttcacttcctcgagtcctcatgtatgtcatggttcctcttttaggaaaacatgagtacaagacgcaaagcaaaagaagagactaaaggcaaattaccccatcacctcgtttcgtccctccccttcgttattatagaagagcttgatcaaattccctttgtcgcgccacacacacgcagagtaggtgaagggcaccctaagacaacttatttctttcccgcctcacagaaagcctttacgaaatcctcacaccatctccggacgcaaagctttcgcattcagcttgaggagctaaaccatttcaagccaaggtaggaaacgccaaagtggtgccgaagtggtcccaaagcagaaggctgggaagcagggcaagctcagcgcacctagacgtttgcatttacacaaagaaattagccgcatgattaatgggagctgccggctggaggcggggcgcccgtgccggcctcctcacctgggacatctgcggcctcaggttgatctccttcaggttgatggagtgcgcccggaggttgttaagcagctggcagagcaggactccatcgcggagggtctgcgcaaggtcgaacacctgagccgagtcccaggtcacccggtggttggtgggcagcaccttgcaatggatgagccactgcgcgcactgcttccacggctccatgcccgacggctccgggacgcggctgggccggggcgggcggcaaggatgcggccgccgccgccgccgccgcggttcctccgcgccccgccgacgccaacagccgccggccctttccccgcgcgggatcgagggagcaggagccgcggctgacgggtcgcgggcgccgcgctaggctcggctccggtcccggcccgggtgcgccgcgacccggccgccgctgcagcgagtcccgcgcgctctccgtgcgccccggccggctcggcggcggctgccgcgcacaggcttccgactccagcgcccggcccgccactgagcatgcccagcacgccggccggtctcgctgcggtccgcaagtccccagacgcgcgggtgggagcgcgccggcggccggggctggggtctgtggccgagggcggggcgcgggggaggggccggcggaggggggcggcggccagaaaggggatcccgcgcccccgcctgcagccttgcggggctcacgcagcccccggcgtcctggggtcttctctcggggcggcttcccggctttgcggggagtgtggctgaatactgtaatacgatggggtcccccaggaccccctaaacaacaaatgctcaaaggagcgacggattaattggggcacccagactccccagagcaatgaaaaaagtgcctagagcatcagtagagcacggcgctgaaagttttagagatcgtcgccccctcgccccttgcagctctatcccctccattctctatagctgattcctcagcctattcctcctagttgcccctagtggtgttttggcaccctcaaagtgagtgagagtgcgtgtgtggagacgcctgcggaaaccgccccgatccctgagcctatttcctcgcgaggtgattttcacttggagctggtttgcccctgcactgtcaggctcggaactgtttgccgttgctgttctggcccttttgctgaccccacaaaaacctgcttgagaaaggcctgtgccacggtgctagactgcgcatgcgtcggcgactggcggccgggtttgagagcaaagcgcgttagccctgggcagctcctgccgggctgttctgggatccttagtgaaagttggaacttgaccccagaacttttgcgcagtgcacaagcagtgcattcgtgtttcttaagtaaatcttttggagactctaaaccctaccccttttactcccactgcacactgcccctcaaaaccacaattaatgtttaaattatttgtggcaagatattgccacagtgaattattgctgttcgataggaatgtggtccttcgtcacccttttgagatgcattcacttaaaattagaaaataggccgggcgcggtggctcacgcctgtaatcccagcactttgggaggccgaggcgggcggatcacgaggtcaggagatcgagaccatcctggctaacacggtgaaaacccgtctctactaaaaatacaaaaaattggccgggcgtggtggcacgcacctgtagtcccagctgctcgggaggctgaggtaggagaatcgcttgaacccatgaggcggaggttgcggtgagctgagatccagccactgcactccagcctggacgacagagccagactctgtctcaaaaaacaaacaaacaaacaaacaaaaagatgggagtttggataatttaattgtattatatttctgtagcccaaattttttattacgaaccatgctttataagcaggccaaaatattatttttaaaagaatgatctgttcaggatagtgattgcgtcctttttcgtttggctgtgacaaggatagcacactgtttacactcagcgctgaacaataaatcagcctgaggatttcctttcctcacacgcatccttccctagcaatttcctcttgtgttcaatgcggattccatcaatagcacgacattttctaggccataattttggcaaataaatcatactaatctctacatacctttagaagcaaaatccaacacatttgaatcaccatttaacacagtctttcataaagagaaattaaaaaga

SEQ ID NO: 2389 - DNA, 4001 bp, Homo sapiens
tactgggaaaagttgagctccggtacaataaaacgaaaccaaagtaattataatcaaatgaggtcttcatgaagacatgaccgtaaatgggttcagttttttagaaagagaggccatcagtaacaaaaggcaaatgatttatgtctggttagttttttactcctcttgctaactttgtttgctgaatggagaatggagtgggatgcattttgtcaggctggtaaactagggacatccactcactttcatgaggcaaatctagttcattatataaatatctttgaagttgagcggttgagcaccaaggcttcatggcaccaaaaaaaccaaaaaaaaatcctaaatgtgtcaacaccaaagtcaaatgattgaaatgtttccagatattaacaattatgtctaagaagaacacttttatactaatacatattactaattatagatctacttaatgtttaaactaattttaagcatcaaattgcataagaataaatgaatagaaaatccctgaaggatggaattcataaatcaatcagacacataagcaagtaaacatgtaaggatgtaatcaaatggaaatattttttaataaaacaaaaagaaacttagaaatgatcattttacagctaaggaaaccagagcccagagaggttgagtcttatacatggtcactgtgtttgtggcagaggtagaaatagaagccaagatttggattcctgctctctctcatgttggccttagctgtccctagctttcctgatgttgtatgttctttagccaagaatctgtacatgaatatccattttaaaactttttttaaaatatcatttttaaaaagtgattttaaagtaaaattgagagaaaaacaaagattttctaaagcactcacagtagatctccacctggattcctttttccaatttcctagattcacaagttgctgtgcacaggtaagagtgttcgttcccaaaactaacaggattcattgtcagcgtagatgtggtcccctcattcgtcaccttcccattcagtggactatctatctgggttctccaagagaaaaatggggactcacagcctgtggtgctgcaagtcaatgagacggagtcaccaatctgagcaagatatctagattctggggtggtctcgattttaaaagcttgagctgcaaaagcaaaaaaagacagaagcaaatttaccactagtttgtctagtattctcctccttcttctctgtataatgtctaaaatatgatcagactgatctctttcctaagctgcttcaaactaactgcaaggtagccaaaaagcaccgaagtcactgccaaaaaagtttatggaatcatcttcagtagagagaattctcagttccaaccttgatgcccatttatcaaagctgttttgttatttgctaagtttgacctcattgtcaagtataggaaactaaagagacagaccgactagagacagaatccaaattactcaattgcctttggaaaaaaagataccaaaaacatcaattttcagctctaactatgacagtacaatggtatatagcaaaactcaattgcatattaaaagttagactaaattaacttttcctactgtttaaaatcctagtgtctttacttcactactatcgcaaaactgactgaagccaaaaccagggctaaaattgaatgctaacatttgaaacagatgaagggaaataacttacaagctgcaaacattatccaaagtatatttgaggctccaaggatcacgaccatcttcccaggcattttaagttgctgtcgtgatgagaaaatagtggttccaaaacccttatttgtgtcccacctgtgtgtgcctgggagggtattcagctcctgaagccagtgaggcccgatgcagataccgcggagtgaaatagaaagtctgtgctttataaagggtcttgttgcagaggcggagggaaatcccttcaaggggaaacccagggcagagccagggaaaaaagtttaacagacacccagccaagttccactattaaccccttcagttgctctcactgctgaagctcctctctctgtcctggcaaaagaagacacttccaagactataaaatacaggcttttcctcatcttcgactccaaaaggctatctttactggaaagataaaggacaatgctgattgcagaatgaagctttctgaatccaatgtgggttaagggggtggggagagaaaaaatggagacagagtagtaaattctactctggtttttgaactggataaataacgactatgccatgtgaattgattttctccatcaaggaaatatgtttgcaattctaaaagagattaatttttttctcttacaagagaaaggaaaaagttatttcttttgatgagtcattttttaaaaaagggacaccataacttcttagttttatatttattcataaaaatagttcttttagcaacaaacatcaactttttgaaactattttcttgagtagaaagtaaaggactgtaactgaaattgctgccaaaacaagggaaacaatttttttttgttttagaaaagttaccaataatttggttaaattgctggataattggaatttttttgcatacttaaatgcaagtgtatggaatccatctgaagtggcaaatctcttgggctgtgagatttaaccgcaaacccagttaaaaaattaaaaataataggtttttattataggcaaggggacaataaccaactctatgttccttttccccccagtgaagtgcctttttaaaaaaatcccaattaactaactggcttagccttgcacacacatagcccaaggccttgcaaaatgcttgcccatcaaaaagaaaccggaatagccacttccttttattaaacacgtgcaggtctatctcccccattggatcatcagttcctctcatggtcaggaccagttcttgttcattgttgtatctacttctacaatatctaatgcatgattttccacttagtggatacaaaaaatgcaataataaacgttatacatttggagaagaaaattctaaatactagcaataatatgtaaatacggcatgaaaaaactgttaaattctacaagaaaattctaaagctcagagactcaatgggatgtgtacaataaacttgtactatataacatttgtactctgtaacaaaggccatagctgaggtctggaatctataactgtccctacctggttggagaggcttctggatctcctcttggatactgatgtggctcccactaaaagacaaggagggaaaaataagttggagatgctgttctagggtgtggggatatataggtatgacttcacctaccaaatatctagggatcagaaaaattgattcaggaaatactagcttataaacaagtaacccagaggtcctttacagtgtttgtgtcatcatcatgtaaattcactacttaacttcagaatagatcaaaagggtattatggagttttaatatgttcctttgaggctcaaagacaatggccaataggatccttgggatcattatgaccaagctatgttgttctgagtttggatatgattcgaagcttgcaacattggagaaatgcctaatctattcatttaactcatagtggtcttggcaaatgtttgatcaagtccctcactatatctttgagttggatgacatctgaagtcctacctgctcctcccaggttgagaggattgcaccctcctcggtggcctcactacaacaagtgcatattgatggagcatttatcattctgcatttactgattaatatgcctatattttctactttgctaactcatatggtttcattttttcatctcagcatttagcttaaaataaagcatttattaaaatttgcagaattaatgaatgatcagagttgcaagtataaggttaacagatttagactaacctgtctgaataaagtactactgagttttgtctttgaacttgttcggtttaac

SEQ ID NO: 2390 - DNA, 4001 bp, Homo sapiens
cttccaaatttttctctactggggggatttttattgttgttgttgttgttttttgttgttgttgtttgttgttgttttgagacggagtctcacctgtcgcccaggctggaatgcaatggcgagatctcgacccactgcaacctctgcctcccgggttcaagtgattctcctgcctcagcttcccgagtagctgggattacaggcacacgccaccatgcccagctaatttttttttttaaatggagtctcgctctgtcacccaggctggagtgcagtggtgtgatcatggctcactgcgacctccacctcccgggtggaagcgattctcccacctcagcctcccacgtatctgggactacaggtgtgcgccaccatgcctggctaatttttatatttttagtagggacagggtttcaccatgttgcccagactgctattgaactcctgaacacacacacacaaaattagctgggcatggcggcgcctgtaatcccagctactcgggaggctgaagcaggagaatcgcttgaacctgggaggtggaggttgcagtgagccaagattgcaccattgcactccagcctgggcaacaagagcgaaactctgtctcaaaaaaaaaaaaaattcttcagtctcttcttccatccattaattttcttttctctctctctctttttatttatttatttttgagatggagtcttgatctgtcgcccaggctggagtacagtggtgcaatctcagctcactgcaacctccacctcccgggttcaagcaattctcctgcttcagcctgctgagtagctgggattacagacatgtgccaccacgcccagctaatttttgtattttttaagtggagacgggtttcactatgttggccaggctggtctcgaactcccgacctcaagtgatctgcctgctgcggcctcccaaagtgctgggattacaggcgtcagccaccgtgcccagccatccacagatattcactgtgctcctgcgtcagccgctccaggtctttcaatcacatttggatgatcttccagatcgtcatagagtgatctgacgatgtccagtctcctgtaattcttgggcttgactaggcttccgacaacctggaggcattgctctttcagggtatacactgcagtgtgatgttggcaaaaacaggctgtccattaacattggaagatggcacaaacaattcagtttggttaaccagaagcttatcatgtgtccttgcatctctgaagagccaagggtggcttcggaagttgtggatgcggaagtccctgccgggcagcagcgtcaggtagggcagcagcttgccatagtagttgagccacacaggcagcacgattcgtgggctgtgattgcagatgatgatccgggagagctcgcgtgagttcacagagcgcagcacaggccatgctgctctggctgccatctcctcctcggcgcccaactcttcctggcagtactcttctgggcctgcctcctgggtgcccgcctgggcctctaaacccaccccgttccccgctctccagggcattacctccgaagccttgacaacttgggcctgcccataccagttcttaaagagactacttccgttcacccggatttcggcaagagttacaatggaatcagaaaggctgggagtatataaccccctacctgggtggtaagcaagacatcctagatcagacagacttactcccagcctctcttacctagcccgtcccactgaagagctacctatagtgggagagatccaaatgggaccccaataatacaactgtgataggaagatccagagaggaatttgagggtattccatgagatagcacacctgagggttctttatgtcaatctaatatttattggacacttcatggccaggcgcagtggttcacacctgtaatcccaacactttgggaggccaacgtggatcacctgaagtcggggttccagaccagcctggccaacatggtgaaaacctgtcttcactaaaaatacaaaaaaattagccgggcatggtggcgcatgcctgtaatcccagctactcgggagactgaggcaggagaattgcttgaacctgggaggcagaggttgcagtgagccaagatcacgccactgcactccagcctgggtgacagagcgagactccatcttataaacaaacaaaaaattagccaggcatggtggcaggcgcctgtaatcccagctactagggagtctgaggcaggagaatcgcctgaacccgggagttggaggttgcagtgagctgagatggagccattgcactccagcctgggcaacaagagtgaaactccatctcaaaaaaaaaaaaaaaaaaaaaaaaaaaactgtggtgaaaaaaaactgcatctcaaaaaagctgtggtggcccacgcctgtaatcccagcactttgggaggccgaggtaggaagatcaggaggtcaggagattgagaccatcctggccaacatggtgaaaccccatctctactaaaaatacaaaaattagccggctgaggtggtgcacgcctgtagtcccagctactcgggaggctgaggcaggagaatcgcttgaacctgggaggtggaggttgcagtgagccgagattgcgccactgcactccagcccgacaaaacagtgcaagactccatctcaaagaataaaaaaaattaaaaaaaaagtgcatcccaccagatatcacctccctcttttgacaagtacttgtattgcccccatatcctattttctcatatcctatcttttctccacaataaaattgtgaactcttcttggaccagaacccgaataacgaagtgttcaataaatattacgttttttggtttgtttgtatttgtttgtttgttttttcgagatgtggtctaggtctgtcacccaggctggagtgcaatggcatggtctcggctggtctcaaaactcctgacctcaagtgatctgcccgccttggcctcccaaagtgctgggattacaggcacgagccactgcacctggcctactttaatcttattttgactaataaatgaacatggtacaaaatccaaaaggtaccaaagggctcagtgtggtatctcatgcctgtaatcctggcactttgggaggctgaggtggaaggatgtcttgagtcctggagttcaggaccagcttgggcaacatagcctgaccccatctctacaaaataatacaaaaattagccgggcatggtggtgcatgcttgtggtcccagcttctccggaggctgaaatgagaggatcccttgatcctcccattgcaccactgcactccagcctgggcaacaaagtgaggatagcaacaggaggcagacaaacagacaaatcctaggcagacaggggcaggttcctgatgaaaccccaccttcaagccgaaaacagttgaaagccaagctacaagtcctcggtaaatgcacaggtgggattgagaaccactcttcccgtttgttgcactttcctctgattgatccccacgcgtcacctattttacatatacccacccttccctaattggttacactgtcatgcccatctttgagaggtgcctttatttatttatttatttatttatttattttttgagatggagtctcgctctgtggcccaggctggagtgcagtggcgtgatctcggctcactgcaagctctacctcctgggttcagccattctcctgcctcagcctcctgagtagctgggactacaggcacccgccaccacgcctggctaattttttcgtatttttagtagagacaaggtttcaccgtattagccaggatggtctccatctcctgacctcgtgatccgcccatctcagcctcccaaagtgctgggattacaggcgtgagccaccgcgcccagctgagtggtgcctttgttttagctttttttttttttcttttgcatacactcaaaccaatctgcacacacacacccattttgagcccatcaaagc

SEQ ID NO: 2391 - DNA, 4001 bp, Homo sapiens
ctaaaaatacaaaaaattagctgggcatggtggcaggtgcctgtaattccagctactccagaggctgaggcaggaaaatcgcttgaacctggacctccttggaggctaaggtgaaaagattgcttgagctcaggagtttaatactaacctgggcaacatagagagacccctatctcaaaaaaaaataaaatttgtatttgcttcttccaaaagccccatgccctacagctggggcattttcaaattaatgtctttgtttaggttttccttgactgctgggtaaatataactcaaaaccaacagatcctccgcttgaaggcagaggttgcagtgaggcaaaatcatgccattgcactccagcctgggcaacaagagcgaaactccatctcaaagaaaaaaaaaaaaagcctatagacatatatgattgatgtataaaatgtgatcaaatatctacaagtgcttttctgccgtattataaaagttcctaaatcagatgcaacagagattaataatacccgttaaaaatttacacagagacaaaatatcgtgacatttaaaaaccctaggtgatggccaatttcatttttaagtcttaattttcatcacttctttttaaacatttattcttattttctgacaacttagtaagaagatcttagtccatttactgttgcttataacacaatgcctgaaactgggcaatttctaatgaaaaggaatttgcttattacagttatggaaggtccaatatctcaccagatgatcagagccttcttgctggtgggaattctgtagtgtcctgaggcagcagacggcatcatatggcaaggaggctgagtggtctctcttcctcgtcttctaaagccaccagtcccattctcatgacaacccattaattcatgagttcatgaatggattaacctctcatcacttcttagtactgccacattggcgattaaatttcaacatgagctttggaggagacaaatatttaaaccataacatttgcagagtcttgaatatttggttatcagcataaattagcatcaaaggactaattgcggcatagctattggccacaataacctggagccacactagcagagaatcatttatccatgtcacacctcctgaaaatgagaacgtaaagtccacccagtatgtgaagacaaaactcaccagcagtaagatagcctgggaggctcttttcactggtgagactcggggacaggctggctgtgtgaaggcactgagatagcctcttattgtctgtataaaataatcaccatgtagcctcttgagaggaccatgaaccctataaaggtgacatccctcaaagtcattagtgtgaaaaacagtctcctgtgggtgtagctcatgggcaaaaaggaacagtgctgtatgacaaacagaagactggccccgtttcactgggggtagccgcagtgtacagcagaagattacaccaatgaacatgttgaggacccatgagaaaaggaagaatcctaagatgtgacttgcagaaggatgtttgagctttgccaaggagaagatgctggggctgatgatggcctggagcacactcaggaggcagggggtgcagatggagaggcccctcatcaccttgtttaaaaagacaatgaccttatacctaagatcatcctgagtattctgtgaaccaaagaagtctaaggacaccaatattgcctgggtgaagagcagcagtatgtggatgagagacaggtgactaattatcatgtcaatggacttagacctgtgactgaaaacaaaggtgaagatgtggaaaagaagaaggatggtgtttgctgaaattccaaagctggcttgtggataaaagaagatttatatggtaataaaaccaggaagtttgatcatcttagaaggaaaattaaagcaaaggatatctgtggagaaaagcaagagatctaatgagaatagcataatttctgccatgttctcaataataaccaatttcaacatctctatgatctggaatcattagtttctaaactacaaatatagattaaatctttattttattttatttttgagacagagtctctctttgtcacccaggctggagtgcagtggtgcaagcttggctcactgcaacctctgcctcctgggttcaagtgattctctggcctcggccttctgagtagctgggattacaagcatgtgctgccatactcaggtaattttgtatttttagtagagatggggtttcaccatgttggccaggctggtcttgaacacctgacctcaggtgatccacctgcctcggcctcccaaagtgctgggattacaggcatgagccactgcacctggcctatagcttaaatctgaatcatttatttctcaccatccaagatacaactcaatcatgtaattctttattcttattttatttatttattatcagttatttttttaagtagagatgaggtctcactatgttacccaggctggtctcaaactcctgagctcaagtgatcctcctgcctcagtctcccaaagtgctaggattacagggatgagcacgtctaagtaaaattaaagtacttagccatttacccctcgtgtgtgtgtacacatgtgcttgtgtgtgtgtatattttttacattactttatttatatttattaattaacaagttgcaccaatagaatattaatgttatagttacaaaatcaatattatatataataaatattttgaggagtcaaaatcactataaatgaatattgcattattattttatttctacacaatgcataactttgcatatacttaatttataactctgttatcataggccatgtgacaaaatttgtgtatgaaacatacaacttcactaagattaaaaaaggttattaggggctgggtgcagttattaggggctgggatcacacctgtaatcccagcactttgggaggctgaggtgggcagatcacgaagtcaggagatcgagaccatccttgctaacacggtgaaaccctgtctctactaaaaatacaaaaaattagccgggcgtggtggcaggcgcctgtagtcccagctactcgggaggctgaggcaggagaatggcatgaacacaggaggcggagcttgcagtgagctgagatcgcgccactgcactccagcctgggcgacggagcaagactccatctcaaaaaaaaaaaaaaaagattattaggaaactttggaattcatgaatgagaactaatttccaaaaccatggcgcagactatcacttctttggcaagtgaattggatatacggtttagttcacagttctatcctgttactagaatgtttataattcaaggcatctatgtcattgtagacatgaagtaggaggaaggagatggaaaataaattggagaagttctaccatgaatagaatgtaattctaatgggaaactcacatttcaaacttctctattttcctgatcactacaaaaattatgagagcaagtgttaggaaggatgggaagaaaaggaacaggttagactgttggtaggaatgtagatcagtacaacaattacagaaaatagaatggaggtttaaatgtccatacatacaaaactaaaaataaaattactatctatttcagcatttacctaaaagatttgaaatccctcccatgttcattacagaactattcaccatagtcaagttatgaaatcaacctaagtgtctatcaacagacaaatggataaagaaaatgtggtgtacataaaaaatggagtactattcagccttaaaatacaaggaaactctgtcatttataacaatacggatgaacctggaggacatcgtgctaagtgaaataagccaggcacgaaagacaaatactttatgttctcacaaaatgtagaatctagaacaattaaactcatagaaacagatggtaggaccatggctatagaagctggggtacatggggaaaggaaagatgacagtcaaagggcacaaaa

SEQ ID NO: 2392 - DNA, 4001 bp, Homo sapiens
taaaaaaaatgctcaacagtctgaataaaagaaacatttctctattgtaacttttttttctggagacagagtgttgctccctcgcccaggctggagtgcagtgacgggatctcggatctcggctcactgcaaccgccatctcctgggttcaagcgattctcctacctctgcctcctgagtagctgggattacaggcacctgccaccatccccggctaagttttgtatttttggtagagacagggtttcatcatgttggccaggctggtctgaaatcctgaccttaagcgatctgcccactttggcctcccaaagtgctgggattacaggcgtgagccaccgtgcccggccactattataacttgaaaggagtaaatttgtgaaaaccaaatgtgaaactgactaatcttactatggggactccaaacaaatttgagcaagaagccaaggtcagagtactctttatttttgtagttattgccactaatttcggccctaaatgccaactctgagtgccaattaccaattatctccaaatcaagggaaacaactgtcagtttgtaaacaagttcaggccctaccctacttgccctaaacggaaaagaatgcaaagcacagattttaaaagcatgagtgattagcattgtgaggcaacctggtcagtaacattgaggcccaaaccagaaagcacccattatttgctctgctaagcatctagaccgtgcttgaggccacttcaaggattccctgaaggaattcagtgtcagcaagggccgccagactggccagagtcccaaagtgtttacactccggtccatcaggacttctaggcagctgcctggcactggcactaacccccacctgggctcccctacccagtggggcgggtgacagtagggatcagtgctgagcccacgggcgggcagacagccgggcatgaccttgagccaggcccctcccctgaggagcggccagaccgggaataggaaggactggcaaccggacctgggcgtccctccccgaggcggccagggctgaacgctgccggcgccagggagctccaaaaccggggcggggacggctgtgcgaccggtggccccacaggaacggcactgcccggaaggcgacgctcccacaaccctcccgcccccagctctcggaaccctcagccccctccaggggacagagaccccaccacccaagtaaaacctggagggaacggcgccgggatcccatacctaggaggagtggctgggccagggcgtgaccctggggggtaaaaggtaaagagaggttttaggcctgatgtctggcatcccacacctaggaggagtggctgggccagggcgtgaccctggggggcaaaaggtaaagagaggttttaggcctgatgtctccacgcgagagtgtgacctcgggtggctgattaagggaggtggctaaggcattctagagaactgacaccccactcttcggcgtaatgtggggggctcgcacactggggtcctgcattgagaccaaggctcaggcggacaggcgcggactgacaccccccaattccagggcgccaggctgctgggaccccggaaagtgtgccggggtccagcgggggctcgggctccccaggacacggacgtcggggttcccagaggttcagccagccccgagcctgtgcttggggagctcgcggggactcggacgcaggggtccccggaggtggcgggcttggggcccggggggagcagacgcccagggttaccccgaggggctcagaccgaggccggacgacggggcccccaggctcctagcatcgctctccccagggtgggcccgggcccccatgtccaggcggagccctagcggcggcccgcgggtccgcgccggccctgcagttcccgaccctggccccgcccggcacggagccgctcggcccctacctgtcggtgtcccgggccgcccgccccagcccggcgctgcgcggcgtttcctccccgccgctcctcaatggcgcaggcccgcggcgctcaggccggccccgacccgaccaatcgagcggccgacgcgccggtgcctggccagccgagcgccgagttatcgaggaggcgccccctggcgccggcggccgctcctgcagtggtgcgggcccctccagggttcgcggacactggggcttattttataggtggggaaattgagtcccaggggagggcagggccacaaatgactctggttcagacagcatgggaacccaggattcttcccacctacaaccaccctgccttccatccaagcgaaaggtgcgattggccgtccgtctggcccactcacccacagtccgttccccacttcgcagccacaggggcctgttaattcagaccctgcccttccctgcttaaaacggcgtccccaccgtacttcagttaaaacccacctccttacagagctgccaccaaggtcccactggatctggtcccttcccatttcagccactttttccccggccgactctgcctcagcatccttcagtttctgccccaggaactgtacctttgccgttgtctctacctaggacccttctcctcagaccaatagaaacacaatgccagccacataggcaatccacatttactagctagtacattttttttaaacgaaaaagaagaaaatgaacttcattttaatatatttaatccaatatgttcaaaatatgatcatctcaacatgtcgccaaaagaaaaaattactaatacaatatgttaacttttttatagtaagtttttgaaattcgggtatattttacatttactgcgcatctcagtacaaactagccagaattccagtgctcaataccctcttgtggccaatccagagctacagaatagctctggatattcgtatagctgactccctctggcttcaaatattccactcagagaggacttgtgcctatctacggttccattatgagctgggcacagtggctcatgcctgtaatcccagcacttcaggaggctgaggcgggcggatcactgaagtcaggagtttgagaccagcctggccaacatagtgaaaccccatctctactaaaactacaaaaattagccgggcgtggtagtgcacacctgtagtcccagctactggggaagctgaggcaggagaatcacttgaacccgggaggcggaggttgcagtcagccgagatcacccctctgcactccagacagagtgagactccctctcaaaaatgaaaataaaaataaagttccattatccattaccctgttgtattttattcatggaacctaatactccctgagattatcttgtttgtttatacatatgttgttctttccccagtaccttgaaaacagagattttatccctttcacagtgtttcttcaacacctagacattgcctagcacagaaaagactcaatgagtgtgtatgaatgaacagctgaacacttcctccttgcattatcacaagaagggcaagagggagacctcaggctcatataaattagaagatgcaggaagcagaacggcaaggttacaatcatgtatttaccataataattaccaaccctcatgatgctaagctaatgagggtgcatgttgggctgactcactcctgagcaagactggggttcctgtatggtgggatcaacctctcagaatctggatgctgggtctcctctggggctgaggtttgggagtaaaacctggaactccacagacagaaggaggaaggaaggcagtccttcagaggtgaaggacctcgaagtccagatcacctagcacagacaattggctgtacctgggaagcttgttagaaatgcacatggcccaggccaggcgcggtggctcatgcctgtaatctcagcactttgggaggcagatgtgggtggatcacctgaggtcaggagttcaggaccagcctgaccaacttggcaaaaccccatctctactaaaaatacaaaaattagccgggcatggtcacagg

SEQ ID NO: 2393 - DNA, 4001 bp, Homo sapiens
ctggctaacacagtgaaaccctgtctctactaaaaatacaaaaaattagccgggcgtggtggcgggcacctgtagtcccagctactcgggaggctgaggcaggagaatggcgtgaacccgggaggcggagcttgcagtgagccgagattgcgccactgcactccagcctgggcgacagagcgagactccatctcaaaaaaaaaaaaaaagtgtaacaaataagattaaaatagcaaaggctttttaaaggagagactcaagctagatttagaagatgatggataaaaagtgacaaatggccaaagaacttttaatcagtgcaagaaaaaaaaaacaaggaacaggaatgagcatgtagaattgctcattccaacagtagcctagctggctatagaggagaagcagacctaggacataggaaggctggatacacatgggcagatcaaaccaacaaagtagggctttaatggctgggctaaatatagatttaatcatggaagtaacatcaagccaccacaggttcctgagcataaatgtgaataaagtggcaaagattcaagacactcatagctgtatataaaattaagtgttgatggtgttcaatgtgacagatacggaggttaatccaggaataaagtaatgtgggtctccgttaagagtagttcattagtggcaatgggaatggctgtgaacctaaaaaacatcttgaaggaagaactggctgtaaggggtcaactgaaatatggaaacaaaacaagaaaaatgaaggttataacactgatgaaccaggataattatgatgccacaaattatgataatacaaatttattttgccttcttaatgctttcagatcagagtgttctgcatctgcctgggcagatggaagctcagtttatgcagtacctttgtaggtcgaagaaaacaaattgccttcaggtgtttcatgatctctcgattttgagaatcaatgcgttcaaagaggtacacttccttctgtagaatctccgattgtgtgtataccatactcactatgccagtctgtaaaaacaaaagattaactaaaagtatgctagtctagaataataaaaacaagtagcacatctaaccctcttttttcattaatacttagctggataacttaaatagtaatatacggaaaacatttactgaacatccaaacaggtaggtaacatacgagaatgaaaaatacgctctatcctttcagctgaagcttcaagattaaaaacaaaaaacatggtctctttgaacaggaacaatccataagtttccaaaaatatttttttctatcaccttaaagagttttgttttctggtctgtggccaacaaataatctgtcatttcagcttgagctccaacagctttactttaaaaacacaatgttgagtggaaacagtaggcccatcccaaagccttccaagtgctctgacatattaatgatttcttggcggggacatttagaaaaggatttctgattccaataaattgttccgggtagaagtagtctctaggcagtggctggagccatgtagactgaaaacccaccgggcaagctttatataaacaacttttcaattccacacaaaccgaccctcattttcgtatgtttaattaaatgctaagtcctacagtggaatgggacgagcaattgtaaggttgagagggttccttcacaaatgctgagcaaaagcaaactcaccgtctctttatccatgagaagtactttcataccaggcccgctgtcctctatcattttggaaatgtactgcttcacagcaaaaaccacgttcatggcggcgaattgacaagtaccctacagcccttcccgcccccttttctggctaaattaacccccagtctgttggccgggtctcagctgcttcctcccagccgggattcggcttccgggagtccgggcagccacggtgctgggagttgtagttccgctggagtgtacaggggaccaagcctaccccggggatggaaaaatccggctgagacggcctgggccgctgccacgcgcgggcgttattctccacccacctgcggcctgaagatgcctgaggcccggactctcagacccctattgccctttggtgctggaggcccagcggcagcctgaagcccaagagagtggagcctcgcgaaatgaggaacctggcacaaggtttgcttggaagcaggaacgacggagtgtggctacgtgccctatttgccattaacgctttcttgcatggcagtgagagatgagggcaagggaggtggcataatgctcccggccgcttgggactcggagagacggcatttaataaatcacacgcggtatttgcgaaacagtggtcgagattcgtcttcccgggttcattgcgtcattaataggcgggaacagtgcccctgtgttgaggctgcagaggccctaattggttttcccaagacagaggggcatatgagattgaacaaatatttgttgaatgaatgaacaaagggaacgccttttagggatgtttctgggggaaaggcctgaggttctccaggagggtctgcagctagggtcggccgtgggggctcgcagcccgcgggaccaccggacctgcaagcgtccccctgccccgcccccgcctcggcgctctgagcaattggactctgccagctctaactccggcgggactctgaaactcaggcaagagccgaggtgactgggtcctttgaaatgggtaggggacacgtatccggtagaactaaaactagcgtggggatttgaagccaaaactctcaagtttttactgaatcttaaaaccatcaacttccaaatgtctgcatttgtctttacaccacacaggtctcccctctatcatggcatttgtcgaaaaggagggtagatgtttgtttttcgcacctttactttggggaattgtaaaatcaggaagataataagaaacaattgttagaaatcagtaactaaaaatgcttatgaatatttccaccaaaataatgaccagtgtttgtgaggtcaatagattcaggattaccaaataaattctttcattatattttaagaagtacacagttaaaatagaccaatagcactttaacattaatcagcttaagattatgcaatattatatataattctcaaatcccttaagggagatcagaaactactgaaatataagagatttttgtcacctctgaaattgtgaagaatatgttttttttctttcagcttttctaccaagtaaataaagcttccctttaggcattttactaatttttagatgtgttttgaaagaaaagtcttaagttatatattaaagtgaaaatgtgaatctttaaatggatacaagaaatgttatatgaacattccattcttatcaatttaaatgttcgtatcttacagaaaacatggaaacaacgctaatgaaaatcctgtaaatcctgtaaattactgatatttgaaaattcactgccaatctcctatgtcacttggtttttatttttcttacctataatttagattgcagtatagaagatttttccccattttctgtgcttttttaagaaagaaggagataaagacttgtctatgaaattcgtgcctttttaaacaatagtcagtctgtaagcaatagatggaaagaatctttatccttttgatgatttatacttgggcacataactttttgagggacgaggaaaatacctacttgacacttactaactcattccatttcacataaaatttcattgatgtcagtggcagtgatattttatacattgagcgataagatatggaacataaacattttgaacaaaataattattacatatttaaagggtgctgtgatggtcctgaagttagacagcatccttccttcctgaagaaaaccacacaagccattttaaatgtctccaaattaagaacttcttttgtatccccatacctctaaaaatagaactgaaaccaatgataaaatccaagctc

SEQ ID NO: 2394 - DNA, 4001 bp, Homo sapiens
gtagcctagctggctatagaggagaagcagacctaggacataggaaggctggatacacatgggcagatcaaaccaacaaagtagggctttaatggctgggctaaatatagatttaatcatggaagtaacatcaagccaccacaggttcctgagcataaatgtgaataaagtggcaaagattcaagacactcatagctgtatataaaattaagtgttgatggtgttcaatgtgacagatacggaggttaatccaggaataaagtaatgtgggtctccgttaagagtagttcattagtggcaatgggaatggctgtgaacctaaaaaacatcttgaaggaagaactggctgtaaggggtcaactgaaatatggaaacaaaacaagaaaaatgaaggttataacactgatgaaccaggataattatgatgccacaaattatgataatacaaatttattttgccttcttaatgctttcagatcagagtgttctgcatctgcctgggcagatggaagctcagtttatgcagtacctttgtaggtcgaagaaaacaaattgccttcaggtgtttcatgatctctcgattttgagaatcaatgcgttcaaagaggtacacttccttctgtagaatctccgattgtgtgtataccatactcactatgccagtctgtaaaaacaaaagattaactaaaagtatgctagtctagaataataaaaacaagtagcacatctaaccctcttttttcattaatacttagctggataacttaaatagtaatatacggaaaacatttactgaacatccaaacaggtaggtaacatacgagaatgaaaaatacgctctatcctttcagctgaagcttcaagattaaaaacaaaaaacatggtctctttgaacaggaacaatccataagtttccaaaaatatttttttctatcaccttaaagagttttgttttctggtctgtggccaacaaataatctgtcatttcagcttgagctccaacagctttactttaaaaacacaatgttgagtggaaacagtaggcccatcccaaagccttccaagtgctctgacatattaatgatttcttggcggggacatttagaaaaggatttctgattccaataaattgttccgggtagaagtagtctctaggcagtggctggagccatgtagactgaaaacccaccgggcaagctttatataaacaacttttcaattccacacaaaccgaccctcattttcgtatgtttaattaaatgctaagtcctacagtggaatgggacgagcaattgtaaggttgagagggttccttcacaaatgctgagcaaaagcaaactcaccgtctctttatccatgagaagtactttcataccaggcccgctgtcctctatcattttggaaatgtactgcttcacagcaaaaaccacgttcatggcggcgaattgacaagtaccctacagcccttcccgcccccttttctggctaaattaacccccagtctgttggccgggtctcagctgcttcctcccagccgggattcggcttccgggagtccgggcagccacggtgctgggagttgtagttccgctggagtgtacaggggaccaagcctaccccggggatggaaaaatccggctgagacggcctgggccgctgccacgcgcgggcgttattctccacccacctgcggcctgaagatgcctgaggcccggactctcagacccctattgccctttggtgctggaggcccagcggcagcctgaagcccaagagagtggagcctcgcgaaatgaggaacctggcacaaggtttgcttggaagcaggaacgacggagtgtggctacgtgccctatttgccattaacgctttcttgcatggcagtgagagatgagggcaagggaggtggcataatgctcccggccgcttgggactcggagagacggcatttaataaatcacacgcggtatttgcgaaacagtggtcgagattcgtcttcccgggttcattgcgtcattaataggcgggaacagtgcccctgtgttgaggctgcagaggccctaattggttttcccaagacagaggggcatatgagattgaacaaatatttgttgaatgaatgaacaaagggaacgccttttagggatgtttctgggggaaaggcctgaggttctccaggagggtctgcagctagggtcggccgtgggggctcgcagcccgcgggaccaccggacctgcaagcgtccccctgccccgcccccgcctcggcgctctgagcaattggactctgccagctctaactccggcgggactctgaaactcaggcaagagccgaggtgactgggtcctttgaaatgggtaggggacacgtatccggtagaactaaaactagcgtggggatttgaagccaaaactctcaagtttttactgaatcttaaaaccatcaacttccaaatgtctgcatttgtctttacaccacacaggtctcccctctatcatggcatttgtcgaaaaggagggtagatgtttgtttttcgcacctttactttggggaattgtaaaatcaggaagataataagaaacaattgttagaaatcagtaactaaaaatgcttatgaatatttccaccaaaataatgaccagtgtttgtgaggtcaatagattcaggattaccaaataaattctttcattatattttaagaagtacacagttaaaatagaccaatagcactttaacattaatcagcttaagattatgcaatattatatataattctcaaatcccttaagggagatcagaaactactgaaatataagagatttttgtcacctctgaaattgtgaagaatatgttttttttctttcagcttttctaccaagtaaataaagcttccctttaggcattttactaatttttagatgtgttttgaaagaaaagtcttaagttatatattaaagtgaaaatgtgaatctttaaatggatacaagaaatgttatatgaacattccattcttatcaatttaaatgttcgtatcttacagaaaacatggaaacaacgctaatgaaaatcctgtaaatcctgtaaattactgatatttgaaaattcactgccaatctcctatgtcacttggtttttatttttcttacctataatttagattgcagtatagaagatttttccccattttctgtgcttttttaagaaagaaggagataaagacttgtctatgaaattcgtgcctttttaaacaatagtcagtctgtaagcaatagatggaaagaatctttatccttttgatgatttatacttgggcacataactttttgagggacgaggaaaatacctacttgacacttactaactcattccatttcacataaaatttcattgatgtcagtggcagtgatattttatacattgagcgataagatatggaacataaacattttgaacaaaataattattacatatttaaagggtgctgtgatggtcctgaagttagacagcatccttccttcctgaagaaaaccacacaagccattttaaatgtctccaaattaagaacttcttttgtatccccatacctctaaaaatagaactgaaaccaatgataaaatccaagctcttgctttgtgactcatccaggataaacccagttacttgttttgttgcaggcaagtgacagcaaatccagaatatgaagtgcctacttatttttaatttagggtataagtaaactataataacaagaaatattttcaatagtaaagacattaaatttaaaaaataaatcatgacatccttcaaatatgaatgactacattaacttaaaatcttcaacttgaaaaatttgttttcactgggtccaagaaatcagtgctttaaggatagaaaacaggaagtcaaaaaatgcagtattggtcaggcacgtggcttactcctgtaatcccaacactttggaaggccaaggcgaggccaatcgtttgagtccagaagttca

SEQ ID NO: 2395 - DNA, 4001 bp, Homo sapiens
ttttagtagtgacagggtttcaccatgttggtcaggctggtctcgaactcctgacctcgtgatccacccgcctcagcctcccaaagtgctggaattacaggcgtgagccaccacacccagcccctaagtcctgtgggttctattccttaatttctcttgaatctttctgtttctctactgccatgcccccttcaagccattctcattacagagtaagtaaccttcctaaagtacaaatttcatcgtggaattctgatgactcttctcagtcctctggatgaagagcaaaattccttaacatagctcacaaggccctaaaggatctggcccatgcctactccctgcaggcttatcaatctttagtctccttcatgctctggagaatgaaagtagacttgcaggtcctagaccaggatctcaatgtctttacatactcagcccatcctgctctgtggactaacctttctccttctcctgcttttcatcaagctaaggtctacttttcaaactgtcctcagcttaaacatcatccctccagggatgcctatcctgatcaacaactttggttcagatgtattaccttaacactcttacaccttgttttagtccttatcacacattttttgtttgtttttgagacggagtcctgctctgtcgcccaggctggagtgcagtggtacgatctcggctcactgcaacctcctcctcccaggttcaagcgattctctgcctcagcctcctgagtagctgggactataggcgcacaccaccacgcttggctaatttttgtattttaatagagacagggggttttaccatgttggccaggatggtctcgatttcctgaccttgtgatccacccgcctcggccttccaaagtgctgggattacaggcgtgagccactgtgcccggccaaagccactgtgctcggcctatcacacagtattttaactgttaacccaggcagttaccccactggggcatggagtatgtaaggacagagcactgtttttaatattctgtttccctagagcctaaaacaacctattaccgatggcatgctctgggtactcaacacatttaataaacgggtagattcaactaataaaaatttagcaagtggcagcccagtccggacacctcacacataatgttgaacaaaacagaccatctctaactttatacagtttacaatgcaatagaaaagcataagcaagtaagcaaaccaaatctaattgcaaattgaaatatgttctgtggaagaaataaatggggacacttgttaggatagtcaaggaagggttatcttcctgagaaaacatttacactgagacctgaaagctgaaaaagaagtgggctaagctcctctacttttggagcggttcctttccatgtctcaggtgaataatccagcagtgggccaacgagtatacatcgagcaactgtctactactatgtgtgtgcctcgtgtatgctggacgtcagaagtacagtgaaagatgcaaccacgcaagtatacggtaggtttctgccgttctctgttctctggagtgcctccggagagcttctccgtctcaggcccctttgaccccatccagagctctcccttctaggactccacactatccgttcccccgcctcgccccccggctccgattcacccacccaactcgagtatcagctcccagagctcctctctattccccgccctcttcttctttgtccggggtttctcccttcagggctcctctttgcctcctcccctcccttttcccaggcccggatcttgcctctgtgaaacccccataagtcgtctggtagaactcatcttcctcctctgcctccaaaagcccagaaagccggttcccagcggtcttccggggtgcccggcccccagccaaactcataccgcctaccgagactgcgccgccacctgcagcccctcaccagctcggttttgggagctcgacgctcgacatcactacctgcgggtggccaccagcggcggaagtcgggcgtttacaggcagaagtaacagagtgtcgagagactcccagtcccaccctctaaaccctctttactcttcagcctctcctactcctgcgcggatgctctaggccgcttgctctagtacccagcgatctcccttgctcaatgagtccacttggtggtacgaagacccccataaccctaagtcaacacattttattttatttatttttattttatatatatatatggttttttttttccgtagggacggagtctcgcctcgctctgtcgccagactggagtgcagtggcacgatctcggctcactgcaacctccgtcccccgggctgaagcgattctcctgcctcagtcccccgagtagctgggattacaggcgcccgccaccatgcccaactaatttttgtatttttagtagagacagctttcaccgtgttggccaggctggtctcgaactcctgacctcaggtgatccgcccgcttcggcctcccaaagtgctgggattacaggcataagcctgcgcccccagctcacattttcttttagaagaggtcattctctccgctccagtccattttctacactgctgctagtaggaaactttctaaaaacccacgttttgccactcctgtcctcaaacatttttaatggctccacatcatctacaagataaagtcaaaaatccttgaggaaggaagcatagtattgtggttaaaaacacagccatagacatttatccaaaggaaaggacataattcaacctgaggaagccaatttaggaggaaaaaaaaaaaggaaatcagtatatccaagagacgtctgcactccatatttatgcacccccatatttattgcagcactacttagagtagccaaaataggaaatcaatctctgtgtccaacaacagatgaataaaggaaatagggtgtatatacacaatggaatacttttcagccattaaaaagaagaaaatcctgtcatttgcagcaacatggatggaactggaggacatgttaactgacttaagccacgaacagaaagttaaaacactgcatgttctcactcatatgtgacgcttttaaaaagttgatttcatagaagtgaaagaacagaggatactggaggctgggaagagcagggggaaggaagggacagggaaagatttgttaaaagacacaaaattgtggctcacacctgtaatcccagcactttgggaggccgaagggggtggatcatgaggtcaggagttcacgaccagcctggccaagatggcgaaaccccatctctactaaaaatacaaaaattagctggtcgtggtggtgggcgcctgttatcccagatactcgagaggctgaggcagagaattgcttgaactcgggaggcggaggttgcagtgagccgagatcgcgccatttgctctccagcctgggaaacagagcaagactccgtctcagaaaaaaaaaaaagacaaaattgggcctggcacagtggctcacacctgtaatcccagcactttgggaggctgaagcgggcagatcccgaggtcaagagattgtgaccatcctggccaacatggtgaaaccccgtatctactacaaatacaaaaattagctgggtgtggtggcgcgcacctgtagtcccagctactagggaggctgaggcaggagaatcgcttgaacccgggaggcagaggttgcagtgagctgagattgtgccactgcactccagcctggcaacagagcaagactccatctcaaaagaaaaaaaaaaaagacacaaaattacaattttttttgagacagggtctctattgcccaggctggagtgcagcagcaggatcatggctcactgcctccttgacctcctgggctcaagctgtcctcccaccttggcttccaaaagtgctaggattacagctgtgagccaccacactggcccccaattacatttgtttgttcgtttgtttgtttgtttgagataggatctcac

SEQ ID NO: 2396 - DNA, 4001 bp, Homo sapiens
agaacaacagctcattcctgagataaggatcctgctgccatctgccagatcctgaggctgctcaaggcaagccagggatgagccagaactcggctgagagcagaggctccaccctggagaagcaccgctggaagcacccacacaggaaggactctctccatgccataggagcctgccaggcaggatggtaagcattcagggagaggggcttgggaaggagcgacaggctgcaagaaaagcacctccaccctgcaccaggctgagagattcttcaattgtcccagaccagggagcctcacccagcttttctatctccttagaagtcttctcaacctcctcccaagggttccagcctttccgcacccctccctctccttgggaagttgctcctaatgtctcaccttgattcctcttgctgtagcactaaggaagtactacagggaatgtgagaggagaggctggagagagggaagaaaggcaaagtggaagagagagctggatgggagacttgaggagagacaggaatggaggaatcacatgggctctccaaggaagaggacagtggtgattctttgccccccaaaagcaccagaaactggccatgctttacggggtgtcatctcaatagtggtgcctactctctgcttgcaaattctttctgaatcttcaaggtgcttccagaactcctgatcttccctctggaggtaagggaggggagaaaaggcggctccagctgagggtattgatgcgttaatgcagccagtgctgagttgtcctcacacacccattgacacaccacacagggggaagtccgggtccccacagcacagctggagcctcccgagtggactctgccagccctgctctcatcagacagagaagggctgcagctatcctgccggaaatgtcatcattcccatgcaggtgcacgcacccacacactcacatacacattcacgctcacacaaaggctgaaaatgtcaccccgccttcccaaattcctccttcatgccccttcatcccaaatccagactgcaagagggactcggagccctttccagtgatgttggcatagaatgccccttggtggaacttgccccaacctgggcaggaagccacaatgtccaaacttgagccctgccctgtggacctgtcctggtggggtgagaagtctctggagttgccatccccaccaccctcaggcctcatcctagagtggggcactgccctgtcatagcacagggggcccaaggctgaggtctcaggcctgagctgtcactggccatgatggaagaaaccactcagacttacaccagacttagtctcttgccctttcaaggcaagtgacttccctgccccttggccctggccttgggagagaaggagtagcgttgggaatagcacacagtctgatgaaaattgatccttcccaagctcctcctgagccctcacccaatgcccgtgcttacccctctcctaccccacctccagctcctgcagagcaatcaatccctctcctcctagtcacggcatgagcttgcagggcacctgcacacatgtgtgagcccgacaggggacatataaagatccactcaaagacctctgcactacagacacacaccctgaacatcaggcacagggtctcctggggaaaggtcccctggtaatacccacacccggctgcagcagggcaagggtgggcagcaccctgccaggcaactcaggcagccccaggctccactgtgagcccttgctgcccctttccttcccacctagcctcatgctggctaccctgccccctgcccagccccgtacctgggctcaggcacacgagtagaaggtggaatgctcctccaactctcatgtctctaggctcggtgtttcctccgtctgggctgggtatcccgtggggtcgtagtggtgggtgtgagggggtaggtggagggagggggagctgagggcccagacactgcctggggtggcaggaaggtgcaatgagtgcccagctggggagcagctggagttatttctatgggagggagggggcctggtccccgccttggggaggagtcccaggaaccctaattagcagggtgacagggtggcctacctgggcattacccagccctcacccaagctcttccctgtcctaagagtggcacaggacagccagcgggacttgtaattaggcacctgttaaacttcacttcctcctggccacatcctcagggtgacaacagtcacctcatttacagcttccaagggctcccctcaccactcatttgctgcctccttccctgggggaagtggggaagaggaaggagaagccaggcttgggagaaagagtggccaggacctgaagagttaatcctgatcccagggcatagggttccccaggagtgtccagcccaccttcccccaggcttcaggcctttcaaagggactcaggcctcctgagctgaaagaggagagaaggggtgtgtgcaggaacagagtctcctcctggctgtcccctctggaactgtcctccacacccatactcgactcaaggccatccccaagtgtaggggacccctgggagcaggggtgctatggggggtccagggtgtgtgctaggagtaaggtgactgatgggctagtgagggagtgttggagagaacagcgccaagaggaccagggaagggggtgcctgtgtaagcgtgtgcacccctcagcaatgtctgtgggagggaggcaggatgtctgtgtcagggtgtctctgtgaggatggctaagcccctctgagtgaacttcttgagggatcgcttggtgtcctggcttctctgcccagaaagagtagccaggtcttgagggttaatgcagtcccagtattaactgggtccttgagaccaaggaccctcataacctggactggtcatcgggctgactaaaccagcacagttctgggtaagttcgtgctggggtggggagggtcctggtaggcatggggagcaagtgaagggccaccccttgttggcttgtctaagggggacagaatgggcatgtgccttgttggactccatggtgggagtcaggacatgagtgaccccattcaatagctcaactccctcaaaggagtcagggactgcccccatccctaccatggggcacagaaagggcagaggaggaagagtgttagggagagttatggggctcagggatgctgccagggcccacccctctggggaaaaataagtcagaacattaaggaaacacaaggagtccacgcgtctctgcattccaagccgttgcacctgaactcccaacaataacagggcgctctgagacctaccagatgtacacaatgaatatctttatttccttatttatttttaggtttatgggattgtcctgctccctttgaagagcagggatcattatccccattttacagatggggaaacagagacctggagaaacatggggattcagccaatgcggctggtgcctaagctgggatacccaggtacccagggtgtcagtccagagaggtccaaaaaatggtcttggtgatcctgtggattactagacccactcacgaacaagaaccatggaaggtcagggtgagtgggagggaaaacaggtcagaccacgaacagagagattgaggagaaagcagtaacattgtggttccactaaactacagtgcaggcttcagatttaattgggttctggatgtgggctaatgttagagctggggttaagtttggggttagttgaattatgaatgaggttgaggtcagatttgaggttgggattagagttaaggttgggattagggttagaaatacagctagaattgaggctcaggtttatggctgggatttgtgttacgataaggaatagagttttagtttcatttacagctctgcctgggaatacagttagggctaaatcaaaggctgggtttagattgatttagcattgggttagaactaagtttgagattcacattgaaatag

SEQ ID NO: 2397 - DNA, 4001 bp, Homo sapiens
aatcattaatatttggtctctctttaacaaatggaagaaagaaggaagaggctagaaggcagtttccttggatgagcagaagtgaaatcaaatctcagcttcttgcctccctcatctaactctctcctgcctcagggctttccaccaggacctgtctggaaaccttatctcaagctttaagggcttatgcctggggctcctctggatgtgaaaagaaattccctcccacacagtacctgctattacatgacttaccctatcatgcctcgtaagactttaagaagcttctgcccaccactttaaaggataattgttctcatactgttatattctgttcctgaacacttaggtattttggcaaaagtagggtcaatcatcaaatataggaaatggatgaaagggttatgtccttgtacctgactacagagcttggtggcttcgagttggggcagcagaggagaaaagctgccaccagcaaccgggtatagagaaacggaggctgagagaccagcttgatgtcaggagtgagggggagagcagcaaatcaggggagtgtagtgtcatggaaaccaagagaagaaagagcttcagggaggtggtgaggacatctgtgttgaatgctgaagtgaagacaagataagaacagaggtgtaaacattagactcagcaatgtggaggtgattagaggcactgaccggaacagtatcttggtatagtggggacaaaatccatctagagtaagttgaaaaggaaataagaatatgctgctaagcgctttatgtcttagctcatgtaattcttataacaatcttatgatgtagattctaatattatccccattttacagatgaggaatccaggcacagagaggataactagatggcccaaagtctcacagttagaaagtggcagagttggatggacccagacaacctggctccagcctgtgcttgaaacctctacctcactctcctttcacaatgccacgaaaccaggatgaacactcactccagacaacactagcgacaagtgctgaaaaggaaaaaaagagagatggggtgggtagctggagaggttgtggggctgagagagagttttcttttaagacagaaaatcctgatacacgggttgcatgctgatggggataatagaggtgcagaggagagattgatgatgtctgctggaggaggtgtttgcgagctgggagatgagatggatccagagcacagaggggctgacctttgataggagctcagcaaatcctctggtaccaggaggggaggcaaagaaaaagggcacccagtgagggtagcgggtagttttggatgtgaaaagatgaaggagtacctgtctgctggtttctcttttctcagtgaagggtagagcaagataatcatctgaggctggggtggggagaagggatgggggttgtaagaggattgaagagggaagagaggtatgaaatggccattctgggggtggaggtgctgagaaaacacaatgaggaggtgaggcagggagctacaagagacaattcctaaattttatggatgcactgtctgtctctcaaatctttcatggtttttatctatgaaatttttcattttaaattgcagaaaaagaaagaggaaaaactgcctgccctctttcccatgaccgctgtgctggcagcagcaggaacacatctgaagtgatgtgataggaaatcagaagcattgcaggcagatggtttgggattgtgaaaagcgcacacagagagaaatgtagcctgggtttcttacctgtagaaacttcatggcttttcctttgttttcatcaagacccatctgtggctctttagcacatttcttaaagaagaatgtggaatgataaatgatcccaggtgaaatttatatctatctggattaaatccttgtgcttttctggaggaatcagggagcacagagcggctgctaatacagagaatcacctggaggtcttgttacgccacagattaccaggccctgcccccagaatttctgattctttgcaggatggggggaatgaaaatttgcatctctaatagttcccaggtgatgtggatgctgctggttggaagaccatactttgaacatcgagtttggatggggaaggccttagggttcatctagttcaccacttcaggtggcagaggatttcccgcacctcacagaacaaggactagaaagacgatgtctgagtccattgaaatcccaaaagattccagacacaaaatgtccttaagtccagctgctattgttggacttgtcattcctctccctccctgcaagtctctgtttttctgcaaaaacatcggagggaataatttgagactaattaacacataaagtgctaactatatacaagacgctgctctgagctctttactttattaactcacttagtctttataacagccctgtgacctaggtgctactattattaatgcccaatttactgataaggtaatgaagacacagagagattaagtaacttccttgaggtcacccagctaggaagtggagagctggaatacatccacagatcagactaactccagtttccacattatttccacactttcatatggcaaaagtaagtatgtatgaagtcttggtctctcagatttgtggattcttgctgcttgggtaaaatgtggtctgctagggtccaacatagttcttagctagggtccctgggcaatataggatcttgaaaaaaccctgttttggccagttgcggtggctcacgcctgtaatcccagcactttgggaggccgaggtgggtggatcatgaggtcaggagatggagaccatcctggctaacacggtgaaacctcgtctctactaaaaatacaaaaaattagctgggtgtggtggcatgcacctgtagtcccagctactcaggaggctgaggcaggagaatcacttgaacatgggaggtgaaagttgcagtgagccgagatcacaccactgtactccagcctgggcaacagagcgagactctgtctcacaaaaaagaaaaaagaaaaaaccctgttctaccatttttaatgtatggcccttggacaagctgcctactttattctgattatcccattgataaaatgaggtgtactgactttctgaacttttaagctctgaaagcatatatatatgcgtatatatacacgtatatatatacgtgtcctgtatatgtatatatatgtatatatgtatatgtacatgtatatgtatgtatgtatatgtatgtatatgtatatgtatatatacatgtcatatatatatttttatatatatatatagagagagagagagagagaggggggtctcgctctattacccaggctggagtgcagtaacaccaatgatggctcactgcaaccttaacctcacaggctcaagcaattctcccacctcagtcccgagtagctgggactacaggcatgtaccaccacaccttgttgatttttgtattttttgtagagatggggtttcaccatgttacccaggcttgtctcaaactcctgaactcctggactcaagtgatccgcctgcctcagccttccaaagtgctgagattacaggtgtgagccaccatgcctggccagcatataattcttactgagtttcagtaactccttactcctgcactcattcatctagagcagctgcctgaagcaacacagaccaacaatccacaggctgcagctaattctgggagcagctcttcccgtggccagctaagaattcttctgccatgacagtcactgaggaggtgtgtttttgccagtgatgaagggttctgcttaactagcaagagaataagcacagctgattagaaaggtaatttttcaataaaagtaggtatagaggactaggtagtaacatgttggttcctgccattggctgcctaggagatattgagcaaggtaacttgcctcaacatttgcatctgtgaaatggagatgattaggactatga

SEQ ID NO: 2398 - DNA, 4001 bp, Homo sapiens
gaagagggttattagggtcaagagttaccccaggcaggctccacctgcatccctgagatgagctttcatgatcctgctccccactgaagctgctcattggccctcttcctggaggtcccttgcacaaaggatctgccaccctcatggacagtcgctgcttctgaaactgcagagcatgaatagccaacaaggcatgcaggagccaacaagaggagtctctgttgattccagtgggtttctgaagggtaggggatacgaattttgaacacccacctcctgctaatcctccagcaaaaccagtcagactggatgcaaagcattacgagagagcccacacatcccatctgacctctgaacaatggagccacttgttgcaggaggagtgtttcatgtccttgggatcaaggctggaggaatggtgggcatggagaactgggactggcaggagcaggggcaagggtggcagggggagagagcttgggatttcagagcaagatcccctcatgcacagtttcacagtcatctggccttaacttctctgaggtgataacgagtcttcacaaggcagtggtggacacgctgctctaagacacctagtgcagggcagggaaggagtcactcacaaaatgctagctcctctgacataggtgcttcttagggacatcctctcagggcagaagggtctagagggaagcccctgccacccactgcttctcctggagcacagtgctgtagccaggcacaggggtgggggcagaagtgccgctgcagccacccccaccagccctgcagagtccttcacctctgctacccggcaggtgatttcagataaacgtgagtcgagtcaggggagctgatattttgtttcaaggaaaagaactttctaggctgcctctgggaagtaacattactctcgtagtctcttcacaaacttttcactgttgacctgaggattcctttcctctctccttccctctcttcttttcttccttttgtgggaaaaagaaacaaattggaggactggtccttcaaacaacctctagaaccaacaagtatcagcctccctaaacactgtcctgagttgtgactgacactgaatcaatcatttcaagaaaaccctgcactttccatctctttccttccaggagggtaaatgctgttctgagggaaaaagaggcaactagaatgtagctcaggggagaagcaaaaggtaggggagggaacttgcttccttcttcctctctggggagttcagcagcagcagcagcagcagcagcagcagcaagttctcctctccaaggagctcctaggaaaactagggacccaacctttgagctgggggggcctggggaggggtgttggtgtgaattgctcaagagtagcaagaaatcacacccacagagaatgaaagcacattctcctccgtccccctgggggctgcataaagggtcctcctgcatcccctccactgtcgcagtcatggattccctgccatcccaccatgcaacccacaccagcctgctcagtgtccccatggtgctcacagccttgacatctcaggggaatgcccagcttggcacgtactcccctcagtccaagctgcccagcaagcgccagccctccatggcaggccaccaaccaaaaacctccctaaccctgaacaggtgccttgagcagctgaggtgggatgttaagtcaaatccagttaggctcttgtctggccaggctcccgctggcccaatgctggatcagataaaattacaggtggggtcctatgggacagcccagcagtgctcagcatccccaaaagacctcactgctgttcccttcacccataaggatagagagaagagtatatactacctccagaagaggatctgccccagggaagccatggctggggaaggttcccagcgtatctgggtactggctgagtggagctgccgctgccttccttggtgactcacaaccagctcccgtgtattggccttaaatagtgtgttgaggccgggagtggtgcgtgcagctgtagacggctcaggtatgaggaaactggctgtgcagaattccctgcaggcacagtggctgcctgctccggccagccagccaagccaggggctcagagctgcctttccaagtcttgactttgggagggtgacgaggaaaagcttccctggcccttgcttcagggcctgcattcagcaggactttcctcctgactgtggaagggagctgtagggagggagatttaatctcaaaataagaaaggactggaatagctcaaagtgtcaggctatgctgggagccttggggccaggagtccccatctctgctggtagatgacgctcaaacagaggctgggtcaccattggtcaggtctctcgtggaggagactcatgctgggggacctcaggaaggccatgagctgaagtgacaagaccactgagtttgtcactcaagactgaacttgcctaggtctcctgagatgcccagctgggtgtgcaattctcttccagcttcatttcagtgggagcaggagagggccagcacttcccaccttgcaatttttttgagactccaaaaagacactgaatgtgctctgcttcaactgcccctctctctggagatcccaatactcagaagctattgctgtcaaaggtgagtgggttagcaaaaatctctgacatttcatccagcagattgccaactaggcaagattctcgttaaagcctaaacgttgctctctctctctcttattctctctctctctccttattgtttcctccagcccccagaagtaccttggatgggaaagtttcatgactggttgcctggcttactgctgctgctgactgactatgtttgcagtgaaggtgctccaggccttcagcagcatcctcctagtgtttgcgtatgggcaggtggagcaaccattgagtaaagatggagcagagagaactgagtggtgaaaataaggcagcaggagagggcaaggtcacagtggaaagacctttagagtcaaacagctaggttcaattcctgggttcctaattaatcatgtggctttgagaacatcactttacttcaatgtgtgtctcactgggttgcagtgagggataaatgagaggcgggtctatgtgctttcccttccccagaataagtaaagggtgatgccctggaatctatgcagtgccagtgctgaatggtcacttcccgggtctggggaagctgagggcagtgggagcagtggtttctgtaattccaaccaaaggcacagggattctgccctacccctcaatgagccttaagaagagcagcttcagctgggcacagtggctcaagcttataatcccaatattttgggaggccaaggtaggaggaattttttttttttgagactgagtctcgctctgttgtccaggctggagtgcaatggtacaatcttggctctgtaactgtaacctctgcctcctgggttcaagcgattctcctgcctcagcatcccaagtagatgggattataggtgcaccaccgcactcagctaatttttgtatttttagtagagacggggtttctccatattggccaagctggtctcgaactcccaacctcaagtgatccacccacctcgacttccccaagtactggaattacaggcatgagccactgcgcctggctggtaggaggaattcttgagcctagcagttcgaaactagcctgagcagcatactgagacttcgtctctacaaaatttaaaaaaaaaaaaaaagaatccatctagtaacaggaaaacaaacaaaaaattagctgggcatatagtcccagctgctcaggaggctggggtgggaggatcacttgagtggggcttgaagctgcagtgagccatgatcgtgccagtatactccacgatgggcaacaaagcaagatgctgtcttaaaaaaaaaacaaaaaagcagccccacctcaaacaccctggggcagagccatggagtttctctctt

SEQ ID NO: 2399 - DNA, 4001 bp, Homo sapiens
ccagctagggctccctgggccctgcctcctcccgcataccgagaatggagcccctcagctcttggacaatgatgtgcaggtcatccacgtccacaaagtgcaggtgcttctcggcaggggctgaggcagcggctgacagctccaggaagttgcctcggccggtgctgacaatgaacacggtgacgcccaggtccttgagctcctgcatgggggggcccacagggtcgctggagccgccatctgtcacccacaccagcactttgggcacccctggccgggcacctgatgcttcagcaaacagctgttccttggcatagaccagcgccaggccagtgtgggtgtcacccatgcgctgggcagaagcacgcaccgcatcctgggcagcctcacccgagctgtgctggccgaaggggaactcggtgtatggccgactgcccacgtgcaccagactggcacgcagggccccggtgcccaggggcagtggagccaccagctgccccacaaactcccgaacccgggagaactcgtagtgagagacgctggctgagctgtccagcaggaacatcaggtcccctcggggggctgatgctggtggacctgggggaaaggaggaatgctcagcctcaggtgtgggccccccagacagccccacagcaaggcagggtcccccagggccccagctttccttaagtggatgcttgccttctcccaaaggtcctaggttgggggaaagaggaactctaagcaagaggcctgtacttttgggggtttcactgcacactggccatgggatctagggctctctctgggcttgtgttatcccatctgtgagagggcgactctccgctccaagcccccacaccttcccattcctcacagaccctgcaagcaggtggagccaagagtcctggcctaggcccccaggacaggcctgagccgtggggctgttccctccaggcatggctttcagaggagcagcctgaggctggagttcagccacgcagctcagcctgcaggtgaggcaccctgggcatgcacacagcagcaggggaaggtgtcggaggcacagcaatgaccacgccggatggcctggctggagcccagaccccgcttactagatggtggcccctcccctggcctccatcctccagcccacctggactcacacaacaagatataacccccagcagcctgaaagccggaacagcccctcgcaggcttcccccttcctccgggcacctccggggtggaggctgatgccccctacaccgcccctccccaccaagccagggcaccagcgtgcctcaattctagtcccggccttgcggttttccccagtgcggtggggcgactccaacttccctaccatccctccactaagggccctcgcaagggtagggaaactgaggcaggggtgcccccttgacagacatctccctcttcctgtccaggcccgcgatcccgcagagatgcgggccgggacggcccctatgccccggcgctcacggacggtgtcgcctggagcacctgggccgccagcctcaggtgagcaggacgctccgcccgcgcccccgcccggctcccgcagcctcccagcccgcccgcccgtccggagcaggggacagcgacggccttgcgcgggcagcggcgcagagcggtcaccagaagccccagccccggcccggccgcccgccgcactcaccgcgctccgcgccgctccgcgccagcgccagccgcaagctcagggccaggccgagcgccgtccaggggagcatcgcgcgcgagggacggggcgcgctcggcaactcgctcgctcgctcgctcgctcggggctgcagggcgcgtcaccgcgcggaccaggccggccccgcccccgggaggcccctccccgagcggccacacccacgccgaggccacgcccacgccctccggcgcgagcggagggccacgcgcacagaccccggagaggcgcgcacgagcggaccccgacacgcagggacacgcagcaccagccgagatacgaccgaggcacgcacgcgcaggcacgcacacacacacactccagtctccctctcccggccgaggctgtgcggcccacgctctccacccctctccgacccccagccgcgggagccgagcagggaggtaccaggctaggccctccccatgcccaccactgccgtgactctgggtgctggggtcccagcagccaggcccaagagaaccccaggggctggcggtggcaccaaaaaaacacgtccagaccgtggtttcgccttggcctccgcgctggaggcggataggtgtctggagtaacaggacatgtatcccagggactgaccagcagggatgggaaggaccatggggtggaacttacaaggacacagtggcttgaaaggggacagaagacaggaattcgagagagactcgaagcacccacgccacctgggcttcttggaggaagaggcatgggagtgggagatggttggttgaggccctgtccagtgggaccacactgggcctgttacccatataccctacccagtgaggggcccagactccaggacccaggacacacccccagcaggactggagggtcccactggtgagacaggagctcttgagtcttggggtcttggtgaggcccagacgagaggtggctggttgcagggggcgtcctgagggacagtggctcccagggcagatttcccctgcttgggtggggctgggccagcagtgtcccctggacaggagaaccctaccccggccctccctcggagtagccatggccctcttccagggcctcctcagctcagagctgggaggtgggggacgtgggggggtgtctgccaggatgtctcctccttccccaccctctcctggaggatgcgccgcgggagaacggatggggctccacaggcttccttcctccctttcaggcaggtgagacaccgcggggccgtgcggacggccagcactcgactttgcctaaaaaaggaagcagcaggctgaggctgaggagctggcggcaggaacaagggagagctgtgtccccgccggcgccccccaccccccctgccggggatcttggcagtggaggtgctggctgcgctccacagacctcagacctcggctgggaccagaaatgcctggtgcttccgcctgggcccggtggggggactttgggtccccagagtgcaagctgtaccacttcgaggggcctcgccaggccccccagcccccagtacacaggggctgccgtggagatgacgctgaaggccgcagccgctggaggacctggggtctgaccggaagctggctgcagaccctgcggaggcacgtccaggtagtcaggcagggagctgggccgagggtcccccaccctggggaggctcacagccagtggcccgcttgtcccccaccctcgcccagcaggcgggccacagtcacacctcagccagccttgcagggctgacggggaagtttccctcacttctggaaaaagtgagcgggtcttcttggctgtgactcaggccctcaaggaagcggccgccctcctcccttcagctcgccatcagcgggagaaggcacaggaggcctggcctccacccagcctgggccgagctcagccacctgccttgctcccggctctgcctggagtccctccagctaggagaccctccccatcagctctccccgtgcccctcagtcttcaggactcattcttgtgtcctgccctccccccgctgtctccaccccggaggagggacgtggacagagggtcccagagagcatggggtcagccagaggtgcagtgtcagggcccgggccggacttgaggcagacaccggaggaagcacaaatataacagccggaaccctccactctccagggagaagggcccggggtaagaggcagaggcaaggacgggtcaggccagatcacagtgggtgctggccccgagccctctgcctcctgcaggcacagcccctgtctgatcc

SEQ ID NO: 2400 - DNA, 4001 bp, Homo sapiens
atttccaggtcaggagccttggcacatctcaagccagcaaggcagtggggtctgcaggccacccacccgggcacagtgaccaccagccctgcaccatcacctggatggggctggattggagacaactgaagcactatccctgcagacagatgccagccaaggctgggtgatgagggccccacagccacatatcagactttggggaccctgcccagcaacctttgggtcaagttcaactcacaattctctgcatgtgcacacgtgtgcacacacacacacacgcatgccactgcactcttaaatccctgcacagcagcaaacacagggtgtcccccacatgcacccacaaacacgtaaacacatttatatacacacacagacccacttaccaactcatgtagttccccgatacacgtccctaccctccaggtaatccccttacacacacatgccctaatatacctttccagagcatatgcctgcatgcatcacacgcacacacatgcacatgtgctcagccccaccggccaacccagctgaccacagagcctcgtggcctcaccacctcttcccaggagcaggaggaccagagctcatctagacccctttgagcctcgtccagtccccatgagctggctgggtttagacaggtgagcccagggaaggggctgcgcctcagcagagaagacttacttcctaagtctaaaaaaaaaaagaaggaaggaggtaagggaggacaggagggggggaggaaagaaagagagagagagaaagaaagagagggaaagaaaagagaaagagagacagagggaaagaaaaagaaaaaaagaaaaaagaaagagagaaaaagaaagaaaaagcaaaagaaggaacggggttagtgggagaggcaggatggtgtgacgcctgttgctcttcagaagggaggagggaaaggttctggcccccgccccacaggcctccttctgctgctgtggtgccggcggcgggagcatggggtggaactgttggggctgccgcagacgttatggtggaacttccagcggaggcttgatgcgttagcaggcgccacactgcacccgctgctgagttcctctccactagccgcctccttctgcccgaggaccttttctccttcccctcttaccttgcaggagacacggggctcaggaaagggtgtgcccttggccggtggctctggggatggtcacaagctgcggggcatccgaagggcagcaggcatgagcccggctgccggggtgggcaccctgcagagctcctgactgccccagagctctggaggacaaatgagggatgatgggggactgaccaggaagtggtggaaacaggtggcagggacggaaggttgagagagggaggaaggaggcagagagaagagagagacagagacacagagagaaggagacgcagactcacacagagaaaaaagagaaacagacacagaaagcaaacgagaaagagaagagggagcaggagaaggggtggggagggagagaaatagaggagacagaaagagagagagagagagagagagagagaaagaaagaaagaaagaaagagagagagagagctggacctgagtagcaacatgtggccatgctccctcacttcttatgctgaagcatcctgggctcctccccatggtgcctgcacacagtgtacacaccctgacacacatgcccatagacacacaaactcaccacacacacacacacacacatacacacacacactcatgcatgcccttgcccacccagagcagcccccttgtccagcctctcctcctgacacaagtggggccagcccttaccttaccccagaagcaacacgtgtctgggtacacactctgtctctccactgccacagtgactgccttctgcacccagcactgctggaggtgcggtccggggctgggctccagtgcccaagccctgcgcccgctgccctggcagctggcttgatcaatgcccacattgcgatagctgtttaggtggcctgcaggaggccgagccatttgttttgtcagagcgtaaccatgacaatcaccccatacgcacacaccgctggtgctgtttccccacccctcgcccttccctccccccttctccggagcacaggagaaagctggaggccacttagcagcctcagctaatccctgctgaggctgaaggaaagggcctggcctgtgataacagtccttcgggcagctcctccctggggagtggggctgcctccagggtatttcaacactgtgcagagtctgcctgggccaggggtacctactgcctgtgcaggagctggcccctctatatctccctgccccccagcaagtttattttttagccaagtgttacaagctgccaatccattctcccccatgaggccacggtgtagtgaacagacagtattggtgaccgtggtcatgggcaggtcctctgccggggcctttggccatgcctattcacccttagagtcccaagccatcccttgctgctcctggccatgccaaagccacacgggaaattgctaggattctaggtgcagcccctgggggcatcagactggaggtctggcctttggagatacaaagttgcgtagcccagagagccaggggcttgctataatcaaggaagccagtggccagctgggttaggactgcaaaatctaaattcagagcctagagttaaagagttcaaagttgaaagatgcttcagaggtacaggatgaagcaaatgatcacacatctcatttaagccttataaaaatcctcaagaagagggcctttcttccaagtttacagagaaattgtgatttggagaggcagagtgacttgctgaaggtacagagccatgaaatgacagagcagggattcaaattcacagtgatcccaacaccggaaactccaccatatcttattggctttttatagctgtcactgtgagctgggcaccgcacacatagcctggaagaagtgcatctcacttgttctgtaccaaacactgggaggtggatgctatgctatgttcatttcaaatatgagttcagagaggtgacgtgagtttccttaggctacacaggacgtggaggagccaaagttggaacccaggtctgtctgatgccacctctccaccctacctccttctccacacaagagacttcatctgggacagatgatcagcccctcttctggactctctgcctaaggagagaggagcctgaggataggataggggtagtgggtggatgcaatggcaaaagggagcacagatgtcaggtggggtgcaagaactccctgctggggtaacagatgatatgtgatcttagccagaagtccatgaaccagtgattccccattatgcagtcacaccttagggttccaaaagagttttgaatccccccccagaacttcatgaaacatgctacctgaagtctcaggacttccccatccatgaaggtgtcagacagttgaaagggaagccccagcaaaagaaccttagagaacattctggagggggaatttggggggactgctgggcagagggaatggaggaggtgagaggaaggtgaactagacacgggcaaatgaacttctcaggcttggctgttttgcctggattacctctgaaggccggctggggtgttggatcagtctccagagagaagcaaaactgctgtcataggctgaggagaaaatgataggttgggcaatggaaaggtgcctctgtcatacaagaactaaccaaggatgagacaaagcttaccttcagttcgatacttacacttgctcaccttgagctgggccttggagccagtgcttggggaaagtgatgatgagtaagacacagatttccaggaacctggcacacaggttcccaaccagattttgtcccacacaacagttccctgaagcctttctgcatgcattattttatttaaccctcataatcacccagtgcagcaggtaccatcagccccgctcc

SEQ ID NO: 2401 - DNA, 4001 bp, Homo sapiens
tcagtctttcaaaaaaccacattaatctttcaaaccatcattttcaatgactgaaattatatgtagatttatactttaaaaaaatactctcacatttaatacttattctactcaaagctaaattaaaggtttagaaacattcatcggtactggaaattctacatcttgaaacaatctagattaataattaactttaatagccctattcataaatgccactgaaacaatagtagaggtttaagaaattttttctttagcatttataatgacttagtgtcttaaacttccctgggcagtcattagcaggctgcagtttgtcttttttttctctctctctttgattctctattctcaagacatcttcaattctttagtttggaataaggggaagtttgggtctacggcttagctactttgatagcataggtgttaatgtgctataaattataaataatcatctcattctagttctgcagaatcaaaccctcaaatttcaaggagaggaatttttgataaatttatctaattttgaattgtcttacctaacattgctgctgaaatttaaggtgacatttgaatagttgtttgctgacaagcagctttccggtatatattaatatattagcttataagaattttgtgaggctcacattaataaaaaacggaagttcaaaaaatttatgacatgactagaaaaataagttgaacttaaattttggttttcataattactctcattggctttgttttggcttcataatcatggaactatagattttccagaggttgaaagaacattaacgtgtcaatcagtccagctctcttcctccactcaatatgagcaaaaaaagaagaaaagtcccagagagattgtgacttgtcacacagctgtcaagtggcagaccaaacccttgacctctaggctaccttcctgtctagcgctgttttcaacacaacagttacaataggtgcgacatcctcacacctactcattatggcaatacatatgcaaatgatgccgggaaattacctaataaaatcacattctctcctttctctctagttcccagaatatatctcccgtagataaagtatgtcaaagtgcttgccactgagactgtacttggaagacgtttggtaaaatcctgaataactgaaagggtatcccctccccctgacttttttgctatgagggtaaaattccaaatatttaagacaattcccaataagaccaggccgcgacatggtctccgtacgacgagattaatggtaacagcagtgttgtcaagcgcaggacaggacaaactctgtagcagcttgcggtcactctttcacagcctgctagatagagcagtgctgtggagccaccaggagcaaccagaatggaagatgcactgacacttgctcaagtaccacactgccaacctgctgccccgacccaagctgcccaatgcctaacaaaacttctctactctctccgatagccccttagcgtgttgttagggtaaggagggtaaaaacagtaataagaccacaagaagagcagtctctaaaacaacccgtctctgaaaacatcacacgcggggtaggctcaccgcgttgcccggcaacagcggcggcgctccgctcccagaactggaggtggcggcaagaggtcagaaagcggcgcgctttttccaccaagaaacctttacgtcatcacgtatccttgcaacgtcactacgctctgagcaggccgacagtcatagacgagtagaccttaggcgagggaaggcatgtactttccctaagaagcgggaggagagaaataaatagagggcagtgggatgagaagaacctcgcgggatgggaagccgcggagggaagggccgtctttggttacctggagagcgggagcagctgcggatcccttatgaagtgcccggatgaagctccagcgctcacgcgctttccgcattgagtgcagcgccatcttgagaagggcggagccgtcttgtttggaatgacgtctgttcagagagccaatcccagtctcgcgactcctgcttgctgggcgcggcttgggcctccaggctgcgcagcgcagccgctatcgggcggactgcagttcttgccgagcaggtggggacaggagcggggtggggctttagtgtttttccctggatcccttgtctgctcagccttcctggaaggagaatttccttgggggttattagtagcaacgctttagactggaagaaagtcaagtaggctgcatttctgatcttagctatgtgaaggcaacctttaaaaagtttgtttagaaactcccagttctcttagagggtaatataagtggtctttttagacatgtgtggcctcatttcccttttttttctttgagacaaggtctcactctcgcccaggctggagtgcaatggcgcgatctcggctcactgcaacctccacctcccagactcaagctattctcctgcctcagcctcctgagtagctgggaccacaagggtgcgccaccacgcccggctaatttttgtattttggtggagacagggtttcaccatgttgcccaggctctctcaaactcctgagctcaagccaagccatctgcctcggcctcctaaagtgctgggattacaggcatgtgccaccgcactggacttatgtggccttatttcattcgtcctgtaaactttgttgaaccctaccgtaatgtgctgggcactgaaggtacagagaaagacatatcttgtcttcaagttgtgtacagtctaatagagtagcggataaataaatgatgtacacttaataggtgttaaagaagcaagcaccgcaagttttaaggaggagtggttatgactgtggtgtttcaacctagtctagggaaggctgcaggaaggttatacctgatggaagaaattgttttgtttggggttatgagaaagtttaatacagtttttctgcttctgttaattcacctaaaaatctcccagacagataacgagtgtttcagtaaaaatataactggaagaaattcatgacaattcctttatgtgttttgtttataattcatccagctactgaaaattaccaaggagaggtaggagataagagatgcctataaaggagctgaaatctaccagggtaagacaaaacagtaaattaaaaccatataggataatcttgtaggtatacaaagtactggtgaagttcaagtataattggtgtaatttagaagtgagcaggaaagggatgaaggcaaaaaaaaaactaggaaatcaagttatagtcttcaacaaagctgatcagtttggttttggctgttaaatttgaggtgcttgtagtacttccaaaatgtgatgcccattaaatagatacatgggtctggagctcagaagagatttgaactaccaaacagatggtaattgaaaccaaggaaatccttgagaccatcagatagagtttgtggagtgaaagtagccagatgatggaaataaaggagccaagaggtgttgtagaacccaaagaatgtgatattactgagaccctggaaacaaaccttgccaggggaagggggatatatgttatgccttgtaaaatgcagtttaataaatgccctacatgttttactcatacatagagcaaagcattatagtacagtgttttacatatattttattaatgagattacatgaccctagcaattagcaagattagctttctgacatctttagtcatctagatagcaagataaaacctagcaataagactatggtgcaccaaaagctgtcaaagggtgtacctactttatttcttcaagaagtagttcttagtcgtatctgcagactcctatgaccaataatatttccgtgggaggtatttccaagacatagtcccactaaaaaaggtgggactttaagaccacaagttttataactttagtatcctgatttttaaaattgaaaatatttgctaatttttagactttgttagaagtaataaac

SEQ ID NO: 2402 - DNA, 4001 bp, Homo sapiens
ccaattttcttctccactactgacatatgagaacaatacccatagccgtccctactattctgattaaccaaaagctctgaggtttggaaaaattaagggcagcaagttattgcacccaactaccgcctaccccaaatccacaatcttcactcattagaagtcaaaaaacaggttgcacaaagaaagggatattaagcttaatcagaggtgggctattgaacctttcacccaagaaatccaaagaaatttgaacaaatgggaaatttctcccatcccaagaaaatgtggccctctgatggaggagaagaagcgaatgggctggcaccactctgaaccaaagtctagtctatatacaccaatagctgctgaactttttctacaggcaaccctaccaggattcaaatggagctctctgaggtcctgacacacacttcaaagggacttttacgacttacaaatagttctttccaacttacagactgaataaaggggctggacttataattaaccttccagagatcaagactgtccccatgccagaagtcaaatcacatatctgaggccagacctctgcccccatttgtaacaaggcaaacttccctaacactatcttttgagtgggcagtgacttcccccttgcccagtgattctcagaggaaacaatttagttaagtaacctctgccctttactgtgcgaccttgggcaaattacttaactcctctgaaactcagtttccttatgtgtaaattctcaagagtcactgtaaaaaaataagaacatatgcctaagcaagggttgacacctagtagggctgccataaaagttcttcctcttccttctaaccctcctgaattctggacctaaattccaatcagagccccaaggggctccaaggagtccttcctcttctccggttctatggacaaccatattaaaactttccctctcagaggctctaggattcctggagaaccaagaggaccccagctcaccccatcatggtctgggtagcacccacgtcctccttggaacagcccctttagacaactctcctccttactctgcagactatcctgtacgcgcgcacacacacacacacacacacacacacacacacacacagtgtcctcctcaatttagcaggccggggcctcaacgagcacctcaattacttcatggtacacacacacacacacacacacacacacacacacacacacacagtgtcctcctcaatttagcaggccggggcctcaacgagcacctcaattacttcatggtacgtacacacacacacacacacacacacacacagtgtcctcctcaatttagcaggccggggcctcaacgagcacctcaattacttcatggtccagagatggaaactgaggctcagcctggggaagaacttgtccaagatctcagacaacagctgggacccaactcctgtacatacatctgccgacgaaaccctcgttttacacagggggtaaactaaggcctagagaggaaagtgacttgctcaagatcacacagcgagctgatggcagaaccaggtcaggccgggacactcatagtccctcagacttgtggacccctccaagtttccgaaggggacttcgggtcactccctccctccctgagggggtggggtggactaagacgccaccccgcgctgaccgctcgcccggcctctgccagtccgcagtaggagtcccggcacccagtcccccgagaccctgcacggctcgggaagagcggcccggccggggcccgcgcctcccagcggggtctacccaaggggacttgttgctcacctggcctcccgcagtcgccgtcagcgacaggaagggtcggccggccgcccagtctccgcacagagtgtgctcccgcggaccgcctcgcgggctgccaaacggccggaccccctcagcgcgctacgcccccagccgcgctcgccctgcctgtgtccgccattacgcgattccccgccctgggcggcagccacaccccgccaatggccctgattggctcactgccccacccacccggggcttcggggcattccattggcctgagtaaaacgccagttaaataactacgcaaaagacgtactcacgggtaccctccccagagctccacccgggcgacttccgcaatcggagtaaacagcggggtgcaaaccaagtgaagtggggggcggagattaaggtaaaccgactcctaagttcaaagtagggaaagctcacctaagaaagtgtaaaaactcgtacaaagtgtgttgaaagaagaattcttcttgttagccttgaaagaaccgctagatttagtgaaaggaaggggccaagcccgtaaactttctgtggacacccctcaagttgcgcatagtgttgtcccttcactccggtctcagccagggcagaaagtagggtggggagagtgagtcacaagctctatcccgtcctgcacagtccatccggggcaaggcccgggtcctgggaatgggggatagtactgaaaagccatggtcaagtgagcggaaccctggttcagccacttcactctgcgacctcagacaacttccagaatttatctgggtctcagtttgtccttctgcaaaataggagcagtcgtctgtgcctcacatgcgggagtggttgttgaggactcatgcatgagtggggaatatgctcgtcttgttgattataaaaggctgcagctgtccgggcgcggtggctcatgcctgtaatcccagcactttgggaggttgaggcgggcggatcacctgaggtcaggagttcgagaccagcctgaccaacttggagaaacccccatctctactaaaaatacaaaattagccagccgtggtggcgcatgcctgtaatcccagctactcaggaggctgaggcggacaatcgcttgaacccgggaggcggaggttgcagtgagccgaggtcacgccattgcactccagcttgggcaacaagaacgaaaccccacctcaaaaaaaaaaaaaaaacaaaaaaaacgcccaggcgcggtggctcacgcctgtaatcccaacactttgggaggccaaggcgaggcgggcggattacttgaggtcaggagttgaagaccagtctggccaagtgaaaccccgcttctaggcggatcacctgaggtcaggtgtttgaaaccagcctggccaacatggtgaaaccccatctctactaaaaatacaaaaaattagccgggcatggtggcacatgcctgtaatcccagctactccagaggctgaagcaagagaatcgcttcaacctcggaggcagaggttgcggtgagccgagatcgcgccattgcactctagcctgggcaacaagggcaaaactctgtctccaaaaaagaaaaaagaaaccccgcctctattaaaaacacaaaaattagctgggcgtggtggtgcgcgcctgtaatcccagctacttgggaggcaggagaatcgcttgaacctggttggtggatgttgcagtgagccaagatcatgccactgcactccagcctgggagacagagcgagtctcaaaaagaaaaaaaaaaatgccacagctagatagaaatgtgacaaattaacatgttagcaaagatacctcacttaattctctagggcaaccctgtatggcaggtattaccctcatttttgcagaagagaaaactgagtctttctgaagttgcatgacttacccagggtccttcagggactttgaaacagccccggaactcaaacctgtttcttttggtttccattcctgtatttctccctttcaggcctggtatcatatgagaatgacttccctcccctcccctccactcttccctcacccatccccttagcattccaggaaaggtcttaagggtgccaggtcagtccctcatctctctgatcaatgtagacttgggcacagaccaccccccagctattgttaaccaccagggttcctgaggaaaagtgacactaggggtgt

SEQ ID NO: 2403 - DNA, 4001 bp, Homo sapiens
aaatttactatggtgtaggttccaaacagtcacgagttatttcctcctgctgctgtcagcttgcttcttgtctcagtaatatgttctgttagcatttacaaaatctgttttcatactaatccttttccctagggaataaagtgaattcttcctaccacatatttgtctttgagcacttaaaagattcatcaactgtattttcttccctcatgtattctggtatctaagaaccttcatttatcagtctattttttgtgcttatgtttcaatgctttcttattcagctttaaaacttaatttttagctaaacagtgcaatgatctgcctgaaaaccgaaatacttgtgccacttttaaaaagttctgttctcctccccactccccaagaaatccataaatgcaaaagtacacatcggctagcctgagagcttaatctacactctgaatgtaggaaactgactgctgctgcacgtcctccccccttcatttcattctgactccgtctcttgcacctccttcatcaggcactcccaccaatcctaccttccacccccttagtttttctttgtgtgtatacaaaacggtggtttttgtccaaggtcgctgtctaccttcaccctatgttaggtatacaaggccacctaaattgtatttgaaaacaaatggttcaccagatcagatgtccccttttcagaggcgatcatcttcttggtattaaactgagatttcagactagttagggttaggcctcttgtacacacacacaagggcctttaaacgacatcaacactgtatcttcattattcgcatcagatttattcaacaacctctttccaaatgatcccagcccctccgttcccataaacacttgtaggtgattgtctttcctgattggtagtttgcttgggttgttgtctgccacggttgggggtggggaggtgtcccacaaagatgcctccaagatacacttgaaaaacaaatcctccaaggttcattatttccaccagctctaatccacccctcccccaacacatacagaaacacactcccgcatctgtctttattgacagacaattaagctctgaaggtgcgtggggagaagtcattctttgggtttctcctaacccttcctaacccctcaacgcctgtctcgtctcacaatttgtcagactgattgattttcccctatttcctttcaggtccgctcctcctccccggtcgccctgagccgcgtcctcctgtgtactgggtcctgcgtgcccagcactcattctctttgaccgagctctttcaagcccccctcccccctccgccccttcccctacccccctggagcctccgtccctcggtctgtccatcaccagctggcggtaagggatacttacttgagccctaagccattcaagtgctgtcctattagcctaatgacatcctcatctgactgggagagccgcttcttcttcttgaggctgctgcccagttctggggtggccaaggaagaggaggcggcggtggtggcggaggcagctgcgacggtggctgaggatgcggcggccgccccgccgggaaccccgttattgacattcaggctgttgctattgttgctggcggcggagggggcggaaggcaggagcccattggcgtgggccaggtcccccgcggacgacgacgacgagggggacgactccccgttctgggccgacaagcaggcgagttccggggtctgtccctggcccccgccgccccctcctcctccaccgccgccgccgccacctcctcctcctcctcctgccccattggcctgcatgatgctgccgctgaccaggctgtggccgctacttcggtgggggacagcagcggcggcgggaggggcagcagccgggggaagtcccaccactaccaccacggaggaggaggaggaggaggaggacgaggacgacgaggacggaggggagaggcctgctctgcctgccgaagccccgggctctcctactccctccgccgccgaggctcggggtttcttccgcgggggcggggaggctccgccggtgtccgagtcggaggaggaggaagcggaggccagagtttcctcgccgagagaggccgtggtgggaagccggtggggcgaggcgggggaggggaggcgggggccggggagagggtcggggtgaggggggccggggaggcggggagggggtcagggtaggagggtgagggtgagggtgagaggagggggaggaggaggagggggagaaggaggatccgggccctttcccccccccctcccggaggcagctcggggtgcgcggcccgggggtcgcgccggggggcgccgcggggcggctgcgggggcgcggggcccgccgctgggctgagccccggcagtggctgcggcggcggcggcggcgggcggcagcggaggcagctgccgcctctgtcctcggatccgctccgctctgctccctggtgtgttgattcttcccccagctgctgcctaatggagtccaggcgctcgcgtcacaggaaatgcctatactgccctcctcactcacttccggtggcaggtatggaacctatagggggcctgtcacccagcacgtgcatcgggggctgtcccgggggtcaggggagggaggccagcgggccggcggggtccgccccgaccccatccacgaccccgactcctatccgatcctatccccggccccgctcgggcctttccccttgcgccctggctcggctggctcgacgagcagtaagttcgtagccgccctccgaagccgggcgtgcatgggatggcagagttggcgtgcgtgcgtgagtccaccagtgtggcatgggcatgtaaggtgcgcggagggactgcaccttctccatcaggtgcagaaggtgaggatggggcagggggctaggagcttcgacaggcaggaacttccaggcacagggctgtggtaggcccctctcaatggtaaccaggaccgaaatcgggtttcacaacctacttgttttagggtggaaaaacttgaatttccacagccaagtgccacacagttgctgtacccggggccatcccgggagctgtgagataatgagccggtgagactctgctccaccctgggaaggggagttagtctagaggagcatatcttatggggacaagaagtcacaaaaaggctgtgtggtgtgtagagaaggggagggactctgctgttgaggcttcactcttttttagcacttgcccagcacctccttctctcttccagctgcctcttgagtcactgcccagtttagggagcagtaacataaaccaaacagttgcctccaaaatatgcattctgagaaggattcaggcacccattcagatccaggcttgaaatttttacgtggcatgtgagccttctgtgtcatcatgacttaccaatttatgtgaatgtagaaatgcagcaacaaagactgggctgaatcttaatcattggcaaatggtgtgcattatccccaaacaattattttcatgtatgtggttgatagcatctatactcaatatgtataaagattttctcagaaatttaaagtctttctctgaagtagttttcctgtggggaggggaaaaaaaacaccttagtttctaattaatacatcatacatcgctgatatttattatagtaataactgaaagtaattttgaggcctttggagacagttgtttttaaatttggaaatacaataaaaaatgatgctgatgagaaattagtaaagaatcctgaggtttatggatcctcagacaggaagaagtaagaggaaggtcaatgcaggatcttacagggatttggttttgtagttcttactgcttaaatttgcttccaggtggcagctgtaattgcaaggtgactcacatacagtgtttatattcacctgaggccgacctgagttctagttgaggttcatagagctctgtcactgtatccagcagagcctgaattactagatagttaacaccctcag

SEQ ID NO: 2404 - DNA, 4001 bp, Homo sapiens
aattcctcttattcctccagactctgtagttgttccttatgtttgtctgtctttggccatctaccacctccttctacagtgttttccttggagaattcatatagcatgcctaggtccagggactcccatctgtctatttccagtcctttccacctacatgaatactaattatagagtttccaatatttactgaacatctccacttgaataccttatagtttcacatttaacatgtctataaccaagcctaccttacttctggtacccctctcttttcttctgacactaagacacaattttcccagctcttcaggctcaaaaccatttaataacctttgaattattaataaaaaaatattattatagcagccaagatttagagagtgcttacgctatagtaactgataacattatgcaattgtttaattacatacagcaattaatgaaaccgagctaacatatgcaaagcacttagaaaagcctctagcacattgtaaatatgagcataaaaaaattatccataaggacctggtatggtggctcatgcctgtaatgccagcactttgggaggccaaggcctaggagtcaagagtttcagaccaacataggcaacacagcaagaacctatctctacaaaacattttttaaaaaattaaccaggcatggtgacgcactcggggaggctgaggcagaaagatcacttgagtccagaagttcgaggttgcagtgagctatgatcacgccactgcactccagcctgggtgacagtgagactctgtctctaaaaataaataaacaaattctccacaataacaccacaagggaagtcactcttcctatctctattttacagacaaggaactcagacccagagatggcaaattgctaactcaaagtcatttagcagctaattgccaaagccagatcccaatccagccagtctaactccaaaatttctgcttttaaccactatgctaaactgcttctctttgcctctttctctttagtcaattccacctgactgttactctgaaacaggatccctttctctccagcactttcagttccagctctttatcactggattactgcactgattttccacctagcacctccgcctccatgtttttcactcttttcatttaaacgtcataatactaccgactaatcttttcaaatgagctttccctatcctaaagccttgaaaaggctaaatcgtttgccagtttccaaaaactcatcctatctaacccccgtatttctcgaataaaccttcctgtcaggctggctagtttccttcctcgtcccgcgaccttgtattcttcatattattcgttttacttagaataacatccatgttctcctctacttcttttaactaatattatcttctgaggcccacttcctttcgagtaagcccaattctagcagccttttttcatcgcctcgatatttaaactacctcccatacaacttgcactgttcactttgttccacgtgcacagctttcgcctcctttctgacagttcacgaccaaaccttcttccgagaccccatgatctccgcttcctaacctacagcccccaaaacgatgtttccaagatgcactgaaggcctggaccgtggcaacagacctgccacacattcctaaacgagtcttcggtcaggggagggtgacggagggttccacacaccgaacacacggtcatatcatcctcaggccagcccgtgcacacgcacggtcaggcagctctgctcagcacccgcaaccgcgccgagtagctgaggggcttccaagtactgctgtggggacgcccgtagttacctgagttcccccagccctagcaaccggcctttaacacgcccgtctcggctgctgctgacatcacgaacgcctcagccagaatctgcaaaatcggagccgcagataatgctctccgccccaaccacgcacctccaggactcacctcagcctccacgaggctcccagccgattggacccgcccacaagacctgccccttccgggtccgttccggaagcctcttccgccagaggttccctttgccttctaggaggaaatgacggagaaagccgggcgctgattggtgagctctggccaggagcggaagccggtgtttcgcagcccagagcatttgcagctggtcactccagtctcctgggactttgactcgccgtactcggcgcgctcctgctgagggtcgccggagatgtcgctcggccgccttctaccaggagcctgatccgtgccgcccgccgcccggatgggaccaccagagtgctgtgagaggagggactgaggccgggagggaaggcggggcggagagggccgggggcgcggtccgaggcgctcgggactcggccctggtcaggattgcaggctgagggttagttctgtcacttctcttgaagaacgagcctggcgccacttcctcgcatgttggttaggttctttcccgaggcgttgtcggggacgccgtctctacgagaagtgaaagggtgggcagtcggcgggcactaggaacagtggtgctgtagccaaggaggcgggcgccctagggtgcaggtgaaatggggcaggcgggagctcttgctggttgtagtcccaaagacaagtccgtgttgccgttcctgtggactggacattctacggaaccgagagcacctcgggtgaggggtgggtagacgctgagcccaggatggtgcgttgtctaggttcccgcaatccctggagtgacactggcctggctttgtgtttccgctctctggccgcttgagggggaagtgaccaaggctgactcctccttgtttgctcactgagacttaagtgctctttcaccaagtgggaattagcttttctctcttgcatttctgctacttttattcttgagctgcatagaagtgtttagaaatgagttctgatgtctagagctgtgcaaaattaaagctaacatagctgtacaaaagaagatcctgccggcgcttcttgaacaaggtatctgcagccagcctagaaattagacttttgtctacattatctgattttctttagagtttcctgagcttaatgcatgttcagctaatcttccatattcaagaaaattgcaatagcaaagaatgcgtatgatgagactgtggacagctgtagcagcataggagttttgaaacaagattgctgtgtattggataaatgagaagggaagaaattgtggccacaaactattattttaataagcttggtgggaaagggagcatttgagtgggtatgtatggttaatatccctgacaggtgctgtgcattatattattatggggagaagtgtgtgcttcaatggaaaactacatagtttagattctatcttaacaccccttggaataactaattctaaaaaagctatttttcagttacgtaaactaggtaagtgacatcaatgctaaataattattgtcaagacatgcgaattctctcagagattcagtggaagttttgcctccttttgcacatttatttcaatattcctgctctaaggtgtctaattctgggattttctttatcttctctgcctggttccattttgagttaaataaaatcttgaacacgggtttggttttatatttgaatgagtcatgattttaccttttcttaaaaaactatcttaatattattaaatattatgggatgggacaaccacagatggaaaaaaatgattttaataagagttggtatcagagcaactgtgagtggtaaggtaatgcatcttacaaaattccttatacaatgtttcaaggatgtaactctacttccttatttaagtttcaaaatgcctaatatatcaatatttacaattaaaacatagtgcagttcatttaatatgaaggggtactactaatttactgttaggatatgttctttgggtgcttttgaattatgatgttaaatttgacccaagccattgacaagcttaggaatgttcttgttata

SEQ ID NO: 2405 - DNA, 4001 bp, Homo sapiens
tttttcagcttactgatctactaaggaaaactgcacatcttttcataactaaagcgtttctgaaactgcagcatacattaagcatttcatatgccgcccattaaataactaatatattctatttcacaaacaggaaaagaggttgaacaccattatgtaagtagtaacataggatagtacccctgttctcttatgacacattcttaacagtactggtttttaaggcgagggagaaaagaaccaggaagtggaccagtgggagataaacacaggttaaaatcccgtccaaaaaaaaaaaaaaatttacatcttcataatggcatccaaattcaagtgtttgggttttggcttttttacctaacaatatactgttgtgacttgacttttccattaccgtgtaataatgtttctttcctattggaagcaatctctcctaatctcccaaacctaaagtagaattattcatttcatcttcttcctaaatgagacctcgacaatatgccatataaaggaaaatgggctcttaggcgtttctccttcttagtaaaatgccaatgcaacatatgccaacactggagacaaaaaaattctacttgaatttactgtgaaaaaaagatttatagcattttttaaacctacatgttcatttctgtgccattaactttttgaggcattctacagagtctccaacaaagagagaaataagtattaggatcacaacctacgaatctgggtggaacaaagacttctcctttcattatgcagagaaaaccaagttgccaaaaaaaaaaaacggtcccctcagataccatgcacggttactaactgcacgtctgggtacagagaaggaaaaatcatctggtcaaaagcccaaatgccgccccggcctaccctcgccccccgcccccgccccctttgcccatggcctcgccccagagctagagttccaatatttttctccccaataaagggaagcggtttaaccctttgagttccacaaccttgcgttcttctacgcaggcgcccctccagcgcaatcccagttctaaatcgagtcgctgcccctttccgcgaccacacccagatccccaaaggcctgctcccatcccgaccattgatgtgagaaaggccaaaaccggccccagcggggctcccagccccgccgctccctctcttcctccgggccaaggcgtgcccagaaagggacgcgagcgcgcccctcagttctcgcacgggctcgaccaaggggcgaggaaggaagaatcggcgcagcggcgagatgggcacgaacctcgcgctcacttgctgctcagtgccagggcgaggggcgtcgctctgcccccagaatccaactggtaatgtgggaaaggtgtggtccaggaccggtgacctcgaaccggggcccagcagttcgcagatcctcaccccgcgatgctggggcctcacccacgaccccagccccctcccagtcggcacccaagcccactaaagacccctctccggggccgcaaacacagtcctcggggccgcccggtcggagccgtgtcaggtggtgacaggaggcgacgggtgaccatggcaacccgaggtgtgcagcggaccgacccagcctccgactcccggagtcacccacctgagggctccagggcaagcccggaggagcggcggaggagaacgcggctgggaggccggcggccagggccccgaagcggccggctccgggctgcggcaggagcacgacggcggcggtctgggtttggcgtcggtcctccctcctaccgcccgcgcgtcaatccatcagttcgtcaatccgtccttctcacgtccgcccctcccggcccagcgactcctcagctcagcctcttgcagactgcggttgtcaagtgccggggagccgagctctacccgcgagcggcagccaatcgccgcgcttccccgaggcgcctcaggaccccgccgcgcggggcggccaggcaggtgcctgagccgaagggcgagtcggcggggcggggcggggcggggaggggcgtggaggggcgggcccaaagctggggcggggaggggcggggcggaccaaagcctgggcggggcggaccaaagcctgggcggggcgggcgggggtcgggcttggagggaccggctaggggcccgggggagtagcagaacgggtgcggcaatagcgtgagactggtggcagggacgtagacccttagctggccggtgaccccatgtcccaaaatagcacgaacaggattgtcgcctgcaaatggagaagactgcgcattaggattgactcttcatactcctccccgataattaataaaggttaatgaaattaatgttgccttctacccttctttcgctgctttcctaggtcccacttcgtcccagaaaactccagtagtttgtttgtccccttcctggtttctcattttgcaaagctgatctgccttgaaagcatttttcagttacttaacatttaatatgttcaggttttgtctactcctgttggttgtaagccccttattccacaaatatacgtgatgttcaaccgagcttaattaagcatccaggaagtataaccataaggaagaatacaattacacaaacctgtaagaacatcattctcggccaggcgcggtggctcacgcctgcaattccagcactttaggaggccgaggcgggcggatcacctgaggtcaggagtttgagaccagcctggccaacatggtgaaaccccgtctctactaaaaatacaaaaattagccgggtgtgctggcaagcctcctgtaatcacagctacttggtaggctgaggcaggagaatcgcttcaacctgggagacggaggttgcagtgagccgagatcatgccactgcactccggcctgggtgacagagcgagagactccgtctcacagaaaaaagaacatcatcctcacagaggcgaaagtccagagtgagctggacctcccaaaaggggaaaatggggtaacagtctggtaaagagaataaacatcaaaaatatttctggcactcccatgcttattgcagtactattcacaatagccaaaatatagaatcaacctatgtcaatcaacagacaaatggataaagaaaatgtggtacatatacacaatgcaatcttttttttttttttttttttttgagacggagtctcgctctgtcgcccaggctggagtgcagtggcgccatctcgactcactgcaaactccgcctcccgggttcacgccattctcctgcctcagcctcccgcgtagctgggactacaggcgcccgccaccaggtccggctaatttttttttttttttttgtatttttattagaaacggggtttcaccgtgttagccaggatggtcttgatctcctgacctcgtgatccacccgcctcggcctcccaaagtgctgggattacaggcgtgagccaccgcgcccggccacacaatacaatcttattcacccattaagaaagaatgaaatcctgtcatttgcagcaacatggatgggacgggaggacattatgttaagtgaaacaagacaagcacaaaaagacaaatattgcacgttctcacacatatgtgggaactaaaagaattgatctcgtggaggtagtgaatagaatggtggttaccagaggctagaaagtgtagtggagggcaaaggggggataaagaggttaatgggtacaaaaatacagttatgtagcaggaataaattctagtgctcaatagcataattgggtgactatagttaacaataatctattctatatttccaaacagctagaagagaagattcagaatgttcccaacacaaagaaatagtaaatggcaggccaagcgtggtggcttatgcctgtaatctcagcactttgggaggccgaggcgggcagatcacgaggtcaagaggtcaagagatcgagaccatcctggccaacatggtgaaaccctgtctctactaaaaatacaaaaattagccgagtg

SEQ ID NO: 2406 - DNA, 4001 bp, Homo sapiens
tctcccttccaaatatcttctgaattccaagcccttctctcccacagcctcctctggttcaggtctttaacatgtcctccaaaactggagctccaaccctgttttgtgccatgaacctttggcagcctggtgaagcccatgcatcaaataaaaacatgggattacaaagaagacagattatatggaaatatagttattaaaatattttttaaattatgataaaataatttgtactttattaacacgttaaataacaaaatctagctgtggttctaataactaccttaattgtgaggtaatgatgagtataaataatatatttacaatctctttaatgtaatatgaaaagagttactaacaaagtcacaggcctgtgagtactactgtggtttgttaccaattgaatacatttcaattggtggttagtgaaaataaatatgtaattaaaaaaatccacagattctcctccctgaatcctctgccctagatcatggacacttaactggcctctctgcctctgttctaaccagaacaactactcaagaggccaacctcagagctctccaaaaatgcatctcttatcaagtctcttccctgtataatgactttttatgggtccctatcattcacagtagcattctcttccagattgtagaaatggagctcatttgaaatgcaaatttcctggacctcctttgattttgctggtctgggttgagcctgggactccgcatttttaaaagcattgtgagacagtcttgcactggtggtctatacaccagattttgcaaaacaaaatagagtctgaactcacataagtatggccttcagtactttcacagtgtgcctcactgcgtcaacctttccagttctattccagcctcacacggtttccattcattcccaaacagtcgaggactttcccacctccctctctggagaatccccttccctcccacccctcctgctgctcctggtccacaccatgcaggcatctctctgcttgcttcaatctttctcatcattcaaggcaattatgaacttttcccccaaagccgaaagcctccctgacttcctcactcaggctgaaacaatcttgttctccctgacactttccagtcatactatgtgtaattacttatgtcaggcctctgcaaaggcagagggcttcaaactctgagcttcctaaaagattgctgtgaattcatttagcattcaccatacacaagaagaaggagaaagtattgcgcagcaattaggtactgggtaaactagtcactaggggaataagacaatgtccttactttcaaagagtttgtgttccctgttcatcttcctcactgtttatctactctagccctttctaaacagtcctgaagtaatctatttcagcccacattaatcttttattgtttgacccccgcccctagacggataatcagaatcatgctgttttggcattcattcattcattcattcattcattcattcattaactgactcattcatggtttattgagttcctactatgtactaggcaatatgatagtcactgggtatatataacatgggaacaagacagtacatgcccttaaagttcttagagtgtcgttaactgctctctcgttgctatttttgtttccctcacgaggctggaagctctttgaaagcagggaaagacttgtgttttttgtagtcttcactgccactagcctagcacattgctgacacagcgagtgttcaaatacccttgaaagagtgagtaaaatacttgttttccaagccgcctttcccattcagagcttctcttacctgatactgctgatctgaaagaaaaggagcctctttgcagtgccctcaggaaaagctccttcgagagctggaggtgggagtttgactctcctctctcagaaaaagaaatcgcaagggcacaaaccgcagcaactctgccgactgttgccaggacgcatctgtcgctaagagaaaagaggcgagtcctctgcgagactgacagagcatctctaccaatacagtgtccgctccctaacagtatctttcaaagcagacttgtgattggttgccactatgtgacgtcactcaacgcgaaccgggtgaggccagcagctttccactaccaaggaaagagttttgtgtcttaagtatattaatgacagtggcccggcctgaccccaggtctaacaggctcggtccatgcctcacacccaccgcaatctcagccagagaagaatctttctggggtgtggaccctaggaaccaggagagaaaatgttaaggaggctgcccgctcagaatcctttcgggcagctttcctgcccaccccctgcagcgagctgggccctcctagggagtggagaggaagctgcgccccactggttgtcgtgggcgccccagaaccctaatgggttacatttccttcttgccagaataacttttgtttagaatttgactcaagctgtaaatatgagtctccggggaagaaacttgaatccgtgagtaacccaaggttcattttatctgtgattaggagtccggtgggattcatacagtgacgctcaactctctgaacactgttctcctcctttcccttaaaaaataattataactgtctaatttgtaaagtggcagaatttaataaagtaatgtaattgactgctgtaattggtgtaaataaattttcacacctaatttaaataaaatctttaattgagaaaaggctgatcatttataacatatgagagttcagggggctgctgcggtggctcatgcctgtaatcccagcactttgggaggctgaggaaggcagatcacgaggtcaggagatcgagactatcctggctaacacggtgaaaccccgtctctactaaaaatacaaaaaaattagccaggcgtggtggcgtgcacctgtaagtcccagcgactcagaaggctgaggcaggagaatcgcttgaacctgggagccaagatcgcaccactgcactccagcctgggcgacagagcgagggtccgtcttaaaaaataataataataataacttcctaatttgtaaactggcagaatttaataaagcaatgtaattgacttctgtaattggtctaaattaatttttacacccaatttaaataaaatctttaattgagaagaggctaatcatttataacatatgagactttaaggatcctgaatgaagatttttacgttatgtgcagaaagattatatagattctttcaaatttctgaagaatttgtgttcacaaaattcaaatgaattttacaatacaaattatgaaggaaaaaaactaaaaaagaggtattatctaaacattctgacaacttttttccagcttgtccactcccaggaagtggaagattcgttttcccctgggctcagtcttgagtcttcttttgtcactcttcgcactctcctggtggcgtcggcatcatatattccccttagcttcagccatcaccactaaacacactggacttccatttctacattctcagcctaacatatctcttaaattccatacctgaatttcctctagctactggacatttccaactacctgtgtagttcagttcatgttgtttaatagatgctaaataaagattaaatgtagtgaatgaatgaatgaccatagcaccacaacttagcagagccaaagtcaactcattatctttcagaaactttttttccttctttattttctaccctaggtaatagtatcattgtccatcagttgcaaaacgaaatctgaaagtcatccttgactcctcttctactgcccacagtcaacatatcatttaagttctgtcatttttctttcttaattgtctctcaaataatccattttctcttagccatcctctgcctctgccttatttcagatatgccttatctctcacctagacggtagcaatagtcttttgacttgttctatctctttccctctaatttatttgccaagttgccacataat

SEQ ID NO: 2407 - DNA, 4001 bp, Homo sapiens
aagaaaagagaaagtcaaggtcatgatgcttgagtatatttttagactgagaggacaaatccagtagaaaaggagattttgaagctgctgcagcaaactgatagctttgaaggggaggagaaatagaaaggacagctgctgctttcagtgattcagaagtggaaaaggggggtttgagagaattcttgtcttttgaccttgctttcttttatgacgtagaaaacttggctgagagaagcagacatcccatagagaattcagaaaaagtgtcaagggtttgaaaaaccaattagagagaggtaaaacaaactgactaggaaaaaatgcaagttttgttgagtagtttagaaggcccagtcaagttcccaatcaccgaaaaagcatatccaaaaggtccaagtcttagctttaacacttagaagttgggtgactttggccgggcacggtggctcacacctgtaatcccagcactttgggaggccatggcaggtggatcacctgaggtcaagagttcaagaccagcctggccaacatggtgaaaccccgtctctactaaaaatacaaaaaattagccgggtgtggtggtgggtgcctgtaatcccagctacttgggaggctgaggcaggagaatcacttgaacctgggaggcagaggttgcagagagccgagatcgcaccatttcactccagcctgggcaataggaatgaaactccgtctcagaaaaaaaaaaaaaaagaaaagaaaagaaaagaatttgggtaacttgggcaaatgatttatcttcagctcccattttttccacaaataaaatgaacataatgacattgattaacatgactataaattattaaatactattcaattaataccagcttgggtttgaacacccaaagtcaagattttcacttacaaattactatgcagcctggcacactcagaggctggctatactatccctttagcaattatatgggctctgctcctttcattgcaacagcagggtttgttctgttagtctttcactctgccatgtagctttatttttcacagctgtcctcaatacgccaaagctgtacactacaccactccccttgaatcttgtctatgcactggcatctctgctgcaaatcctcctgtaagaccactgtccaccatattctccttagcttgcatcctcaagatcattcctgcctagagatatggagagtggccaagacaatggaatcatggtgaggcaggaagctgcacttcttatgaaagtctttatggtctcatgatatctttaggctaagaaaaagcagtgctatacattactgagcatcccaggtcaaccagtgagccatcaaatggcagcgtctacagaagaacactggacgtcatttaatccaatcccatagttttacaattgaagcaacttcggttcagagaagtaaaaaaaaaaaacaaaaacaaaaacaaaacaaaacaaaagcttcctcatgtccgctttgttatttagggacagagaaagaacaagaactgaggtcttcatcccctttcagcacccattctttcacattaagctctgatgcttctctctgatggcttaaaacattttccagttctaaccaacagacccaattggactatcgtgtaatcactgatcttaccttctttatggataaataagcctgctctttcatctcttttctgggctgctgtttgttcaaccaatttttcaaacctgttcaaagcctttttgaaattgctcatctgaagtgccatgttgagacgcttttccttcctgatatccatagggacataggggatcttttacttctgtacagaaagaatactgcaagtttaccaatttggaaaactttccagttgttacagtgcctccctgctgtctcagtttttgccctaggtctaattcctttgatcttaaaatcccatagtgcgggtaggagtaagagttgccactaggatgttagcagggaggaaagctgatttaggtctgatgcatttcatacagacaaacatttcagtaaaaatcctgacctcacaatgtcatcagtgtccttcatagggtcctcattgcatcataatatctctgtaacatcctacttccttcataaggaggagattgagatatttttttccccacagactgtgtgtgtgtgtgcgcgtgcacatgtgtgtgttgtgtatactgcttgagagggaaaaggaatgagtaaataacaagtaagaaaactgggtaatactttctccctcgtgtatctcttctcacctcaaaccttttgccttcctcacaataccgcggaaagtaaagtttggccaggcacggcggctcattcttgtaatcccagcactttgggaggccgaggtgggtggaccacctgaggtcaggagttcaagaccagcctggccaacatggtgaaacccccgtctctactaaaaatacaaaaattagctggatgtggtggcgggcacctgtgatctcagctactcaggaggctgaggcaagagaatcacttgaacctgggagtcagaggttacagtgagttgagatcacaccactgcactccaacctgggtgacagagtgagacttcctctcaaaaaaaaaaaaaagtaatattcacacttattcttgccactgtactggatatggaaattcgaacttctaaagatgaaatgtatttcagcacctgtcatttctaccacaaacatttttagaggtcatagggaatacaaatgctcttcttcctttgtgcattgtccttcgattgaaataataaagtgagccaaggataaggaaggagtggcttctgattatgaggacagcttttcaaggtaagaggtcagatgaattagaagaggcctttctgcacatctccttcccagtcattgcaatctccaatccgacttagtccaaatgctattgactccggttttccaattttcaactttttatgggaaggagaagttgtttaatgtttctcaacaattagttaacttcctatggcttaggtgagttagataaatttcctaccccttggtagtccatcttttaaaacattcttcaagaacttgcattcagagatgaagcagatggcatttcagagcacctccaattccagtactgtcttcttggtgtccacctctaactatctgttaggagagcgcagtaagattttatttaaagaaaaatcccccaaccccatttgtttctcctcctttttcctttaaagctttcaaaccactgtacagtgatgtctggagaaccactcttcctacaattctaatgcattcaccattaattcatctaggaaatatttactgaatacacacttcatgctagaggctgttttagacactaaggatacagcagtgaataaaatagcttctcaagtttatagactaatgcagaagacagacaaacaaataaataatgtatcagtgagcaattgtgctacgaagagagaggaattttgtgtgtattagggtgggggtaaaaatcaaagtaaaagaggtagggagatcagggaattccccattaatagaaagatttctgggcagaaacctgaaagaagtgaggtagcaagtcatgtggataaatggtagaaggatgttctagggacagcaggcgtaaagtcctgagattggtgtgtgcttcacatatctgagaaacgacagaggccagtgtgactgaggtggtgtgggatgagagagagaggtagagagagaaggcaagagagtcagggggtggcatccagatcacgtaggatcttattggctgttttaggactttggcttttactctgagatgggatgtttttgagcagaacagtgacatgatctgacgtgcatttgaaaagaatcattccagctgctttgcggagaataaactgaaagggagagagggtagaagccgggaaggcagttaagtggaaatttcagtaatgcaagtaagagatgacagtggttgagattagggcactagtgacggaggttgtgc

SEQ ID NO: 2408 - DNA, 4001 bp, Homo sapiens
aacaagaacttcctgtaatcaacattccccaagtctttgcctcttggactgctgctatggtctacttacgatggactgcaaaatccctaaggaaaccttatagacatgctaaaataagtcactggattcttagaataagcccaaaatgttacctaatgaggttaacaggataggaaaggcacccacaggaggcttagagacaggagcaatgagaacagggacccaccagatgtctttgctaccactgacagcttgtgtgccagagctcaagacactgactgtagacacaatgtcatcatgctcatacttgcagaacttgctgacaataagtgtctcattctcatctagttcccacaattcaacagcacctgttgggggtagggtaaggaaaacatgagcttggattataccaaggcagtaattcacttctaggattcaaagagccattgtcactaaattaacaaagtaagttagttattcctgtaaaagcaaagtccacatcattggagagttcagctaatttctgagtctttgactttattctgcgttactgttttcctaatgacagcccagacaagtaggtgcagaaagcttccagaaaaagacaaagatggaacagtctgtaaaattcattatctgcttttagtgagagaatatggaaaatgagctgcaaggggacaaggatgaagtttccacaactgtttaagcagcacactatccagtgatgttaacacttccccaatatttggacactagtaagtatttgctgaactagttgaataaatgtcttgcagagtctttaaaaatatgttgaataattgaacgtcttgcacagtgactggttaagtatagagaatccgccaaaagttgtcttgattatgtagtgttcaagctcaactgtcagagaggttaaatctatcaaaaactgggactttaaacttccatgcaatgccggccaacttccaaattctgattttaaaaaaaaaaaaagccaaagcctgcatcgctaagcctaacagtcaacaaaaagaaagcagaatgaagacaagaaagcggtaagaaatgggaagagacatgtagcacagattggcttcaatgtcatcttaaaatcaagattatgcttggtctgggctgtgggggttaaggggcaggttacacagaagaaaaatggttccaatccgttgcttaattttgttacggatttttctaggaaatctcaccagacaatttagaattttagaaaaggtatttcccacctacacaagagtttgcattcggggccaacactctcaggctcctccaagcactgagtataggacgttagatattgagctcaaccctacggtaccccaagtctccattctaccgttccacccgggggtgggggtggataatgggatagtgactcacctgaatcggaggccactagaatacctctctccccaacccaagtgaggtcagccactccagcctccgtttggactccggcggagcagaagccttcgttgggggcggcacaggggtccttaaaaagccagagggagccggcccagcagcgcccactcaggctggaggccccgaggagaagcgccccatctacggggggtacaagctgtcagcgcgtgaagggtagaagggttcgcctccatggagaccgcacagaacagcgttccggccgggtctggatctgagctcaggaacgcggggcagggctggggacagctcggtgacgcgacccagggtcaggataacatgcagggcggggatgggctgggagggtcagtctccggggaggggcgccctgggccggggtaagggagctcccaggcccgggatctcggctcaccggaccggtaccgcgcagcctccaactgccgttccatgcaggcgggcgcatttgggggaagattccactcccgggccgccgggggcactagggggggtggggtttccttccgcatctccacggttccaactccaacctagactcaaactggacgccggccggagactccgctccggcagcaaaccccacgtggtgcacctctgagcctccgcccctctcccgagggaaccgcaactctacttctcgcgagaattgcttctatggctccatcctgctttccggctgtcgccctcatgcgataggctctcagcgttacttgactcttctcgcgataattttttttaaaaatctcccaaggaaagttgaaggaagagtacaaaattttcatctcgcgagacttgtgagcggccatcttggtcctgccctgacagattctcctatcggggtcacagggacgctaagattgctacctggactttcgttgaccatgctgtcccgggtggtactttccgccgccgccacagcgggtaaggggtatagaccctgctctggactatcagagtgattggaaagaagcgaatctaggggtgacagggaggggagaagggcgcagcgacacgggcctgagaggcgagtggtcagtgcagttcggaagggagcgtggggtcttgagggacgggaaagaggggtacataggcttagtgatagagcctggcgggggtaaggaaagggcaaaccagatttcatttgactttgctgaccttcgccttgtctatctgcagccccctctctgaagaatgcagccttcctaggtccagggtaagtgtgaggataatgctccctttcgtctttgttttcactaccttttatttcccgattcctgcccccacccccttagctttaggtcagaaatttctttccgataattttgggacacttaaaccctctttcagacaagacacttgttcctgtaactgccaggaacgctctcatgtcacctaatgaccaagattttagcaggataagtaacgtattctaactaaactagaaattggttttgctgtcttctatacccgccctactcctttgtgaccttcccttgggaccttatgacatgtagcttccacagcctgaatccgagtagatgacatacccaagaataaattttgttcaataaaacagtaaagcatgttgtttacagtcggtttcccagatacctagtttttgctgccatatgataacaatcagagaaatcattcattgattcagtaaatatttatgttgcctaaaaacataaccaaggatacaagaatgagtatggctaattacctgccctcatggagctcacagtctaggaatgggaggcaccttaagagtattggtttagagtgagggctccacagccagtacagggtccctggcccctccacttactggctgtgtgacctcaatttcctcatctataaaatggcgataatagtgcattgtggcttttgagaattaagagacaattgctgtgaaactcaaaaacagttcttggtacatagcgtgtgcttagtaaatttagcagctgttaccgttaaaattgttccataagacatgtccattttcctagagatttctctttttacttccaaacttagttctaaagcttgcaaaatacggtaactcaaattgaaaaaaaatggacttgaaaaagtggtcttatctataattaagtctcatgtatgcaaaaagtaaggctataattgactgcttccaacttagaagaaaaaggaccccatacagactggtaaacaaataattgtaataccaggtagtaaataacttatacttacaagatacaaggaatatccttggttttctttcacactccatgtccagtacctcagcaaggctcttcctctagaaatttggactctgactgctgcttccactaccgctaaagtaggaaccactataaactttcacctaggtattttagtagtctcttaattagtcttgcatctctattcttgtcccattacagcccattctcataatagccaggaggattatgtcaatcccccaccaaggccttccagagctccccatcccacttgaataaaatccaaacttagcataacccagaaggtccaacatgaattgattccat

SEQ ID NO: 2409 - DNA, 4001 bp, Homo sapiens
tcttagccagagattaacatttgtgaatcatcattataggtgatattaaagacatcagagtgaagaggtttatggactaacccagcaataccaatacagtcctggatcatcaacaatgaatcacatatacaatggtgatctggtagcagagctgaaaaattcctattgtctaacaacgttgtagttgtcacaacattcaagcacaagacattaccttttctatgtttacatacacaaatacttagcattgtgttacaattgcctacagtattcagtacagtaacatgctatgcaggttggtagcctagaagcaacaaatgcattttcatcattatgcaaacaccatttagtgtacttacacaaacctagatgtatagcctactatagcttaggtgtacagtctactatacaattgtagcctaggtgtatagtagcccatacatctacgtttgtgtaagtacactagaagatatttgcaaaatgctgaaattggctaacaaggtatttctcagaaggtatcaccatcgatgcatgactgtatttagttatggtagtgaggaacagataccagcaaaggatctgggaaaggtgaaaccatgaaccaagacaagaactaggaagagtggtttctcagaacccaaataaagcttttcaaagatcgagaagcgataaacccgaccgacactgcttcattcaaaaagaatgaaactgtggatcagccattgtatttggttgcatggctattgctggctttcatagaagctgttttgatggagtggtaggatggacaaaagcgtgagtaccatattcaagagagaatgcaaggttctctcccaagaactctcaacaagttccgctgaagaaagattagctgaggtggaggagattggagaggggaagagaaaacaaattacttagggaattttgggggaacttagtgggcagcattacgggcagcgctaaggaaccatttaaagtaagacaagtccacacagctgtgtgcttttctacagtcttgttcaactgctgcataacaacagaatgttggaagcaggaattagttttaaagtaagatggtattgacgagacgacaataaaatacctctactacagagcacagcaatgttcggcctggtggctcacagaagctgaggctcttgaacgtctgggcacagcatgaaagcatcaagcttgagagactgcaggccttaacaaactagaagtgctagaacgatggttctaaaccaggtcttttctcacacagcaagcacagcaatagagatttattttatcttattttttagacagagtctcgctctgttgctcaggctcgagtgcaacggcacgatctcggcttactgcaacctccgccttccgggttcaagggattctcctgcctcagcctcccaagtagctgggattacaggcatgtgccaccacgtccggctaactttttgtatttttagtacagacggggtttcaccatgttggccagcctggacgctaacttctgacctcaggtgatccaccccactcggcctcccaaagtgccgggattacaggtgtgagccaccgcgcccagcccagtagagattcttttaaagactgcggtaggtcgataaaggagacattgtggcctaggagcttcaaggtctacagactgaacccagttagggtagggcccctttccaaatccagaaatggtatctattaatagaagggctccctccgggtcccagggggatggactacggtttttagcgccggaacttacaacccgaagttctgctgcttgtgactgcctgccggagagactggcatggtggcgaccagctggggagtggtgcaccacccctttttttggccgcctctgaagtccctgtacccccaagctcctccgttagcggctcgggccgaggctccggaatgtttgccgggcgtcatggcgacggtggagccctggctcaacaagcggccgcgcggttggctggcggcacgaggccgaggaggagggcggaggcggaggggagggcagagggttggtggagctggaggaagctccggacgacgactggaagaaggaggcgggcggcccgggcctcaggcccctcccaggctctgagtctcccggctgcaggcggatggatggggcttcttcaggcggtggcggcagcagcgaaggtggcggcggcagcagcggcagcggctgtaagtgcagcctccacaagccatctctccccttctattccagtttgggatgaggggctcctgaggtgtcctcagtcccctttctctccttcccctcccccacggcagtgtaccgcccggaagacccttaacttccggggaggggctgccgcagaacgcgcctggcttgctctccgccggctgccaaaggcgcatgcgcagcttcctccctctggccatcgactgcctcccagcgccgcctttttgccttcgcggtggtggcgccgcgctgggaatccgctgcggagtgagttcgcctcgccccgttcgcttcggtccctgatcccagtcggggtggggctaagctgaccaccctgctgtggctccgcctctttctcctgtatttccctcacttgtgtcccatccccgggaggctctcgcttgcactgcagcctttatggtgagcagcgccctgggccaacttgcccttttcggatggagtcagggagggaggagagactcgaatagggtattactgtaaggaaacgaggtcctcctagcgcgtgggaggatcccttgggacagatgcccgccgctctttactcttgttctttcagcttgtagtggctaggtccctggcctggagcctatctgtggtccctgcatgctgtgtaaccttgagcgagtcactatccctctctgggcttcagttttccctatttaaagcttcctccaacgctagaattctgcatttctgcagaagaacttatgtaattacaagattgacttggctattgaggccgcttcaccaagatgacccggagttgactgaaccttcttcacttatgggtggaatgaggcgacctatttattgggtcgcttttattcctttatcattagttacaaattgcatgacttaaggctcattaaatgtttttctaaaattgtcatgggatccttgtcctgattcccgaccatctttttaaaaatgcgaaacagggtggatggtgagcttgtatcatcgtttctgtctccttgctactgaggctctctttcctttgatccagatggtgtggtcgctcgattctcccagtgcctggctgagtttcggacgtggttaagaaccaactggttgaggttcaatgcagacaagacggatgtgatgctggtaggcaggggtacacttggagattaagggagggaaaatccaaactccctcaagtaatataagattatattactcttcttatatgttccagtgtttgagaactgatgggccaaaaatttccagaatttgggtgagataaaaataacatgtcatcaatgtaaaaaccataatcatagtttgtaatattctgataaaatggggccactggataaaactgtaaaaattatgaaaagaaaatccaaaactgttatttgaagaaccaaaagcctatataagtgttttagagtggcattaataacaaaaaatgaaactaacgaaagatgatgctgattgtcactatagatgtggggcttccaaatgtaataggctaagttttttagatgtaggtattttcaaccaaattagtaattatccataaaattttaccaccacatcataaagacatggtgtaggctgttgcttttaaataaaaatttcaggaaatagtttataaactaatctcaaaagagactcatggacgctgaaaattgttagatatagaattttttagttttggatgtgttgtattaatctatttcagtcagctaaccccagagtctaaattgttataagtacagtattttcttggtgcattttgagaggtacc

SEQ ID NO: 2410 - DNA, 4001 bp, Homo sapiens
tatgggctactgctcaattattcggcagagttgatccaaaagcactgttccttcaaattgagataagactcgaacagaagtgctcccatataggtcaaaaaaggaaaggagagcaggactccagccttaaagcagcatgatcacaaactatgacggaaaaggtcatttcccacctgccaacgaaatacaacaacctacaatgaagaaacctcagtaagtctcagacttggcccaaaggagcccaactagttactccctggtctgttacagaggatctggctattacactcaacagcaaaaattcaattcaatcccgctaaagatataagaatcacaaggaagaataagccagaactcaagacagaaatagcattaagtagttccttcagtacagtgagcagaagctggccactcaacgactctaaaagacacagaaaagcttagtagggaccactgggcataccggtgtcctaggtggggatttcgtaacgtctttgagtcagaagctgccctcaaaatagtttcttctcaaaacggtttcaggctttgttagaaagggaagacttcactgccactttacccagatcatctaccccatccttggaatgaatggggaagcttcagccaccctaccaggctcctaaaatcaccaacttgagagaaaaactataacgttgctctaccagtacttcaggaggttaaagaaagtcacagaagaaaagaactctggggaaaacagtcaaattcggctattaagacattagttacaggcccctgtacctctcctctagaaaccctgggagtacacccgcagaggagagagagcccaagccaccaagcaaagtcaaccaatctggcaaaggggcgtcccactgcggctttcagtccaagaagtggatcctgctggttcgcagtctctcttctatctcctcacttcctatttaccctttgaagtgggtactgaatagcccgttcccaagcagaggccctttgtatacggggtgctacagtcgcctggtggaaacaccttggcagagttgtttggtgccaggatgggccactgaaggcatctgctgtggacacacacacacacacacacacacacacacacacacacacacagaaagagagagagaaaaacagaaagagagagagcgagaagctaagagggcaggtcaggtcggcgttgccctcccagcacttacacctgccccttcttcctgactccggcgccagatcagatgtcaaacaaaaactccgcaaaaaagtcccatgatggaatgacttccacctctccctccgcagagcctccccggactcccacagcctccccccgcgtcccgaccaaaccctccgcccccaccccgcccccggaccactctgccctccgccccggcgaggcctggcccctctcgggacacccggggccccgaggcgggtaggctcaggcccccaggccggcagggctggagccggcccagagcgggcggcccgttcaccggggctgcgggagccggtccccgcctcggcgcccgcggagggcagggggcggcggtgacccgtacctgtcaggtctcttcccccgaccggcagcggcgcaacttcaggagcccatgtccgtccggggggggcggcccctctcccgggaaggggggcgcggatcccggggagggggctggggggctcgagcagttctagccccttcccatgctccccgcccggcgcctggccggggccggacagcgcctccgcccgcccctgcgcaccgcctcacacccgcgctcacacacactcacactccctcgcgcgctctcacacacgcactcccctccctcctcctcctctgtttatctcctccagctgtctggggacccaggagaagcccagcaacgcgcctgcgccacgcagtctccgcctccgccctgcgcctcgcagccggcgggtacgctacgaagactgcgcccggccgcttccagaatggctagccgggcccccccacttacccccccgcgcccggtcaacgtctgctgccggcggcgcccactaacctgctagtgggggagccccgcaccgccgtggccaatgggcttcgccgcttgcgggaccggcagccagtgggcgggcgggaaagctgggctaagccctggggcaccctgggagtcgtagtttttcgccgtcgaggagttcctgcagagcgggctcaccccgcccggttgccattagttacccggacgcacctcccaccccaccaccgggtaaaacgctcctcacaccgcttctgggacacccgcccacacgctcgcccactgaaccccaggtcccctcacagccccttaagagctcctaagacttcctctcagcccccgaattctgggacctctcaggctagggccccggggggctcctcagcccactccttcctgctctggggggctgctgaagtggcacagtcctcactgacgtctcctgggccttaaggaagagaatgaaagagaatcgggcctacgctgagtagcctggagaggagtcagccacacacactctgggtgccctcggggtgatgggagcgactaggtccatctgaccctagcggagtcactgctgctcccacctctgaggaagagacgcagttccagccttgtggagtcccgggtctgatggaggagagaccctcctctttattaaggaagttcccaaggtgacaagggtggcactaagcctatcttcttaaggcagagaccaggccccacccgtgaaacctcaagtcagaaagggaagacgtgtcaccttctgacaaaggaaacttgtcacccatagggtgccatttgtcagatactaacaataattcacttttattcgcactggattgggtacagtctcttagctaggtactattgctgtctgtgttttgcagaaaaggaaagctgaagcagaaaggctaaaagcaacttgcccccggggtcctgataagttggcaaattgggaattagacccagatctgcctgacaccagagtctgagccttttaacactgcctgtctttcctgtgaaaaccagacagcacccgctctcagtaaggactgaatatatgtatttggcatttatagtgtttatcactccatgtgtcgcttgttttttttttttttttttttttttttttccaattctgctcacatcatgagtacgaatttgtctgtgaatacctgaatactcccagagacaaaggtagtattctaattgctggtgatttctccgcaagggagatttctccccatttagaggagtaagaacctatccttgtgaaaccgctcacaaagccttttatgcctttctcctaaaaatattgtgggtcattccccctgaactctccaccacagctgttctactgaatataaaaaatcatagactttgggactagaagaaagctttgagatcatctatctgcagctccccaggttcaggctgcaaccttggttagggtcattgggttaattaaactgaataatatctaacatttattgaatacttaccatgggagataagtgctactagtgaattaagaaatactcccgggctgggcgcggtggctcacgcctgtaatcccagcactttgggaggcagaggcgggcggatcacgagatcaggagatagagaccacctggctaacacggtgaaaccccatctctactaaaaatacaaaaaaattagccgggcgtgatggtgggcgcctgtagaaccagctactcgggaggctgaggcaggagaatggcgtgaacccgggaggcgcagcttgcagtgagccgagatcgcgtcactgcactccagcctgggcgacagagcgagactccgtctcaaaaaaaaaaaaaaaaaaaaaagtaaaagaaaaagaaacactcccggccgggcgcggtggctcacgcctgtaataccagcactttgggaggccaagggcgggtggatcgcctgaggtcgggagttcaagaccagcctggccagcatggt

SEQ ID NO: 2411 - DNA, 4001 bp, Homo sapiens
agctcctaacacaaaagccaacccgtgtgtgtgtgtgcgcgcgtgtgtgtgtgtgtgtgtgtgtgtgttgagggtgagggttccagaaagaaaatgtgaagctgtttggcccacactggggataagagattgtttgaaaactctgaacccttttctgttttgtggataaatgcacacagagaaaagagcactgtctcctttaggtatttctctccttgatgaagcttcacccactctcctttgtttaagacaattggcttggatgttaccgtgatttacagtaccaaactccctttaatttgttcccatcaaacccaagtctggagacaaaacgccaagcacacgactggaggtgcccaagcctgtgcagctctggcagcgacgccgccggcgcccccgggcgttttccccgcaccccacatcgcgtgggcgcccgtaaaggcacgcgcggagaaagcccctccgtggactccccactccgcaaagtttaacaaagccgtgaagtaaggaaaccgaacctcccgtccgcgcccgctgcaaagttggcattgaagtttgtgccgggatgtcccaaatcttgagggggcggggggcgcgagtgtgcagagaggcgggaggatggatgcagatggggagacagtgaggggaagggagtttttccgagtggacggtccgtgaggcggttttcttcacccggaagcctgtttgactcagagaggtccgggaggtgcacgccaggggaggtctcccggggcgggcgctgtcgccgaggaggccggcgagctgtcacctgcggggggctgtggtgggagctgagggcgctctcctaagcgccaaaagaggacggggacattcacagtcaccggctctcggggctctaagtagtgggggaagggatattcacgagtgggcaggaggccaaaagcaacacctttcggatacgcttttcccctccgacctctccaacttcccgcggcgctggtcaaggactccctcccaccccaccccatcccacccaacctcccggccgacaattcggacctgtccacggcagagcgtggggtggagtgcggcgggaaagcagagggcgcgaaggtcgggaccccaaattgcaaaccctcagcccctagcaaagacgaccaaatgcatttacaaccgtgcaagtatctcagccttgtaacagagctccgggtttgcgccgggcacagttccccgactcttctgttgttcctaataaagtcgattacgttgccctcccggagctgattggaagggaaccgagaggaaaagggggggaacgcgggaaaaagcgggggggggggggggcgagcaatcaactttgtaacccagcgcttcctcgcgcgatccgtcgccatgcttaagattcccacccccgccgcccccctcttgcctttcaagtggatactgaaactaggccaaaactttttcccctccttttctcttagccactagactggattgtgccccacggagccccatggagctctgctttcttaagcacaatagccggactaattagatcatagaagcaaggcagtgatactgtaacaagtagcccaagaggcaaagagggaaggggcccgaaaagacagaaagggggaaaagtttgcagctctccgcacttaccaatcaagcctcccaccagaaaggcgatgatttggaacacgagcagaatcccaccaacaatgcacagcttcttggtgctcatgttttctataattgccccagccatttttgcgccccccctttttcttttctccttgaaataaatgttttagggtgagctttttgctccctcctctcacacactccctccttcctcgcctcctttctgggcgctgcaaaacttcagaggtgctggagcgcggcgaggatgggaccgggacggaaggcgcccgcacggattcccccggcgcagccggctcgggttcccccaatgcccggagctgtgattgtggccgctccgccgcctgtggacgcttaaaggagcagggaagcggatcacatgacgccgcctccctccctttcttcctccctccctctcgcgcttcctccctccctccctccctctcttcctctaccccttgcccaccagttcggggctcagagctctggcgggtgctggcgcctggctcccgagtctggcctgcaacctgtctctccaaggtctgatgccatttaggggttgctgttgatgttaagcgggttccccctgcccagcttctcacaggtttccttttctggtttccgaagtgcgagatttaaatcaccggtggaccgccttgcagacctttaacttacgcgttgactttaggaaatggtccccaccccacccccaactgctagaactctctttaggaaagaggaggagaattttttttaaaaggacccaatagatgcctaagtcaaaacacagagatgcggaataaagtctcagctcgacttctttctaccagattcccagcctcggttattgggcacatacccagctaaattccccacggcgccccttgaggaaacttgctctccagccaaatcagaccactgttcgttactccagcacatgtgcttccacagccttaaccctggttattgccttaaagagaacatgttctactccatcaatgttaaacctgatccaaaaccaactagtgttaaaaaatctttctaattttccacaccacctccatgcagtatctctgggaactgagcccctacaatcctgtatttacatttttacctcctattgtaaggatttgtgtacacgtttgtctccaccactgagctgtaaactcctggggaatagggaccaagttttttttgttctttgtaccccccatggtgcctaacaaaatgctagctctagtaggtgccccataatcttttgtggaatgaataagtgaatgtgaaagcaagcccacagtttgtatttcaaaggtctaaagagatcttagttggtttagagggtacctatattaagttacaatgtttgttgtctctttgtgagaaatcatatatttatatttatacttaacttccataaaaagaggggcggggctcccgatagagatttcctgctctatcaagcctaaatttctgggcctggtttttccatgtttcataaactggccgcttggccagtacaactcaccttactcaatagacccttggtttggtaaataccccaccctgctccccaaacgtgcagtttctaccaccaccacccacacatcttgtttcttgtccctcccatccttacacaccctcttcatgccaagagactatttttcccagtcctctctcctcctctactctgttcctgaattttcattgcccttataaaagatgtcatgcaggttacacttaatagaagcattcatttctaatctccaaatagaacagagacttgtcaaggacaagcaccaaactttatgcatacaaaactccatctcttcaacatctaatagttcttaacagttctgaggatatacacatcattatgtgtcacataaggatgtttcagtcaacaacagaccgtgtgtgtgacagtagtcctataaggttataataccatattcttacaacaccttttctatagatatgtttagatacacagagtgcttactattgcattacagttgtctacagtgttcagtacagtaacatgccagacaggtttgtagtctaggagcaatcagctacacggtgtagcctaggtctgtagtaggctatgctacctaggtttatgtaagtgccctctatgacatttgcacaatgacaaatcacctaacaacacattctcagaaggtattcccatcattaagcaatgcatgactgtggttgctgtttatctattctctcattcaactctttatccaagtcacttattgagcctttaacatgttccaggctttctttcttaagcactcaaggataccaagatgtcaaagtacttgcacctgccccagaggaaccccccc

SEQ ID NO: 2412 - DNA, 4001 bp, Homo sapiens
tgtgtgtgtgtgttgagggtgagggttccagaaagaaaatgtgaagctgtttggcccacactggggataagagattgtttgaaaactctgaacccttttctgttttgtggataaatgcacacagagaaaagagcactgtctcctttaggtatttctctccttgatgaagcttcacccactctcctttgtttaagacaattggcttggatgttaccgtgatttacagtaccaaactccctttaatttgttcccatcaaacccaagtctggagacaaaacgccaagcacacgactggaggtgcccaagcctgtgcagctctggcagcgacgccgccggcgcccccgggcgttttccccgcaccccacatcgcgtgggcgcccgtaaaggcacgcgcggagaaagcccctccgtggactccccactccgcaaagtttaacaaagccgtgaagtaaggaaaccgaacctcccgtccgcgcccgctgcaaagttggcattgaagtttgtgccgggatgtcccaaatcttgagggggcggggggcgcgagtgtgcagagaggcgggaggatggatgcagatggggagacagtgaggggaagggagtttttccgagtggacggtccgtgaggcggttttcttcacccggaagcctgtttgactcagagaggtccgggaggtgcacgccaggggaggtctcccggggcgggcgctgtcgccgaggaggccggcgagctgtcacctgcggggggctgtggtgggagctgagggcgctctcctaagcgccaaaagaggacggggacattcacagtcaccggctctcggggctctaagtagtgggggaagggatattcacgagtgggcaggaggccaaaagcaacacctttcggatacgcttttcccctccgacctctccaacttcccgcggcgctggtcaaggactccctcccaccccaccccatcccacccaacctcccggccgacaattcggacctgtccacggcagagcgtggggtggagtgcggcgggaaagcagagggcgcgaaggtcgggaccccaaattgcaaaccctcagcccctagcaaagacgaccaaatgcatttacaaccgtgcaagtatctcagccttgtaacagagctccgggtttgcgccgggcacagttccccgactcttctgttgttcctaataaagtcgattacgttgccctcccggagctgattggaagggaaccgagaggaaaagggggggaacgcgggaaaaagcgggggggggggggggcgagcaatcaactttgtaacccagcgcttcctcgcgcgatccgtcgccatgcttaagattcccacccccgccgcccccctcttgcctttcaagtggatactgaaactaggccaaaactttttcccctccttttctcttagccactagactggattgtgccccacggagccccatggagctctgctttcttaagcacaatagccggactaattagatcatagaagcaaggcagtgatactgtaacaagtagcccaagaggcaaagagggaaggggcccgaaaagacagaaagggggaaaagtttgcagctctccgcacttaccaatcaagcctcccaccagaaaggcgatgatttggaacacgagcagaatcccaccaacaatgcacagcttcttggtgctcatgttttctataattgccccagccatttttgcgccccccctttttcttttctccttgaaataaatgttttagggtgagctttttgctccctcctctcacacactccctccttcctcgcctcctttctgggcgctgcaaaacttcagaggtgctggagcgcggcgaggatgggaccgggacggaaggcgcccgcacggattcccccggcgcagccggctcgggttcccccaatgcccggagctgtgattgtggccgctccgccgcctgtggacgcttaaaggagcagggaagcggatcacatgacgccgcctccctccctttcttcctccctccctctcgcgcttcctccctccctccctccctctcttcctctaccccttgcccaccagttcggggctcagagctctggcgggtgctggcgcctggctcccgagtctggcctgcaacctgtctctccaaggtctgatgccatttaggggttgctgttgatgttaagcgggttccccctgcccagcttctcacaggtttccttttctggtttccgaagtgcgagatttaaatcaccggtggaccgccttgcagacctttaacttacgcgttgactttaggaaatggtccccaccccacccccaactgctagaactctctttaggaaagaggaggagaattttttttaaaaggacccaatagatgcctaagtcaaaacacagagatgcggaataaagtctcagctcgacttctttctaccagattcccagcctcggttattgggcacatacccagctaaattccccacggcgccccttgaggaaacttgctctccagccaaatcagaccactgttcgttactccagcacatgtgcttccacagccttaaccctggttattgccttaaagagaacatgttctactccatcaatgttaaacctgatccaaaaccaactagtgttaaaaaatctttctaattttccacaccacctccatgcagtatctctgggaactgagcccctacaatcctgtatttacatttttacctcctattgtaaggatttgtgtacacgtttgtctccaccactgagctgtaaactcctggggaatagggaccaagttttttttgttctttgtaccccccatggtgcctaacaaaatgctagctctagtaggtgccccataatcttttgtggaatgaataagtgaatgtgaaagcaagcccacagtttgtatttcaaaggtctaaagagatcttagttggtttagagggtacctatattaagttacaatgtttgttgtctctttgtgagaaatcatatatttatatttatacttaacttccataaaaagaggggcggggctcccgatagagatttcctgctctatcaagcctaaatttctgggcctggtttttccatgtttcataaactggccgcttggccagtacaactcaccttactcaatagacccttggtttggtaaataccccaccctgctccccaaacgtgcagtttctaccaccaccacccacacatcttgtttcttgtccctcccatccttacacaccctcttcatgccaagagactatttttcccagtcctctctcctcctctactctgttcctgaattttcattgcccttataaaagatgtcatgcaggttacacttaatagaagcattcatttctaatctccaaatagaacagagacttgtcaaggacaagcaccaaactttatgcatacaaaactccatctcttcaacatctaatagttcttaacagttctgaggatatacacatcattatgtgtcacataaggatgtttcagtcaacaacagaccgtgtgtgtgacagtagtcctataaggttataataccatattcttacaacaccttttctatagatatgtttagatacacagagtgcttactattgcattacagttgtctacagtgttcagtacagtaacatgccagacaggtttgtagtctaggagcaatcagctacacggtgtagcctaggtctgtagtaggctatgctacctaggtttatgtaagtgccctctatgacatttgcacaatgacaaatcacctaacaacacattctcagaaggtattcccatcattaagcaatgcatgactgtggttgctgtttatctattctctcattcaactctttatccaagtcacttattgagcctttaacatgttccaggctttctttcttaagcactcaaggataccaagatgtcaaagtacttgcacctgccccagaggaacccccccccagtccaaatgttattcactgaatagtaattaattacctctactttggcaaaca

SEQ ID NO: 2413 - DNA, 4001 bp, Homo sapiens
agggaagtgcaaaacaaaaccaaaatgagatatcgtcttaccccagttagaatggctattataaagaagaaaaaaataacagaggctgatgagggcgcagagaacagggaactcttatacactgatggtgggaatgtaaattagtacaaccactatggaaaacaatatggagatttattaaaacctaaaaatagaactaccataatccaggaatcctattactgggtatctagctaaaggaaaataaatagtatatcaaagggatgcctgcgttcagatgtgtattacagcacgactcatgacagcaaagatataaacctaagtgtccatcaacggatgaatgaatagagaaaacttggtatagatacaaaatggaatattattggtcataaaaaagaatgaaatcaactcatttgcagccataaggatggtgctggaagtcactatgttaaatgaaattagccaggcacagaaagacaaatgctgcatgttcttactcatatgtgggagctaaaaaacttgacctcatggccatagagaatagaatgatagataccagagtctgggaagggtggttggtgggaggggaatgaagagaagttgattaatggttacaaacatacagttagatagaagaaataagttctaatgtttgatagcagaatagggtgactatacttggcaacaatactttgtatgtttcaaagtaactagaagagaggacttgaaatgataccaacacatagaaatgataaatactcaaggtgatggataccccaaatatcctgacttgaccattatacatactacgtgtataacaagcttgaccattatacatactacgtatatgatcatatataccccataaatatgtaaagtattatgtatcgagaagaaaaggagaaaattaggtacaagtattaaataaagtagtgcttcattcaacttacttttagttgaattccaaaaatgcttatggctaccactccaaggccatccaacatgtgggaaagtgtgatataggagaaagagtgaaaggagacagcagtgttaacagattgcagttaagatttaatcttattttgcaaattttacaaccacattgcttgggctcttcagggtttggaaggggccatgccagtgatgggcctcgaagcttaaacctcattagcttcttggtaaatgtgcctgtgctcatgatgctcctcaattcaggcttccagtggcccaccaaataagggcacaaattctttgcctgggcagaccatgccctttcctgtcgagttcctgcttacttctcctgatctagacttccatcccaggcttctcaccagaaacacggtgcctgctggcaacttggtgcactgtatatgctatcctcattccttggaatgcccttcattctcttcttcacctgggagcatctacctctccttcaagaccaagacaagtgtcccttcctctgtgagacctttcctgactccactgggggttaactgtgcagccacagcttgttgctctatttattataatccacataacactgcgtttcatgtttgtctctcccaccagcacctaaaatccctaaaggcctgtaacttatttctctatcctagtgcctatcacagtgcctggcacctagtaggaactgtggcatggatatttcaatgaagaaaatctctttgttttcctcccagagtgctggctcttgcttgcttacttggcttattatgggttttgtattttacagcatcgacagtataaaaagagcaagacatttctgaagcataattaaatggatgaatgcataaatagatagaatcctcctggcccctttttaacagttatgagcatctactatatgtcagccactgttctaggagctacataatactaatagctatcactttttgaaggcttatgtcaatgaccagttttaagtcttaaatttgctcatttaaggctcacaacaatgctgtgaggtggtttctgttctctgtttttttttacgcagtctaggcttcgttccgcttttcaggcagggtaagctgctgtgctccgaacttagacaccagggaggcggctgagcacggggacgagaggaggcgcatcctcgtttacgccggcgtctgaagtgggccccttcctggccactgaccctgtccttccctcagagaggtggcgcgcggccagacctcggtcgtgagagattcacagcatgtgaaacaccagggggcgcaagtaagtcagctttccgaagaagggcggggctgccagcccggagtagcccgtcgggcacgttgcagccgggccttggcgtcagaaccacatggcttccaatctagacaagcaacttctatcaccgccccttcacccacagcgccgctccacaaagggagcagcaaacccatggagttcttactatgtgctaggcacgtgcctgctttatctcacgggattctcacaaaaccctgagagggaggttcccatctttattttactgatgctgagatggagggtggcggaggttcactcactcgtccaaggttgcgcacggaccgacaaagctcctgttctgaactgcttttcttgctcagactccttgctgtagtgtacccagaaccctatcaatgcaaaccgatctccttctcccttttatttaaagcaggtgcttcttaagtctctagacccgcgggtttccagctctcctgaatcttaggggccccatccctcatttggaacacttgtaatatcctgccctgcacaaccctgagagtcacctctttgagacatgtttctccaccagagtgtaaatgccagcccttagcatgatgcttgcttgacacagagtcagtacttaataactatatgctgaatagatgaagggcaagcacagcgagtgtgtggtgtgtgtccccttctcaagctggctgaggtctgcacggagccagaagcaataaaaccggttgagtatgtgaataaggatttgttggtgtaacatttctatgttgttctacctcctgtatgtttgtatccagctgggcctgcaaactctcaaaaggcaaggatgaggagtgtgtgtgtgtgtgtgtgtgttgggtgggttgttgggggaaagtgaggcggcacagggcagggagcagagctttcccatggtgagaataaggcccacatagagaatgaaggagtgagagatgccaagatctgagtagaggggaaggaaaacgagccctgaatagtagccttgtgtgtggccctgtggctctgactcaccaagactcaggagaaggaaaacacgctagggatgaagaaggggcctgtgtgctttggtcgccacccctaaactaccccaccaccccgaatccctttggatcagggtcttcctgaggacaccctgtctgctcagaggcacaaaccatcctagaaggctttgatttgggttgggtgggctgagggagcgggggagtgggagggtgggcactagagagaagggaaatggataagtcctttaaaaacgcaaaagccccttcccagcagagctgttatgtttgagttcaggtgcggaaggcgtcggaggaggaggaggtgtctcccctcaagcattcagttgttccctcctccacaagcaggtgtggcaagtcagactcccgagcagggaggggctagatgctcaggactttggtggcatcttgtccatgcctgacctgaggagcaagacatgcctgatgagtgcttcccagagctggttctagacagatggaggcacggcctgggaagagaagccccaccatgctcccccctcctacccttgctccagccgtcaaacctgttcagagacatgaggacaggatttttgtggcaacaagtgtggcaggcagacagccctaggcagagggcagggcctggaatatggggcagcccaggtgaacaagatcaaagccagacatggtagagcaggtgagagggaaggagtgccccagggagcagccagggctgggcta

SEQ ID NO: 2414 - DNA, 4001 bp, Homo sapiens
ccccccctccttgccttccccaacactgcagagatttaaaaaaaaaaaattcaaaagagatttttctgaaacaggaaaacagggggtgggggttgggataaggagagacggcatcttgaaatgataggaatctgcagcccaagctggcgggcccctcggccagctacccctcacccttcagccaagattccaagtcaagaggagaaaagccacagggtgcaaggagagaagagaccacatttcggggaggggggcttgcacgggaagaagaacggagtaaggaaaggacgggaggcactgcctggtggagaggggcaatagcctagtccaagaggccagtttgattgtggggtgaagaggaaagactgagtcttttctaggttcaactctccctgctttgccctctccccatggtggggaagaagggaaagcagctccttctcctacgggaaggtgatgagtgccatccaaggagtagggggcagggaggattctaaaaagaacagacacgagacatccagtggatctgtaatgcctttttgcctcatctgccctcttgtgaagtgtctggagtctagggcctgcaagaaatctggggagggggtctcttagtatcttgggactccgcagccctctggctcttggaggggagaaatgggagatgggaaagaataggaagaagggagggaggcaaagtttcctaagtgacatcctcaaaacggtggctgaagacaaatgcctagataatgcaaacccatgcgttttgtttgttttaattgtgggagttaatggggtaaattttgcctcgattccatttctaagcctcggctgggtgctgctgcctcaccaaagccttcctgtggtatgggtgggctagactagcgagctgcccctttctccacctctcagagggcgaccttaggcgattggggccctggcgaagctattgcgggccctggaaggttattcgttccttgaactcaccctgagggaaactcggaaggtagcttctgccctaaggggcttgagctgaaatagagggggtacagcacgtggaggcctaaggagccgcgaccaccgggcatccttgctccgaatgcccagcgcctttctcaccagtcgtgtaagacgcggcgcctcaccctcccgccaccccgcgacttcagatttcagtgacagtcctgcccgaatcgtctccaacccgtcgaagcaacagcctggtcccgtgagcagccagtccctccaggcgcctccggcctctcctaccaagcgcctcacccgcccagcctgagagccacacttaccaccaggacgtgtctacgcgggccggcagcgtcagcagcagcaggagcagaaggcaggcaagacctaggcgggccgaagcccgggagccgtcgggggccgcgggcgacggcacagggaccggggcgctggcgcgccgaagcgggagctgcgcagcttcctccgcaccacccggtctcagcatagctccccgaagactcccgccgcgcagcccggaggggcgtggacggggcaccttctgggggtactcaggctgctcctacctcacccccctggggggccatggtgttcgccggcggctggggacctaggatcacctggggtccagagcccgggaggaggatccccgagaggggcgcaagttgcgatgtccggaagccgacgacggcgtgccgaacccggggtctggggcgcgctgcctgaggaccgggtgcggtgtcagggggtctgcggcgctgaagggagctgcgggcctagtgtgcggacagccccttcggccgcgggctctcattggacgggacggggcggggccgaggccggggacacgcgcggcccttagggcggctccgcccgcgccaagcccggggcgctccgcgacgccctaggtgtagcagccgcctccgcccctcggggctcccgcgcgccaccgcgctgcacccccacctgctcccgcacgctgcgacgggacgccgcggctccctcctgcgccccaagcgcccagtccctgccgacaccgcgccaccgggtcctagcgcccttcactcagcagccccacttctatgggtgacggccaggctggcggagcgggaaggggatgcgggcacttccctcctgtccccaacctacagtgacaccggcgctgagcacggaggatgcactcatttcctccatccttgcgcttctgtgaaatgggtagagtccctgccaccgggagttggaggtcttaactaccttttcaacactgcctacaggagcgccgtgggcagtcggcttctagcaggggatgctttcagctagagctcatcgcccctgcttcttctgagccactgcaccccccacccccaatgcatcacgtttagacctggctcctgcttgcccggcctgcccggcccgggtgcttttctttacggaccgggaatcgactgccgacgctaagggggcacctgcggactccccgccccttactcctgggctcagcggagctcagtctctccccgctccccctctgtgcctcggtcctccaccctctcgggcggggctgagagtatgaaagaatcagaaacagctgggaggttttcccgcaccagaggccagggtgggggtcctgccgagagagtggaagccctggagctttttccctccttcgtcttctcgccctgcctcctccccactgctccttcaccctccctccgcccgcacagcgcctgggggcgtggtaaatagggaaggggtggggaggtgcagtctgccgaaagagactctcctctccccaccaccccaaccctcaaacctcccaggatagcaggtacgggccctgcgggcactgtggccctccgtcagaagtaaaattctttttaaaatcctgggcttaacttcgagagttcagagttcacctgggatctggctccagtcgcttcttcagcctcagtttctcccacctcgcaggtgtctttcctgcctcctcatatgattttaaagtcctggggtaaacaacttactagtaactgccgatgcccccaactccaaattcactgtcagtctttggttgggggtggggggcggtggtggcgttagaggtgcctcccgagtgtaagcagatggggtgcagctggctgcagacatctcagagacagagatagtggagaaggtttcagaggaacctttaacctctctccccaccgcctccgggtcctagcgcccctcactccgcagccccaacttctgtgggcgggcagagtgggaaggggctgcaagcacttccctcctgtccccaacctacagtgacactcctttacccccactttctgtggtaaggtgatgagtgcattcattaattcaacaaatacttatttcctaccacatgccaggactgtgctaggcactagggacccattggtgaacagtctatgccctcatggagtttgccttctattgcaggaggatagaccataaacaataaacatcagaagtaaaacagagtatgttaaaaagtagtaagtgcagtggtaaagagagcacagtcaaggggatggttacagttgcaactaggatgatcagggtaggcctcattaaggtgacatgcaagcagagatttgaaggaggcaaggaatcaagccaggcagcttcctggtgaagagcatcctaagccgagggcagagcccgtacagggacccaaaggcaggagtgggctggtgtacgagggttatcgagaaggccatccagctggagcggagtgcgtggaggaagagaattcagatgagtccctgaggtgctccaagtcatgaatgggaggcagtgctccccacttgggtggaaagtgggggctgggctggagttggatgggagttggagaggactgaatacagacacttctcagggccgacttcctggcacagaaactgggaccatatcctttgtggccaacaggctaacttattttcttccccttctctccctttctttttgtcgggtgggctcca

SEQ ID NO: 2415 - DNA, 4001 bp, Homo sapiens
tcttgataggagggtgcggagggtacagggacttcacttctctgctcctcctggctcccctgcagaatgcctgactgtccccgagggtgtctcagggtccattcagggtagaacacagggggcccaggtgaaaaggaggtatacatgcatatgaggtggatggggaccgaggctaggaaccctcagggccgacaagacaaagatcctagggcgcggggttgccaggaggctggcgacatttatgggaagggcgcggggcgaaggagcttccttttgcgctcaggaacgcggcggcgggttctaattagaagcctggtgcgtaagccggcagccctcggggctctctcggacggacgcgctgcccctggctccctgcggccgtctggacgcgcgtcagtatccccgcaccccaaggcgagccccgagcctgaccctcaggtgggccactgggcgcagcaggtgccgcacgggaaatggggcacgcggaaataggggcgcgcgggggtccccgaagcgcgtccccgcggcctcgtggcctcttccaggcccttcagctgcctagggctgccccttcccctccccgctgctcctggcccggcgcccctaccgcgggagcccccgctcctgaaccatctcgaagagaaaaattattatcggattagatgtacctcggctcgctgggtctccccccttcccctcggcgtaattattataattccaggctgccgtcggagaaggatgggggggagtgtgcatgcttgtggggaggcttctctccaactgtgggtcctaccagcgctgcgcccggccctgcgcgcccacattcctcccacttgtgttcctcaatcttgggcatctcagagcgcccttaattcggaactggggtgatccttgcttggtgagggctctgagggatcacaagccctggcgaaagtgtggccaccgttccccctcccacaggatatgtgcagtggaggtgggaggcctgagagagacctttcgggacccttcctttggtttatctgcacttccatcgccaggctggggagggtctcacggaacgcgccttttctggtgtggagggcgcagcacagcgctttctgattgagggtcctggagcccctcacaccccgtgcttaactcacccttaactctctctacagcagcccctcattgccaggtggacccatgcggagggctcgcagagagggcccctggaaacccccgtgcccggactgcggcggggaggcgcgcggggcccagggccggcccccagtgcgccccgccgccggctctgcgccactccccgccgggtcccagctttctttacgtaaccacgctgctccgagctgttcagtcttgtctcatcgactttgttttaaaacgtgtgtgtgtgtttgtgtgtaagatacggtttttgaggaaagtctccggcgaattctctctcgctggccctcttccctcgcctgtcccctggcctcgagctgcctgtcccctcggtgaccgtgcgtgccgaccttctttcagcctctccccagcccactgctcgccctgtccgacgccaggggcagctaggacctccgcaacctcccctactcccccgctcgggaatcaatgtctccggaaactccgccacccacgcgtcccagcggcctgaacaggtccaaagtggccgtcaaggaaaaccaaccgcccgcggcccgcacgcggggctggagcagaagggcgcgggctcgggccaccgcggggtccctgcccgaggggaccgtctgctgcgggcgcggcgcacaggggcaggggcgaacgcgaggaggctcactcaccaccagatcgggtagctgcccagagcctgcttcaggctgcagaggagtaagaagtatccgagtggggccatcgccgcgcgagagggcgcggagggccgggagtccgccccgagagcgtgagcgccggggggggccgggccctgggagctggcgcggcggcgtcgctgggccctcctgcggccgcgggtgcgcgggtgtgcgcgggctccgagggcggcgctgcgccaggtgggccggcggccgggctgcgggccgaggcccggggcggcgcggggcggcgggggcggggcagcgccgcggggggcgcccgccggggccggggcccgggcggggcaggcaggggcaggcggggccacgggagcccgaaccgcggcggcggcgttggcccccgcctgctgccgtgggtgtcggtgtgtctgaggacgtgctggtgtgcgggcccccaggtgtgcgcggcgcgctggggtgcgccagatgggcaggcggccggcccggggccgcgcgatccgcaggcgccctcctggagctcccgggccgcgtcctgggtttccagccccgcgcgccctgcgctcacggtgggacccgcagtccccctctcgctcctggtctgtggcgagctccgtctcttgcccccgaggtggctgggctagggctccccttcatccatcaaccttctcggggcgggggtttggggagggagcggacggttgtcgggtgcacgtcctttggccccgtctgcctgcggccggactccttccgctgagaccagagctgcctgcgccttcggcggatagaaagggtccgggatgggtgcagcctgcaatggggacagcggccaggtggacctccaaggtgcagccacgcgtctgtgggtcacagctggggacgagtgggactctctctgtggcgcagggattgacccctccatttttctccccatcactccaccagggaagagaacagtggaagcccctgacgcgatgggacggtggggaagcgcagtgctgcccccaggttctgggaccaccaacctccaggtctgcccagagctatgcagcctgttccgacagagggatttctgactgtttagttaagctttaggagtttgctgatggagaggggaagacctgagagggaaagtgacttgcccaaggtcacccagtgaccagtcaactctccagctcccagtcatttgcatatccatgtgttgccccgggagccgcctggggagattgtaatttgcagaggggaagtgtccccagcctcccccgggggacctgataactgggatggttaagaggcactctcccatcgcggctggtcctcctgcagtcacactgtgacctaagctcagcaggaatcttggttaccgcgttggaattgaggaaggaggctccgggagcttctgagagctccaagcaactccagactcatccgtggtgtgttctctggggatactgcactgcccagcctgtgggctaggcctcctgtgcggctgcagagttgcgggagggaggtgcatggagaggcagggatgggcatgtggccgcttctgtgcagcttctcagggagggggtggctgagatgtccccaggtgtgtcactggctggctgatggaggcagctgcttcccacagtgtgccccactcacaacttggttctgcgtttgcagagggagcctgtggtcctgtggacaccggccctaggggtcacctggtgactatgtcaggagtcctgaattcagagtgacagcctttctctttgaaaaaaagttccctttgctcctcactaccttgggaatccagtttccgctacgcatgcccggccgcccacccgcttctcccaggcactgcggggcccccaccctcagagggaaagagggaagagctctggaatgaagcggcggtggggtcagggagggggaggggaggagcgtgtttgtgctcctctggacttggccttgcagcaaaaatcccacccaattgtggtactggggaaaacctgggctgcaggtggggtgggcgcctgagcccagcctgaggcacgcagactcttgttacccccacctccccagaaatgaggctcggggattagagccccctagaggatgccagctctgcccaccgacaggatgggcctcgtgacctcactgaagggggcaggtgagcgcagcctgctc

SEQ ID NO: 2416 - DNA, 4001 bp, Homo sapiens
ccatgctggctccactttgggacagcttcagggaagggggtatagggtcactgcctgggagtcagaacacctgggttcagttctcagctctgagtttgggcaagtagcttccactccctaggcctcagtttcctcatctgagtcaaagatgagatgttcctgaaggactttccactgcagatgtcgctgtcttccatgtaggcctgggccagacgcttggactgccacttttttttctttgttttttgtttgtttgtttgttttttgtggctttggcggtgctgggcaggtgagacacagttcttgctccttctgatgctcagatctgttttggaggcccccgctctgaacccatgcattcaagaaccagctccagggacacccagggtcctccaagtccaaatcagctccctccccagctctgtgacccaggctccattcagggggtggcctgcaggggggcagtgggagaaggtggtggtgccttgctttctgtacactctgccactgctcctgaagtgttaatcaaattaaggctccaagaaaaacaaaagctccgcagccacttcgggctgccttggagtcgtttgctctcggaacagctgggagaattccacatcacctccgtcccccaagccctgggtggctctgaccccaacgaacacactccttccagcctggagggctctggctggccacaatgacctcatagcaacagccattggacactcggggcaatttcatgggagatatttgttctttggtcttgatgcagagagaattttttcctctctccctgtctccatggaaaccccagctacactgttggcgatcccccttcccaccccatgcttttcagatcaatattggagcttggctccccactggctgcccacagcggatggtggcagagctctgggcaggaggaactggggccagggttaagcgcggggcatggggaactgtccctgagcggggatgaaaggagcgcgggtccgcttgctccctgtccacccactcactggagctcatccctttagtctccctccctgcagcaaaccttccgcccctacccagggagcgccctgagcgcagatccagtcaaggagaaacagacaggtcaccagcggttaccaccccttcctccttaggctagacacggggagctggggggccgttgtcttctttaaggtctggacggagtttcttcctgccccggggaaaaaccaaggcccggccagcgccagcgccagccccgggccctgggagaccaggcgtcctggtcccttccttctgtctccggctcccgccccccaagcagaaacaggtccctgcacgcctccagcccagcccgcagcgcggcgcagctcggcgcagctcggcgctgggagctcgctccggacttctcgggattaacctgctattatgtcccggagcccttccctgcaatgggcttcctcagcgacctgtcagcccggctggactgcaacccgcgtccggcgcccctcccgggccaccgccccgcgctcgcacccctggcgccctcgagagccccgagccgcctaccggtgcggacgccgccacagccacccctgacgcctctgggcagggagccggacccgggcaggaggggaccccgggtgtgcagagggacgttcgggccgtggcggcggcagcggagcgagcgagcctccggtcccgcggccgagacacctgccgggctgccccgcgcccgctgccccgcgccgcctggcaccggccgctgcccccggggcctgccccgccccgccccgccccgctcggccccggccagacttacagccagttgctcgcggcggctgagaagacggcgaagacgaggaggcgcagcgaacgcaggcacgagcggggactcatggtgccgccgcgggcgcccggcccggggcagcggctgcggccgcggggggcctcccgtcggggctgcaggtgggcgcccgcgggcgggccggggcgcgcgcggcggggctctgcctccgtgtgcctgccggcagcctgcccgctgctgcgcccgctgcccggcgcggaccagactgtcagcgccgccccagagccgggatgcggcggcggcggcggcggcggcggcggcggaggcgggcgggcgggcgggcggccgggggggcgggccgggggcgggccgaggatggggttacctgggcgggcccagcggcccgggacacccccccgggggcgggccggagcggcggcggctgccgccttagcccgcgggactgggctgctcccggggcctccccggctgggcgctccggaggacttggggcccgagcccgctccaggcacgcctggctgcgcgccgccgagcccggcccggctagaggcgcggcgacccagctgcccggccgccgcccgggcctaggggacaggcgggcacagctcccccaacccgccgctgcgggcactgcagcgcggccctcgctgtccccctaccccccccaccgccccccgccggcgcctggagcccagaccccggtccgaccgcggcggacccaccggagcgcggctaccactcgcgcgcacccaggcgctggcgctccgggtgcctggggctgcacatcggggcgctggatgtctcccgaccgccccccgcccggcccctccctgcctcctggcccccgcgtcctgcggcccagcccctccctggcgctcacctccctacagccttccgggagctggacggggcctccccagctttgggcagcttgggacagtggcccgagactgtgggaatccgaaacctcgcttctggctagccacaaggtctgggcgcgccccaggcagcagggtcttgactctgagcctccgttttctcatccgggaagtgggcttaagacgctgtgattgggaggacaggaggagtttagggaagctctcttggctcactcaccaagtcttactttgcatttggttttctatgtgcttgttcgatttatcctcccatactaggcagattcagcctcttgtttgttttgggcacagggcggtgcctgccatgtttgtggaaggaataaatgaatggaatggaatgggctgcaacagcctgtgcttggctagtccagagagctcaattccacatcactgtaacccctaagaattgtctgcccaagtccacgccacaccctctcaggtcactgatctgattctgtgtgctactcatcctccaggctgcatcccccagctgctcacaggtagagggacctcttatctaaacagtaaaactaaggcccggaaagggaggcacctgtcccacctccctaggggttgggaacagaggcaaggaccaggtctatgccctcaccccctgatcttagttcttcactgattttggagtatgaagtttgctcccacagaggccatcatgtttgggtgctgggatggtgccctggggtcccctgggctcagaacagaggaagggctcagtaaacatttggtattgggactgggtggaacgtggcagggatttgtggggctgggcaagagtatagatggaggttcacataccatatgtccaaatatttgcaggctataaatcaagctaacaaaatgcaaaataaattatgttctattcttctatcttgacaaatacactttcctaacaaggcagaaagctggctttgagtgtggcattctcatactcctcagaccttgccctggagctggtggcacagggagagggggcccctagtgcctggcctgggcccctgccccctaccttttcctacctctgcctctgtcctgtccttcgagagtcttgtgcacattcatgaacatctcagcctgcacatgcaagctcagccccttggtagcccctcaggcttagggctgggcacgccagtggtgtactctgtcctcgggctggatctgcggaagagacccacgcaggtcctggcagtgggctaagggccatctctgcagggaaccccaggggcctgggcacccagagtatg

SEQ ID NO: 2417 - DNA, 4001 bp, Homo sapiens
ccagctgtccccaaaggcagcacacttgccctctggacttcccacagggcagctacatggagagctgccctcagacaggactcaggaattctcccttgatgggtcctttggagccaagaagcagggccaagggggcctggccagagaagccacaacagcacttaagtccttgctatgcgcctggcaccagcctggacttactgtctgcaagagagctgaaacacacgcacacaaagcagcagagccccttgaccttctctagggcacaaagcccagagataggtcagagaaggagaggccaagacccagcgccaccccgtctccaggaatcggatcacagcagggacaaagccgctgcagcctggacaagcccagggtgtgtccccagcccaagaagcagagcctccgctgggccggagagcagggaagcacagctggctgacaaggccacggtgagtcaccgcggacctgtggccctccctcctgccctcccgggtgaggctacgggttgcacagatggcgtgcagtggcgtgccagcccaggcccagggccgtacccacagttggagccaggagagggctgcgggtgggggccccagggaactgagacaccgggctgaccctggaagacgacccagaagaaaggaacagagagaagaaagggagagaaagaaaaacacaaagggaaagtttcccatgaaaatattttattttctttgagaacaggatacacctgcagggctcctcggcccaggcggcctctccctgcccgggcgggtgccagattcctggaccaacggggccctctgccggccagcccgccgcgcgctggcgctcaggccagagggccgggaacaggtgaccggcggagggcggcggcccggctgagggagcggcccagggcgtccaggtcgggggctgggatccgaaggccagccagggctcccagcggcggcgctcggggtaggaggctggagggtggcggggaggcccggggcgctgcctcgcacggcgccaccctgcacctcagcgcgcccaaagcgcagcgagggtccctgtaaaggtcgcaggactgggcatcccagacctcagagagggggagggaagaaggaagggaaagaaaggaagagagagacgcgccgacagcccggcaaagcgctgctgcagagacacgtgagcacgggcaatgacaccgcgggacgccccggccgggccctgcgctcccggccaggttccatggacgcgctcccgcgggccggggcccgggccacagagtcagaagcaaagcgcaagaaaaataaattcctccagcttggaggatttctctctttctctctctctctccgtttggggctcagcgcgaggaacatctggattttgtacgtatttttgttattgttaaattaacttctcgagaagagaaagggggggaagctgctaggtgggcgatggccaggggctgaggactcaggctccagccttttggcaaggacacggcggcccaaggaagtcgggacctgatcccagtccctaagcgcgaggcagtcctgctcacggcggcgactacgacgacgacgactctgcggtcacggaggaccgcggcccggcgcaagccggacgggtccacccgcctctctagccgtgccgcgcagcggacggagcgacgcgcgcgccgcaaacaaacagcgccaggcaacccggcggccccgccgcgccccggccccagccaccccgggtgcctcggggactccggacgaccccgccccggccccgccgcccccgcccaccagtgcgcgccggccgccgaaggcacctacccgaagtaggcggccgaagggcgcagcgcggcgagcagcagcgtcagcccgaaggccgcggccagccagcgcgccagcggggacccatccagcatcttgccgcgcctcggcggccgaccatcgcgctcccagctccgcgcagggcgcgccgcggccgccgccctcttatagcgcccggagcgcggccagctgggcccggccccgccccgcgcccgggaggggatcacgccggcgccgggggcgggccgaaacccgagccgcgcgcgccagcccgccagcccctcccggccactcggggccccggccgccgctcccggcgcgggtctcgggcgcgccctgcccggcggggatggaggaaggggaggcggagagcggtgggaaccgagggcggggcgtgcgagaacccggggcgaccacggcgggacggcattggggggccggaggcgggcatcgggaagcgggtagagcgttgggggcgctgcagtgggagcttggggcggcccccggggcgggattgagggggaggggaggggaggcgttggccgccgggctagccgccggcggggctccaggccgggacggtcggggatggttccacagaggacccagccgtctgccccgagctgggcgctgcgcggctgctccgggggaagcttggtgaggaggagtcgggccagccggtgatgcctgcgcctcttgcgcatgctgaccccctcaaggagcggggccagagaatcgctcctttctggcagggactgtggccgctttcggcctgggaatgaagcgacgtagcctgctggggctgtgaggtgagtagctctaccttttggggtcctgatggtctccccattcttaaattgtgggagtggagctagcggctaagtcaatgaaacaccagccatcgggcaacgcccttctcagagcctgtgtcctggccgggacggggagaaagaggactcctgggatggaaggtgcacacccaggcagctggaagcgctcagtcacagcccggggactcgtcccctctgcgatacggattcggagctgcttctgaagcagaatggtgtcagaggacccagagctggcattaggatacaggtgcacacattccagacagacctgggggtggcatccaggagaaggcttataagttccctggatggggcctctgtgccatgcaacaagggacacaagaacagggcttggggtccaggctggcggtggcatgcctgccacctgcagaccctggtcagtgcaggatggtgcctccaacacgggctaggctgccaaggctgaggacacagggccagcgagcctgcccagccacgtgctgcaggggcctcagagacctgggctgcggtgccaggtctctaggcagtgccctctgtgcctgcagggactgattctggcacagtgaccgcagaacctggggggcggagcacatgcccccggaaggctgtgaaatcccgccagtggcagtgacagaggcgaatatgagggtcctcagaggaaaaacaaagaagataggagcagcagaaaatggcccccacgaggatctgagccaacctcgccacccctagggctcccggccctgcttccctgggaaagcctggccatgtgggtcacccctgtgagcataccctttctgagtgtctgatggccagtttgccaggtgagcttcaggtgcatgtggggcaaagcaagggtggggaagggaggagaccgggcctgagcagtcactccctctcggggcctcggtttccccatctgagacccatccaactccagcgagtggtggcttttctccaaggcatgatgtcctgtgtgggagccctggcccctggttctgcttttccactaggtgtgactggtctcacatccttccccatccataggacccccctcctgtggggagagggcacttgtttgtcctcttttgctcagggggctgggccacctcccttgaaatggggctgactcagcagagggagtgcagacggcagcccagcccacccaggctgcagcgaccccagtgggaggcccacccgccccacggccatgggctccagtgagcccccaaagtctggctccagcaccaggaagtgagaggcagcagagggaagcagacaggacgggagaccctccccaccccccacacacccccctgcaatgatggcatgctta

SEQ ID NO: 2418 - DNA, 4001 bp, Homo sapiens
gcttcgcaaatgctcatttatctccattaacctattcctaacacgaaacgggaaatgtttaagtgttagtactattttcttaaagatagtttcttcttgtccatatttgttcattatgtccctatccaagcaaacaatttcaagtaaaaataacgcctgagtactcacctgctgaatgtatattttactacagtttcaagatcaagaactgatgtttaaatattaactgcttcgttagttttacttatcaaggtcaaagtagtttgtgttttatgaaccgatatcaaaaaagaaagccacgttagttttccgtgggagaaaagagagacaggcgggtgacggcagattggaacaaggagctaccacagcacttactttctcacactgtagctttgaaaactgtgatcagttacagtgaattccttatgaaatggaatatttttaccaacaccttgaggaaccacataaactctactgcaagatatgaaaactagaaacatggacctgctctccccagtcctcagggctttcaagaagatgattccagtaacagatcattaccaagtgtttcagggtattttgaccagagtgtacaagctggaaaaaaacacccaagttaagcaagcagatgtaatctttctccttataattcactgaaattttcataaatggtaaaaacaaaaaacaaacctctcatttaattgaggaggggggcacattgaaaatataccaaggctgagatgccatttaaactaatgaggttttctgttttgtagctgatgctattttatgtgatttggaataaaacctccctgaagaggtaaaaaacgtaatttgagagttaaactctcaaaagctagacagagcacaggaatgtcaggagtggcaaaacctgaaaaagcatcatgatacatcagtcagttagtacaggtggtggataaggaaaacgaagcccactttttacgaggcatgtttcttcttagtggctttccaatgccaattgtccccctcttctgaggacatacatactaggcatccgggttatccctctcttctgaggatatacactactaggcatccaggtacatacactatatgttttgaagcttaaagttatagctctgtgatttaagcacccttctgccacccatggaacgaagacctcaaatcccagccatgaggacaactacttccttacctggggatagaatactagtatttaaatcatttattcggcatgtggtagaggagaagagaattagaggagaagtagagatgacaaagtagccacaccacttaccagtttacaggcaacagaatcatcaatttgccttttgtgacaaagtaacaacaaagagccgacatctcctataccctcacctgtgtgcagtcggcactgccgatacccacctttccaagggcacctccccagaccccccacctgtctacggtatcttcctgggtcccgcacctgcccgggcacctgccggggtcctgcacctgtccggcccccatatctgcttggggtacctgcctgggccccgcacctgcttggggtacctgcctgggccccgcacctgcttggggcacctccccgggccctccacctgtctagggtatcttcctgggtcccgcacctgtctggggcacttgctcagacactgcacctgccccgggtacctgcccgggccccgcacctgtccgggcaccgcacctgcaggatccccaagctgcctccacccacgcggccgcccccggccctgcccgccggggacgctggcaccgaggatgtcctgcccgtggcccaggtccccgccgctcaccaggtacttgccgtccggggagaacttgcagagtaagctggagagcttgaatacctcggagaagttcatggccgccgcctgccgcgggcgccaccctgcgcccgaaaacccgcgggacccctgggcgcgcagcaggctgcaacagccgacgccggcctccgaggccggaagtcagaaggcggaagtgaactgcagcctatcagcgccgccggcttccgcgcggcattgtggggcttgtagttcttgtgccgcagggctttaaaggaaacgcccacgtttcttccgaccagggatttccgacccgagaaccttacctcaaaggccgggaggcctttgagcacctccagctagggctgctgataaaaatgtagaaagcacagtaaaatttgaatttcagattcacaacaaatctagttataagtatgttcccaaatattgcacgggacatgctaatacggaaaaattactcgctagtctgaaattcaaatttaattgagcgacctgtgtgtctgcgtgtgtgtacacatgcatatatatatatttatatttatatgtaaatgtatgtttacatgtaaatatatgtttacctacaaatatatctttaataagtaatacggtgtctgtcgcacatatattatatcgtgtatgtaatgtataagtatttatttcgtttgcttggggttttgtttgcttttgctgagtccgacccctctacctgccgcctggcccttgcctcacgctccagtgccactgagatcaaggagagaacgaatttgccgctgactgggcagagcgagcgcgtggatcgcggccaccgcccgttcatcacccgcgcgcatctgggctggcaccgggcgaagaatcgtgcgggtctgggacctgggggcccagagggagcgagctcctgcgcgggcgctcggtccgcaggtttcgcaggctcaggggcgtgcctcgttctcacccccactccggaccccggtcctcttccctagacagcggccccctccacccctggctcccgcaggccgctagtagtccgcgccaggccccgccggcgcctctagggccccccagatcgcgcagaccctgacatccccgcctggccctgggttctgggagctgagagccggccagggtcctgctcgtacctccgggcgcccagcctcgggtctgctccccgcggacgccccaacctccccggccgaatggatggtggtgcgcgcgcgtcctactccggcggtgccggccttttctgttgccaaaactagacccaaacctctgcatgggattcgtctttgggtccccaccccgtgcgcccagcaaacagtgggtgagccatgaagatgtgcgagtcagccggaccctccccgtcaggcgcggacccgctgcggccagagaacccagtctgcgccagcccggctcgctcgcgaagccacgggcttcactgacgcgactttccaagacgtgggggtcaccatgggcagaggacatcggttcggagccagatcacgggccccataagcatcagaccataagcagcgccgccactgagagccgctcggaactcgcccagcatgtcgggtcccctagccagggcctggtgtacgtggtcgagggccctggaagccccgatggcctaggaggagcaggcgggcggggcggcgggtgtcgctggccggtagagagcttcggcctgacctagcgcaggtctggtgcgcgcagagaacaactccaagcgcaccgacgcccgcgagctccttccaaacaccgaacgggatccagagcccgagcccacaggcggcggccgggggagggagcagggtgctggccgccgcccgggagtgttcgcgtcctgggtgacccctggaaggacgtggggcccaaactccggctggggttgggagagcagcccccagaggctctccgcgggatcctctgccgggcgggaccgtggctccacaggagaagtgggtggcaagccctgcttggcggaaagcagccgttcccctcctcctgggcctggggcggcgcccctcacccctgttccccgcccctcacccctgttccccgccggccacatcccctgccccttggattccaagcgccccgcgcgccgaggagcccagcgctagtggcggcggccaggagagacccgggtgtcaggaaagatgggccgtc

SEQ ID NO: 2419 - DNA, 4001 bp, Homo sapiens
gaaaaataacttgggagaattaatactgttaagggttgggtgaaatctaatccaagtttctaagtgctgattttctccttagctgtagacactggtctttgcttcccagggaaataggcagctaaaaagcatctaaagtaaccactgataatggccaacattggtctgtagtgttgctaatatcagaaggcattttttaaagcaagggactaaacaaagagtgttcattgtgtgcttttcttcatcatttcttcactctcaatgccagtctgcacattgctatcctctacctttgccaatttatttttagtggtgaattgtttctgtagccaatgaaagaggaaaaatctgggttttttctctgtttctctcatatttaagaaacaatatttctctctgtgaagtatctgaagtggactcctaagactcagggaatcctgttatgcttgaaaccacaaagccttttccttattgtcagcaatgtttgagtgtctgtgttattttttaaaatatcaccttcactcaggttgcaaaattgagtcaaagcagagaccgttttccctcatttttgtatgtaagaagctaagcaccagtgggacttatagagctccttcaactagaaaacttgggaatttgagaccagtgtctgcagttcttctcagcctctaacagagctcctttcccctactcagatctgagtctccctcaaatggtatgcccattgtctcagcaaaatgccagccaggtagcaacatgtggcctaatgtagtaatcaaactcttttgtttcatcagtatttttttgttttatccataatttcaaggacttccagacttagccacctttattcatggaaccccttggggacccattattaagttataatatcatagtctaagtaataagcctaccaactagaacacaaataagtcgacagattcactccagtcataggaaaaattaatccttaagaaatacctactgaatgctcaggtaagggctcggtatatctgaatcttacctggatgtgtcttgcaggtttattgaactgtgtataaggtgctgatctatttggtagtagttattattgtatgttctcttacaaaaacagaaaatttctcataaatagtaatagtcatggcattactaacagagtcccccacgtacttgaaggtaatattgattttctggacatgaaggtttgaacttccagtcatttggggcttagttttgtattgaaaacattgatttactccagaacatacatcctctggtgcatccccacattgtaactgaactctctaagattttgataatttatcaaactatatattaaatgggcaaaacctacaaatgcatttataatcatcacctctaatccatagctaacattaatcaaaaaattactgcttgtaaggaaatctgatgttattaaataaaccataatatttatttaatcttaatctcaggtgatcatgtctgttatactattcagttatacataaataagcacaggccctgagtggttaaggaatttacctgaaattacccaattaggaaaagtaggagcccagatactaatcaaattctccctgttttggaagtttacgaagccctctacagtcaaaatcatcattcctttcttgcacatgggaagtttaaggctcccctggggaaagcaggttagtccagtcataacctgagtcaaacccaaaatgtgtgcccacctgccttgcctccctgttctttatctcacagacagcttctccacttaccttccacaatgtatgcagtgagagagcagatgccaaggagggccaggatgagaagtctcatggctgaggtcctgctgagctgtgcaaggagagtgaggatcgggctctttgaggacctcttttatgcctccagtggtcagtgcacttcctgtggtgagagggggctttcgaggtgggtgtaggatcatggaaagtctttgcaatactgatgcttttatttttcttaaaaaaaaaaaaaaaaaaagtccctttccctgttcatactaacctaacgccttgtggcctttacccctttgtctgtggttaatgtgtcaattaaaccaaatgcatgcataaaagaaaacgtggttgtgttgtctcctgccaccagcctgaattcagatcttccaccgtagacatgcctgaaggctgttcactgccatggcccaccacggaagctgtaaaggaaatgaggtggggtggtcactgtgttccatcccacctcatgtgacatccagtgtgacatgaggcttccacaaccatggatcatgagtccctgatgccaccctttgactctctcaggaggggaagagaggctgctgccacactgagcttctcgatcctttgctttcttggttctcatttttctcctccaccttcattcaagtcacccccctttcttcaccccatctccccaggtacccaagaaacaattaaataactgtttaagcatgtctacatgcatgtgtttgctttattacaacttaacatacacatttatagaagcttttgaaaagctgtgctgtaccaacttatttcaaattaaaaaagaaataaaattataatcttaccatctgacagttttcattttcaatatttttccagtgaatctgcattggcatacatgtgttctcataattgtggtaattttaaatgctgttttaacaccaacttaaatatcttcccattttttagcgttcatatttctacttcaagtaaatatatacacatacacattaaaccattttcttataacttattataaagatcagaactgtaaggtcaatttcattaatacacaccgaattatttccctttaataaccaggagtaggattactgggtaaaatgatatgatcatctttacagctcttattatatattgccatatagtctccccaaaatataattttagtttgcaatgctcccagtagaatttaaacatactgattgcaatggaacttttctgccactgaatttgttgtatggtggttgttctttatgttatataggtatctataaaatgtatttattaaatacatgtgtagttaaaggtccattgctatgaggaatatgaaaataaattcctatgttttgataaaaagtataggttaacctctaagagacttcccactaatcgcatttgatttttcacccagacttcattctaaacttcaaactggctctttaatgatctctaccttactgcacaatcactccttgaacactggacacatcttctattcaaactgcttctcctcatattagtccttagcatggagcaatgtgttctcttccatctaatttccaaatactgatatatagggatcatgttagactcattgctatccacccacgtgtctttctcaaccaaactggactaagtataccttctaagtagttctttgagatgtgtcctcctttcttcccacactgctcaaatcataggccaattgcagtggactaactggtttcccagaccagggcctcctctcagtctgttctctgcagctttgccagggtaatcactgtaaagcctcaatctaatcatgccatttccctactgagaacctctttactaattccaatgcctatgggatgtatttctaatctttcactgtgatatataagaatgctcaagatctagtactgctttcctttcagactcaccttccaccattcactcacacactcccaaaccttaacaaacacatacatgtgcagccaacccaatgggccagcctcttttatgctcctcacatgtttcctttaactggaatacccatgacagctccctacatagttacttgtaaactcctcctctctgtataagttttcctgaatttttttgataaaattaagttgtgccacccctttatgctctcttagaactttgttctgttctcatggctgttctgcaacgaatctcatggtgttctcctactcaattacattcctgcgtctccca

SEQ ID NO: 2420 - DNA, 4001 bp, Homo sapiens
tgctctcaaggagccttccgtgatggtgtaggtcttgattctgctaactggcagtcgctgggtagtgaggctcacacaggtcctcctatgtgagacttcactccctacacctgatgaggaaaaaaaaacaacagacaattaaaaataaagcaattacccagatcacaggaacaatcgtctgttaaattactctgagaatgttgtgagaatataaggccatttgctttttgggggaagagaggactgataggcatcccgaatctcttgcccgtcacagattcttagtaaatatttgactaatttaaaaactcaatcaacagaattgtttcaggaatttcatgctgagagaaaataacaagatgttatcccgtctctgtgtatattttcacttagacatttgggacggctagcaaatgccccagtgacacgcattcattcatttatacaatggtgcctgttgtgtcccacatgttttattaagacagacattatccctgttttcatagagcatatcttctcatgagggagccaggcagcagacaggcaaacagaaaagatcatttcaaatagtgcaacatgttacagtaccataagtgagatgacagagtaatgcgtgaagagtactctaggcaaggcaacattcagtgagggaaggaagcatgcttttgactgagtaaataaaggtgttcccctttttaaatggtcaaatttccctctctgtcagctgcctaagatgctgaaaagaaagaaggccaaaggaaagaaggtggcccagtccctgccgtcgtgaggaagcaggaggctaagaaagtgatgaaaccgctgtgtgagaaaaggcctaagagttttcttaggcaggcattggacaggacatccagcccaaaagagacctccactgctttgtgaaatggccccgctatatctggttccagctgcaaagagctatcctctataagcagctgaaaatgccttctgccattaaccagttcacccaagccttagacccccaaacagctactcagccacttaagctgatccacaagtactgaccagagacaaagcaagagaagaagcagagactgttggcccaggctgagaagaaagctgctagcaaaggggttgtccccactaggaaatcacctgttctttgagcaggggttaacatcatcaccaccttgctggaaaacaagaagtctcagctggtagtgattgcacatggtgtggaccccatcaagctggttatctttctgcctgtcctgcgtcctaaaatgggggtcccttattgcattatcaaggggaaggaaggcaagactgggacatccagtccacagcaagcactactgtcgccttcacacaggttttgtattgaaaacattgatttgctccagaacatacatcctctggtgcatccccatattgtaactgaactctctaagattttgataatttatcaaactatatattaaatgggcaaaacctacaaatgcatttataatcatcacctctaatccatagctaacattaatcaaaaaattactgcttgtaaggaaatctgatgttattaaataaaccataatatttatttaatcttaatctcaggtgatcatgtctcttattctattcagtttatacataaataagcacaggccctgagtggttaaggaatttacctgaaattacccaattaggaaaagtaggagcccagatactaatcaaattctccctgttttggaagtttacgaagccctctacagtcaaaatcatcattcctttcttgcacatgggaagtttaaggctcccctggagacagcagtttagtccagtcaaaacccgagtcaaacccaaaatgtgtgcccacctgccttgcctccctattctttatctcacagacagcttctccacttaccttccacaatgtatgcagtgagagagcagatgccaaggagggccaggatgagaagtctcatggctgaggtcccgctgagctgtgcagggagagtgaggatcgggctctttgaggatctcttttatgcctccaatggtcagtgcacttcctgtggtgagagggggctttcgaggtgggtataggatcatggaaagtctttgcaatactgatgcttttatttttcttaaaaaaaaaaaatgtccctttccctgttcatactaacctatcgccttgtggcctttacccctttgtctgtggttaatgtgtcaattaaaccaaatgcatgcataaaagaaaacgtggttgtgttgtctcctgccaccagcctgaattcagatcttccaccgtagacatgcctgaaggctgttcactgccatggcccaccacggaagctgtaaaggaaatgaggtggggtggtcactgtgttccatcccacctcatgtgacatccagtgtgacatgaggcttccacaaccatggatcatgagtccctgatgccaccctttgactctctcaggaggggaagagaggctgctgccacactgagcttctcgatcctttgctttcttggttctcatttttctcctccaccttcattcaagtcacccccctttcttcaccccatctccccaggtacccaagaaacaattaaataactgtttaagcatgtctacatgcatgtgtttgctttattacaacttaacatacacatttatagaagcttttgaaaagctgtgctgtaccaatttatttcaaattaaaaaagaaataaaattataatcttaccatctgacagttttcattttcaatatttttccagtgaatctgcattggcatacatgtgttctcataattgtggtaattttaaatgctgttttaacaccaatttaaatatcttcccatttttttagccttcatatttctacttcgagtaaatatatacacatacaaattaaaccattttcttataacttattataaagatcagaactataaggtcgatttcattaatatacactgaattacttccctttaataaccaggagtaggattactgggaaaaatgatatgatcatctttatagctcttattatatattgccatatagtctcccaaaatgtaattttgatttgcaatactcccagtagaatttaaatatactgattgcactggaacttttctgccactgagtttgttgtgtggtggttgttctttattttacataggtatctataaaatgtatttattaaatatatgtgtagttaaaggtcctttgctattaggaatatgaaaataaattcctatgttttcataaaaagtataggttaacctctaagagacttcccactaatcgcatttgatttttcacccagacttcattctaaacttcaaactggctctttaatgatctctaccttactgcacaatcactccttgaacactggacacatcttctattcaaactgcttctcctcatattagtccttagcatggagcaatgtgttctcttccatctaatttccaaatactgatatatagggatcatcttagactcattgctatccacctacatgtcattctcaaccaaactggactaagtataccttctaggtagttctttgagatgtgtcctcctttcttcccacactgctcaaatgttaggccaattacagtggactaactggttacccagaccagggcctcctctcagtctgttctctgcagctttgccagggtaatcactgtaaagcctcaatctaatcatgccatttccctactgagaacctctttgctaacttccaatgcctacaggatgtatttcaaatctttcattgtgatatataagaatgctcaagatctagtactgctttcctttcagactcaccttccaccattcactcacacactcccaaaccttaacaaacacatacatgtgcagccaacccaatgggccagcctcttttatgctcctcacatgtttcctttaactggaatacccatgacagctccctacatagttacttgtaaactcctcctctctgtataagttttcctga

SEQ ID NO: 2421 - DNA, 4001 bp, Homo sapiens
ccctgagtggttaaggatggagattggggcggagttaagagagtccagagtttggacagacaggtctggggtacccactggcatgaagagtaagtggaggatgcaccaaggaccctccacccagaactttgctctcagttgcctattgggagagaaccccgttcactcatcacaagctcattcaccagacatgtactgtcacttcccctggaaggacacaagaacacactgaggagcaggcaggcaggacaggctggggttctccctcagcaggagcctttgcctatggtccccagtgacctagcagggacccctgcctcggccaattcacaggcaggaacagagacccatttccaaagccaaagctagtacagtctgtctgactcaagctcagcagaaatattggccacaaagatgcataaggtagttacagattcacggctcatggaggcctgcccaggacttaacaactgcaccccttcatgcccacccggggttttctgatgtctctataatccctcaggcaaaactgccacattcaaagctcctctcttccactcctggagactccgtgtggctttgtcaaggccagatctcaagagtttgtaaaaacggattcaagagcagatcctggccctggccaccccatcccaacccacaccaccctctgccctgactttgtcgcatgcctctgagccttgggtttgttttcccatctctacgaggctccaccaggtccaaaaaggagcagaatccacacacattttccaggacccagcctatgcccagccctggctggctccatgggcatggatgagtcagaggccatctctgccctcttgctgggtctggggtgggaagccaagtttcagggggaagaatacaaccaggcagacagggtgagaggcggcctttgtgaggggcaagcgctgtggtggggtcagggctgctgaaactcccagggaggcccaggtcaagaagccagctgaggttgctgagtgctcactctgagccagggcagtggacagatgtcatttcactgcatcttcaccaaacgggcaggcgctatccccatcccaatgggaacagcaaccaaacagccccactgagaggtcagtgacttcccaaggccctgcccatgctgaaacatgggatgctgaactgagtccgcagcccctgccattacaggccaggcactgtgcgaggcactttctcattctttcgctcactcttcacaacaggcctgcccgtcacacctgtctcagggtgactacctcctttctacgcaggaggaaactgaggctcagagaaatgcagaagtgaggcgagagggggcaaagccagaagtggatccctgagaggtccgacttcaaagcccatgcgcctccctttcttccctgggcctcagtttcttcgcctgtgccaggaaagctagggctagaatgaaggcagtctaccgggattccctttccgtaaagggctgcacgctcacctgtaggccaggcgcccacaggacttggttccctctcccagtccccttcccggcatatggcgtgtcacctgtacaggtgacccagctgacggaggtgctgggctccgacactcctcccctcccggggcgaagcactcacctgtacaggtaacccagctgcaggagatgcagcagcgccaggcagcggcgcgggggctgcgacccgtgcaggccggcagggtcagcgcgcagccagagccagctgaagagctgcagcgccacggaggccaggcccagcagcgccagcaccagcgccgcccacaggtagcggccgccgagcgcatactggacggcggcccacaggtcggtgcccaggtcgagcaggaaggcggcggtgcccagcacgcccaggaccaggtcccgaaggagggcgccgcgggacgaccagggcatggcccgccggcctccgccctctcctgctcctccgcggttggggcctgccctcagggcccggggttgccgaggcaggaaggaggtgggcgcagccctcggggcggcccggggcctgggcctggtgggcgggacttccccgtcccgccccgtccggggaggagcgaggcccgcggttgtcccaggtcctccgcccgaaccccagctaaaagccgctcgatgctctgctcccgccgccagcccaggggtccaccgacccagcccagccaagcccgctaggcctgaagaccgactgcccttcgcttcgcaggcttcaaatggcctagttttacctttgaggcgcccggaggcccaagaaagcgagagggcggggagactagagcctggaccagggctgcgatccctcacacctgtattgttgcaaaacaaaacgaaacgcaaaggcacattctaatccctaagtgcgagactttgcaacaacgcgtgcgcctcgatccagggatacccggagagcacggggccgctgggttcacgccagcgatccgagtcgggggagggcgggcgttaggttcctgcaaatgagttaacctcatttccatacggaagggaatagaggccgggcgcggtgactcacgcctgtaatcccaacactttgggaggcccaggcgggcggatcacctgaggtcaggagttcgagaccagcctggcaaacatggcgaaaccccgtctctactaaaaatacaaattagtcgggcgtgttggcgcgcgcctgtagtcccagctaggaggctgaggcaggagaatcgcttgaacccgggaggcagaggttgcagagagccgagatagcgccactgcactccggcctgggcgacagagcgagactccgtctcaaaagaaaagaaaaggaacacaacacagaatcaaacgcatgatgagctttgttttgtgagttaaacataatacgcaaaagaagtatgcttgtaggggggtcttgggtcgtcatttcttttctgtttctggtttgtttttggagagagtctggctttgtcacccaggctggagtgcagtggcgcgatcacggatggctgcagctcctggggcttcgcttcctgattcggttgtcctatttcagttcactcctcaggcgcggaggaaatggtggaaggcccagctctgggtgatcctgggcgctgcccccgttacccgttaccaggaagaaggtgagcctggcaggtcacagcacgagcgtgcacaggcccagcagggccatcagcagcagcgggagctggggcacgggcgtggtgccagaggcatacagacaggtggtgtaagcgtcaatgtccacctggcgcatggcacacacgtgctgcatgctgcaggcctcgtcgcagaccccagcagagtagctgactgagttatagacgtagtagcgctgcagtgtgctctggtcgccagcgatgcggtccagcactgtgtgcatggagtgggcgctggcgtccggcaccccataggcctcggtcagctggtactcgagctcccagcgcggcgtcccctgagcattcgcctggctcaggttcatgaagtaggtcaccatgtcctggaaaaagggtttggggtagaccggctgtgagcagttgtctgcttccatccccatcctgcaccttgcatttgcccccaagttctttagagcagtgaccatgaccactagtagttattgagcacttagctgtgcacccattgtgcttggcagacatcctctgaatcgaatgaggtaactgcgcttattacctaggtttcacaaatgaggaaactgaggcctaaagaggttaattcacttggccagggtcatacaggtattcatacaggtattcagtggtagcaggattggaccccaggtttaccccaggtcccaccatgctagggtacacatagaagacgctcagtaaatatttacataatgaatagataaaagcaacataaaaagagcaacactaagcatgagagagattatgaactgtagactcctaggacccaggtgcatgttcacggctagactctgcagggttcatcagtccagcgg

SEQ ID NO: 2422 - DNA, 4001 bp, Homo sapiens
aattaatacaattccatgaaatagttaagtgtcgaaatacctaaaatgaatcatggcatacatccagccactattacttctgcccaaagcattccatgctacataacaaatataagatgtgcttcagcatgctcctatcctgtgcctctgtgaagaactggcagtggtgctgaaaattactactagaaagatgaaagaccaatacccttctttcaataaaaaccatcacttggattctagccaaggttttaaaactaaatgttattagaaacaataaatcaactctgcaggctgaaatgttagtcccttatttcactcattcttacaaaacatggccacaaaatactgtaagaaattgagtgacaataaagcattaataattataggcctttcatttctagcaataatgaaatactctaggttgcaagtgaatttatttcacaatattcaagattccgtttaacctacctgcatctctttccctgtcttcttcaattattacaatggctatatgaataaatacactcactgctattgcccaaacctcctatcactaaacttatataaaaattaaatggagaactaaaatagtttaattcataaaatctagctaagttatgtgtgttcatattgattttatattctttgttcctgcacacaaaacagatgtgaattcctggaggttacagataagtctgtctttctctatccaggagctgaattgccagctactgagaataacctattgcaatgcttaaagcctcttaggtatcttgtcttctgaacatataaatgggttcattatctttatttttccctttattaatgtaaggttccttattatctattaaataccttccagcagtgttagcacagaaattgggagggaatggggagcatgatttctgtaatacacaggtaaggtatattgtttacaatatactaattttctccccagctagcaaaaacttagcagaaaataaaaaaatgttaataattctcttctctcctttctcttccctccattccaaaacaagaggcaaaaacaaagatgttattactctgtagacttcatgcaatcagtaaaaagagtcttattatcaaagcagaatagttgattacaacgtgtttacaaaaactataaccactacatatgtgatacacacttaagtcaagtttcaaccccgttacaaagcctttgtcaacagtgggcaagtgggaaaaagccgaagggctctttggaatgaaggaaatcactggaggggcttctcttggaagacaaggattccttggtgagaggtgtagagagagaaacaagacctaaccttggcgagggggcgctcgcccagggtggggacgagaggtcagggcgagtggggagaaggggattagcgcggaacagccgcgacccggggctgccctcgcaccgtgactcccccacctgcagctcaccctcccaccgttccccggccccggccccggcccgggcagcgcctttcctcccggccctccgcctgcatatccgttaccccggcggcagcggggctgcgggggaggggaaggacagcggagccgggaggcggccggccgcggcggggatgccgcagtggctccccgcggcagcgggtcaaagtctgcccgggcacagggagccagctgaagcggaaggcggcggtggacgtcaggactggcgagatggtggcccctccgagtcctcccacaccccagccgtgccggtacctcatactggatgtattgcttcctccactcgggagtgatgtgcgcggagaggtgctcggcgaacttcatcctgccgtttccccctcactcccactcgggtccagcagctacaggcggcggcggcaacagcgactccgactcctccccacatgggccccggcgcggcgcggcgctgcgcttctctcctcctccgccgccgccgaggtctcttcagagcagcccgcccgccatcttcctcctcctctccatagccccgcccctccccgccctctggacgtcatcgccatggtaaccgcctacaccgccctgacgaagggggtgctgtaaggggtggggcttgggtacgcttcttaagactccgccccttgtgggccgtacgtgctggaggcacctccctggatctcttcagtctggctcctgttggcctacagctgctttctaccgcctgtctgggaagcagcagtgttgttactgcagttaatattaatactgtagcaacaataatccacacaagacgtttatatttacaaagaactgtgcaaatatttttccattttgatatttatgcttcataaaacctttaagaaatggatcagcactaatccaaactaagaagctaaaacagttcaggactaaatgtatttaaaggaacagtattttacacactctaggtgctcaataagtgcttattgaatttaattaaagacatcaatgccaaaaagtgcatgctgcttctgaatttcaatgtaattgtctagtccaggggctatcagaaaagccaataaaaacaccaaatgagggtaccgaccgcacttgtaaactgagcttcctggggttgggggtgagggttgggagggaaaccaacgttgagaggaaagagaaccccgtagaagtacagctctaagcccaccccagtaaaaccggaaacaggcccagcacccaggctgaagtgtccctggggaacatgggcagagatcactcacagagctctgtactacattgagtgtgggagtgattgtcttggaagtcccaattcaggacagaaacccaggtcctaccctgggtggaggagacctaataataatttattgagcactcactgttcctgtaccaagtgctattctaaacctcttacatgtactttgtcccttgattctaacatttttttttttggtctcgctttgttgcccaggctggagtgcagtcacaccatcatggttcactgcagccttacctcacataggtttgtgagccatcctcccacctcagccccctgagtagctgggactacaggcacatgccattatgccaaactaatttttttgtttatttttgggagagatgtgggtcttgctatgttgcccaggctggtcttgagctcctgagctaaaacagtcctcccacctaggcctcctaaagtgctggaattacaggcatgagccaccttgctcagcctaaccctcacaattttgatgagatttcaagatttactagggaactgctatgcctggagcagtgctctgagatatcattctctgctgttgtctttttttctccatgtacttttttcccctttctcttccccttaattcatgccaatagggattctgcaatcatttccccaggagagggatgacacaagatggaaaataggcatagactatgagtctttctggctttttctgtataaaagccttaacctctggtgaaagggtaatcaaggtcaaaaaaataaagaaagaagagtgaggactcctctcacctcagacctccgtctgctcaccataaagattcccctctgctggaggtaaaccttgccaggagaaagagacaggcaaaaaggaatatgtgtgctaccaggaaggaggcgagaccacagaaaggaaatggctgtatgttgtgcctgggaaaagggaaccagggacagctacaaaagagattcctgcctttagccagtcatggactagaatgggaaattcttagtagcaaccctggtggaccatggcacactgctcccagcagcaccgtacctctatgccttaattgtgcacaaaattctggaaccatggcccaacccaagaaagtaaggaaaccctcaaaactagctctaaaattcttgatttttctcatgcctgatccagagccctgccacccaggacatgacaacttaatttatccacagaagtagatttaataataaatttcctgccaggcacagtaactcacgcctgtaatcccagcactttgggaggccgaggcgg

SEQ ID NO: 2423 - DNA, 4001 bp, Homo sapiens
tgggaggcggaggttgcaatgagccgagattgggccactgcactccagcctgggcgacagagcgagactccgcctcaaaaaaaaaaaaaaaaaaaaagatagtgtgatggttgcacaaccttgtgaacatactaaaacccactgaattgtgcactttaaaagggtgaattttatagtatgtgaagtacatctctaaaaagaaaaaacagaacaggctgtgtggcccaactgatttatcactactcttagaaggaagcccaatttaaaattgaacagaataaggcctgcaaggctcccgtgacttggtccctgcctacctctcttaaacaaataaataaaatgtatactatgtagaaacaataacaaaaaaaaggcagagcaaggtatggggcagttctggtgccagagggtttgttatttaaataaagtggtcggaaatcatgcgtcgctgataaggtgacaacagtcagaagcctgaaaaagttaaggggtaagcaatataaatatttaagtgcttcctcataactttgctcactccactccagctaaatttgccacaatttctgtttcctccatctgaaatgctctccctccttattcttccattcttcctctggttcacttctactcctgtagttcttggtaacaaacggaacatttgtggagtgagggggggggatccatttccttcaaggcgcagtttggaggtcacttcctcagggaagccttcccttctctctttccctttaaagctcccagtatagcatcttccagtacttacttgaaccgtaatgggtcatttttaacgtctgatccccttcagacaagctctggcaggcccttgacgtatccccagcgactaagcaccacgtctggcacttaataggggggtggaatgggagtcctggattcaaagtttggctccaacacaagacaactggacgcaagaggtgagcccactgtgatttctggggaacccagggaagggctgcttgattgactgaccgaccagcagtgagatctacaggctctctcagagctgcgccagcgccgagtccccggccccacatacttagaaccccgtaatggggctcaaaatcactgaacctcgggctcctaatccccaacggcgcatttccaacccccaggcctgacctgcaggttccgggtgataaggtgcagtttctcttcagggctgggagcgtcccccatggctccgctacccctgcttcccccgctcagcccggcaccagagccccttcctgggtcaccgtcgccgccgcgtgccgggaactgtcacgcgagtccagccaggttgcatcagctgggctcggcgctccgcttactcggcctggacccctccggcagcggccggaaaaagtgaggagcagcagagagtcgagcaggtcgatgagacgggaaaaggtggagccagtgggcacggtgggcggtgcggagggcggggctgaggcgcctgagcggggcacaaccctcctagaggcgggacggtttcctgccaatcactgctggtttgccctccccctggtgttggcccggctgactcggggtaggggaggtcggggagggggcgataaaatggcgcagggggcggagtgaggcgcagtcgttcgcccaggctttggcccggcttccggaggtgaagagcgggagggacgagggggtcggcgttacccggcttggagggggatgggggcgcctgttgcttctccagggggttgcgcacgccgtccgccccttggagggattgggaggcccacgccctgctgcgagaagggcgcgttctagctcctgaggtgatggcgagggaatgtccctgcccctccacctccaagtcggcgggcgacagatgcccctcaccccgctgaggaaaagggaagctccctggtcgtcttgagagtcggggagcgccgtctgcagtcccctgcccagtgggggtgggggccgcctctgtcccggccggctcggcgggaggctgttgctggcgggaagatagccgcgggcttttctgccgcgtctcgcgggtgggggcaggaagaggacgacccattccctggggagatctgaggacggtggtccccgggagaggagcgcacagcacaggcctgctgaggggcgggtttgcccctactgggggaggggcggggagaaaactctcgcttctcccgctttccgccgggaggcgggaattcgcggtgtccccgggggagggagacgcaaaggcccttcctggaaggcgacaccgtcccgggccgttgcatttgtgagagagagccaaggcagtatcctccaaaggttgggcctgggccaccctttctccggctcctcaagggctggaggcggcgtcaccagttacttccagggcaagagggaaagcagttattacctcagtgggccctggaaaggtcctagaagtggttgaattgcccacggcctgccctaacctgatctccggtgttttgtgtatttattagggactccaagctctaccagacctgcctgaagtgttttaaagcacattttctttttgaaaagaaacctgttgctgcagcttagcgcatctgttctctgtgtccatgtgggaggagaatcctggcaccctcatctagtgaaatgttacctaaagcaaagatttgcagccctgggttgttttttccgtcctgcagtgtttttagttacttcgaaggaatttgcaaaactgttacagataatttcagttctttttgattttttgtaaatgttgtgcctattttttatggagtgataaagcctgctgagtgcgtttcgtgctgtgtgcttcacatgtattgcatttgggaaaggttggaaatcaaaggccagggggaagtcttgtccactggaaataatctctgctcttggctgtacctgtcagaccctgcttggtaatggtcttgactttagagcttgaaagaggatgtgggcttgcatctggtgttgcagttttagtggcctcaataaagtaaggctttgtgctcgaaggcagtaggttttctgaggtgagataaaaatagaaagggaaccagtttctgaggttgcaaccaggaggttcgagaacagagagggggtggtaaactgaagtgtgaagaagggggtggacaggtgagagagatgtggaaggacagaatggggtcacagaaaggatggggtgtagaggaactaagaaatagaattagaagatcggaaaaatattcttcccttaaaaatgaagggatatggccagacatggtggctcacgcctgtaatcccagcacttggggaggccgaggccggaggattgcttgaggccaggagttcaagactagactggccaacatagcaaaaccccatctctactgtaaatacaaaaattagcctagcatggtggacgcctgtaatcccagctactgggaggctgtggcatgagaatcgcttgaaactgggaggcagaggttgcagtgagcccagatcacgccactgcatttcagcctgggtgattgagtgagaccctgtctcaaaaataaaaataaaataaaaaaataaaggggtccccatattttaagtggaggttaccagacaagtgctaagaaaggtggtagatggtagacagagaagtaagcaagccttcttttgacagagaagtaataagtaaggctgtctttggaatttcactgaagaacttcagttttatatgaggatttccccccttgcacattcattaaataccatgtttttttagtatagaacttttaggtttagagtactttcataaacatcctattttttctcatgataatctgtgtttgaagttaacagtatttaccccctttttagatgcatgttctcatctgtattgaagttcagagacttgaagtgaattgctgaggtccagtacctctataaaggatagttcagtgaacattaatttgcataatttgccggatatttcagatgtctacctagtctggtcttcagtgacaatatgg

SEQ ID NO: 2424 - DNA, 4001 bp, Homo sapiens
gccaagattgctactggcatacccagtgctctgcacccatgtaactagcactactagccttggcagccatcttgaaaatgatgcccggcttacaagggagcccatggaatacagtgcgtctactgcacgttaccaccaccactcctacaaacaacccgaagggtaagtcctaaagacgtgtctgcagctttgccttcaaacaggaagaaaaatgtcaagttaccagtgactatggccactctaataagctacagccagggatctaacagaaatcgacttaaccagttatgattctaggacaaggaagaatgaaaaataagaacggaagaaggaaaaaaaaccactttcttgtaaatatattatttactggatgagcaaataaaaacagttctctctggtcaaagctgtgctaagacaaaatttatctcaggtattaaaatgaaacgtgaaacaaaggcaatacaacctctcggtaaagatgacaaaacctcatatagtcaaatcctcttaccctaaaacgttaacaatgtataaatatccgatgtcagtggatcacattctcaaataccgagttcaataaagtagaaaaagatgacaaggataaaaatgtactggaccgtagtttcccgtttaccctgttaaggaatggctcattcactccgcttgccttttgaattgctttgtactgtgacgaagccttttaagttagcttcaaattaatatttagctgcaaaacaaaggcattctctagatccactaatccctaatcaaggaaaacaacaacaacaaaaaatcatactaatacaccagaggtagtaaacgcctttcagaacagagctgtggattggggcttcccaagccccgagaagccgacagagcaggaagcaagcaagaaggtgggatggaggcttcagagcccggcagctcacctgttgatgaaaccatatccgttccttacattgaaccattttactgttcccaaaaccttcgttgctggaaaagaaaacaaagcaaaacaagccacgattaccagctatccttttccaaatccgcccggcttgggcatccggtccctcgcacgccggccgccgcggccacctgacagccctttctctccaccgcccgggtgcggggccacgcagtcgccgccgccgccgcacacgtgggtgagtctgaagcgcggggcgctccagggcaggcccggggcgcgggccccaggatgggtgtgtgcgcaggccgcggacggagagcacgtgagggaaggggaagccgctccggcctgcgtaggcggtgcgccgcgccctccgagcacacgcggaagggagctgggtgggggtgacgcgaacaacggcgtgcgggcccgagcgcacgaggccggtcggcggggaggggaccccgtcgcacacgcggtcggcggcgcgcggccgcagggggaggggcgcgcggccgcgcggggtccacagggggcgcgggaggcagtgcgcgcgcgcctgccgggcgggtccccgcgagagggagtgagggggggacgggggggatgggcggccgcgcgccgcggagtcggtgcccaccggccgcgcgcccgccggctcgcccagctccggctaacggttccgctgctgggctgcccgagggccccacccccgtccctgtccggtcctcaccgatgaccttcttgtccccgccggcaggcgccgccgatgtgaggccgcccgggccaccgctccctgcgccgctgcccgtagtgccgggcttggtgtcggcggcgctgagggcgggggcggcggggggggcggcgggcggctgctgggtctcggcctcgctgctcatggttgcggtgatggtgactggggccggctgcggcagctgcggctcctcccggggtgtgatggtaactaggccggcggcggcggtggggctgctcagggctctctggggtccgctctccgctcccgctaccgatcgaactagcgagaatggcgggacaggcgggataagccctacgagcgacccgccctaggcgttgttcactggccagtggtactgtcaatctgcccacctgaccccaatccctagcttctattggctaatattttatcagtcctccattctcattggacctttggcggctaattcagtcgacctacaaccgttcctgcctccgccggccgccatagagaccggaactagaattagagtagtcggccacgaaaaccatagagtacccgagaggacgggcagaaggaacgtgacttccacgaggcagccgccgggctggcgggccccacgttcagggttgtgtctcggctgaaaaaaaggcacgcccgaacgctgggcagggattacccggccggacccgggattggaagggggctcgaagacgccttagccccccgtgaagaaaaggcttccctccctcccagctccaaatacggtccctgtgatctgagaacattacggcgggcatagagtcgtcttttctttaatggccgtgtagtcgcggcacagccgagggtttctggaattgccttaaacgtatgcgtttgaagagcgtacccttttgtcggagcagtcaccttggagggaccacgcaggctatggcagcccgggttcagcatgtttagggcgagggtgtgctccatggggacctgccttctgatccgttttaccaggcatatatttaaaaaaatgtgtcttcctttccaagtattcacatctttttctactgaccacaaatcagatttaattcaactcacatttattgaacaagctagcctgttttgttttttcactttattcctgcaacagccacgtgatagagggattactatccacgtttcacaaacgataaaattgaggctgccacctgatgttactgaagtcctccacccaccttctttcgttcttttttaagcgtctactatcggctggggatggaatagttcgcgagtcagtttctgccttctgatggaggcagaaatttaaacagccaacacggtaaatactccagagctgcaaaaccacgaagtattttgggagtggaagcagggagaaggtggagggctgactttccgcgcacagggtacaggcgagaagaggtgagatctcgggaaatgcagtcaagtagttcagtaagactcgaatgtgacattgggttgcagaggtgggcagtcacttaggtatatttaattggaaatatatcctgaggggaagagtgagaagagcaattttagagtcataagtagggaggggcatctttttaaaaatggctgcggagtggagaatgggttgcagaggggcaaggaatggaagtagagaaagcagttaggaggctaatgcagtattccttacccctaccaatgccgtctaggcctgtgagttccacctcctaaaggcgttcttgagtcagtcctaaaccctctaaatgtcaattcagagtcttttcattcctactgtcactactgtaggccatcatcaccaattgcttagagcaaggggtaggaacctttttctgtgagagccaaatagttaataatataagcttggccgaccatatggttctgacttactactcaggtttggagcttgaaaacagccttaatttttacatgacacgaatctttacatattttcaactatttaaacattttaaaaaccatttgtattcttagctcatgagccacagaaaaacggagtgtagtcggctgacccctagcatagagcagtgctgttggctactaaccacacctctctacctctttcttactctaatattacccaccacaacagccagaaagttcttttgagaacatctatctgatcatgacactgtcttacttaaaatcttccagtgactactattacccttagggtagtccagattccataatgtggtttactggactctatgacttctaagagaagtcttagagtcttctcttgtattccctgtccaaccttccaggtgcttgtaactactggctgcaggatactgcaggagc

SEQ ID NO: 2425 - DNA, 4001 bp, Homo sapiens
tcctcattaataaaacaggggaataaagtaactatttcataaagttgacataaggattatctgtacaggatttagaacagtgcctgacatatagtaaatgttaggtaaggtgttaataaaacaagtaagtgggccaggcctggtggttcatgcctgtaatcccagcactttggaaggccaagatgggtggatcacaaggtcagaagttcgagaccagcctggccaatatggtgaagccccgtctctactaaaaatacaaaaattagtcgggtgtggtgacgggcacctgtagttccagctactcagaaggctgaggcaggagaatcgtctgaacccgggaggcagaggttgcagcaagccaagatcgagccaaggcactccagcctgggcaacagagtgagactccatcaaaagaaacaaacaaacaaacaaacaagtgttcatcaatccctagcctaagtcaggctctgggttatgagtcctaatatctccttgaacttttcctccagcactttcatagtttgtaggtatatatttaaatgatcatttaataaatacatgtccccctcactagactgagagcttcacaaggaaactattttgttcactcttctatccctgataactagaacaattgcccggttcctggtcacaaccaggagatatttactgattcaatgagggaatgatctgatcacatttcatcctaatgatctttttacatttttatctactccaccagtggataaacttcttcatctttttgtctccagtatcttgtacggttctaagcacaaagtaagtgctcaataaatgttttctgaactaaagcaggaactgtgtaagcattttctgtaatcactgtactaaatttatgatactcgttaccaatctgaagggttatctggcaaaaaaaacaaaaacaaaaacagctggtgtggacaaacaggaaacacctggatgtggccaacagccaccaagatgtttgaaataatatccttcaatgtgtgaggcagtataggaatgaaaatacttgctgtgactgtagcaacagtgatcataaatataaaggtgggcacccaactggtataccttcaaattgcaagtcatctactgctgccattcggccagtgagtcttctcccaattatgaggaagaaaatttgcagggttctaaaagaaaaaaataggtaaacataataggatgacagtataaagtatctgcaaacaactcttatgtattagaaatggtatcactttcccttgcctcccttttcagtggggtttaataggtttatataaagataaccactaagcatcaggtattattaaatattaaaactgtaacaaagaaactaaccccggggatccaaaggttccaattcaaccttatttggttgtgtatgtaccaggaatgaatctcaactcactgtgtgaatgtttagagagcaggtgcagcctagagatgtaacgatgaggaaggagaggctgaggtttgaaagaggtgatggggacagtgaagaacaaaggcagttcagcctagccagtggttaaaggcacaggctctggggtcagacagagctgggtttgattcccgattctgctgcttctctgctgtatgcgcgctcctcgcggcctcagtttcctcatctgtaaaatgggtgcataacgatacctagtcacacagtgcgggggtcattaaatgggagtgcgtgtaaggagcctagagcggagtcaggcaattagtaggcaatggggtgtcggcgaccctgcagcccgggacaccgcgaagcagaggcagtgtttcagggagaggagctgggccgcggcggcccgggcgggcaggagatcctgaacccccttagcctcgtacaggtcccgcaaactcggcagcctcacctcgcggggttaggcgtcccccgggtcccgagaaggctcgggcctcagttgctccgcgccggtttcggtccagcccagttgccggaagccggagatccggggggcggaacctctccgcctcctccgggaagagccccgcctccttaaagagacagcagctcccagagaaacctgcgtgctgcggcgcgcagagcccgctcccgcccgcccttctcccgaggctgagcctcgagttcttaaagagacaggcgagggcggagtggtggggtcgctgagtgtgactacttgggctggccttgctccagggaacgtagaaaattctcgagtttagggttttcttactgtgtgtttatacctcttttcctaaggaaatataaaatcgggtgatgaaagacgattgtgaaagaaaaaattaagtcacccgcgtcaccagtccctcagtttcttttggccacaaaaatttcactggtgagaaagtacatgatgagtcaattacattctgaatgagtgatcgaaagcgcgatgtctgttcgtatgagcacccccagtaagtgagcgcttggaaagactttacatctaataatagccatatatagtgtatttttttccccaagatgatcatgatcaggctttgtacatgcaggatctctaattctcagaacaatcctgctatcttggggtgattatcctcattttacaaagagaaagctgaggcttagagcatgtgcagggcacttttggttgagtatgtaccaggaatgaatctcagttcatgaattcagctgtgctagtatatcagccacctcttatgtcccatttcagatcatcttggcctcacctgctgcttatttcaccgccactcatcttattccagcgtcagcagatataacctgagtgagcttgcctccagtctatgcctcaggcttctcactttctgcttcgaggcttgtttcttcatgcgatggggccatgggaccttgctggagccaatcagcacccagacaggtgcatcccagaagtgtaggggtagagagttgttaatgtctcatgaggcaaatctctgaccaatggggtcaacacttgatgaatatatgcttttcctgtttttccccctcaggcgccctttcatatagctttcaaactacctagcaggattaagcaaccaaatgcctttggaagtgacgcatttgacaatgcatcttcgcaatgggtctccttccttccctgatatacaagccctgtacttcactcctggtgcttggattcatacttgccaataaactactcatatgaggaagcaatatgaaggcatgttggtaccaaaagtggccccagaaaataaaaccttaggttggcattttctaactgaactgcgcaccagtcacatggcaacaacaaatatattgctggtgttaaggggagagagaaggaggggggtggtggtggtgtgataacacttagaatagaatggcatcacaattactaaggtgtctgtctgcagttgattgggataacgtgcaggtagaagataaggtgctgagttatctagtggctgtggcacaggaacattaagaggacaatggtaattataaggactatggaatggactgggtgttcttaactccattggaaaccttgaaaataaaatgacagacttagaacagccaactgtcaacttgaggcactttgtgaaagctagagagcctctatggcagctttgaagattcttattcttctatagccttgagaaagactggactgaaaatcaggcccaagatctaattgtaagggtggcaaagtttcaacgaagactgaatgcacagcctctgtaggtctcctccatcaaagctggggcattgtcagaaaatgaatgggaacctgagaactgggatgaggatatttgggtaggaaagcctgagacttgaccatccctcgtttccagtttcccttgaatctttcaagggaaaggtggctgtggcagaagtagtcctttcccccttgttaaaggaaagcaaagtcctcttgcttacggatcctgcaatgattacctgcacaacattgctttggactaagggaccaatttaattgtaaagaacatgcaac

SEQ ID NO: 2426 - DNA, 4001 bp, Homo sapiens
ccaggcgccgggtggactccaaaatggcgacctttagcggggccaaacatcgcgagaagttgcgggtggttgcagttatcgcgacgcttcggtgcggcttctgccttagtaccttagcaagcgcgaactcttttaaagtgacaactgatttttcccccaccctcagaacgaagatgtaaacctccgtattcctaaaggacaacgggtcttgctacctatagagcgagtgaggtgccctccgcgtgggtagcatatatgctcaagaaaagagggcgggggaaggagttcctgaatgaaggtctggagattggaatgtgaccttgcacttagtgaggtcggaaattattaaattggggcttccacactacacccagactacaccaggagaaacagaatcatagttcacaacgcaaacgaatgccaggaatggtcagtgagtcaaaggaccagtcaaaaacaatcacacttgtgactagactcgtggctgcattaaacattgactcattggggttccaggggccaaaagactggcctttctgcctccctgggactgtgcttgaaaacgtctatttgccacttcagaaagcacagtatgaggtcagcatctgggcccagggcagctgcctcattcaggtggtggcagtgtaaggaggagtcgtgtaacgcgtgtcatcagattccagttcagttcctgggcatacaaatatgaagacttcattcctgccttcattgtaacaagtattcattgcagttgggagacagggtggggtgtgagacacacagccactgaatttcaaagcaacgtgataatgctagattatctgtaccttttcaaacgtgtatgcctagaacccaggactgtgcctcgcaaataaaaagtgttcaacaaatactggctgaatgaataaagacagagttgtatagacatagagagggcaactagagcactctgggagttgtaaaaagccttaaagaggagataactgtttgaacttttggaagaattagtttaattcccaggcgaaggaggaataaagacatccctgaatttatatctctcttttccaagaaatccatactcattgttctttatccagccgggattcagacagcaagtcccacttgccaagagtgggtttatcaagcatcaaacgggcccgctggggcaactatgaaaagtgtagttcacttggtgcaaactcacctccactgtaaaagactttgcttctgaataaattatatgtaatgtttccatcttttcacatctttcatgactcaatttttttttgctggtgcaattttcctccttggttcttcaagacgactgcaacggatgatacagcctgggttagggggtaggtaggagggaaggtaggagtggttagaagtccaccggggtggccgggcgcagtggctcacacctgtaatcccagcactttgggaggccgaggcgggtgaatcacccgaggtcagaagttcgagaccagcctcatcaatatggagaaaccccgtctctactaaaaatacaaaattagctgggcgtggtggtccatgcctttaattctagatactgggaggcaggagaatcgcttgaacacgggaggcaaaagttgcggtgccaaggtcgtgccattgcactccagcctgggcaacaagagcaaaactccatctcaaaaaacaaaaaccaaaccaaaccaaaacaaaaaaaactccaatggggtgtatgggtgggtccagggaagcttctggttcaacgatgagagtggttgattttcttaggtcacagcgtctgacctgtggagccgggtatgtatacaccctaaggcataattagctcaagtgttgtggtagtttattctagcaaaaacatctttaaagcttacgttcccatttatggatctaatgaggttctgctgggattcaggaatgagagcgttaatctttgcagcattttctcgtcacccggcacacccgctctcaagacgcctaccgaatagtctactctcgcgagagtcagaaaaaagtcaagctttttattaacaccgcccccagccctattagttaccaagcaacagtgccaccaggctcctcggcgctgggaaactcaggagcttgtgatctctctggttccgacttccagccgccttcccgagccagttaggcgattgcgaccctgccccgccccctgggtcctgcaggcgcccgattggtggatgattctctccaggtgaggacctacgcgcgagggggcggggccagacgggctcacatgatttgccggcgactgtagcgccggtcccggccacaagctgtcggctcggttcggtcgcgttacagggcaggcgccggggccaaggcagggagggatcttaggagagatcgtagggtgagccacagctgcgcagccccgggtagggtctagcggggcgggatgtgggggctgcgtgcccccggatgaagtgcggggagaggtgctggtccccaggcatggcaggcagcgcggacgttctgggaccgggagccacagtctgtgtttgggttggaggatttgtgtggtcagtaaaggaatcgtgtaaggctcttgaaggcgcaggatcttccgtcctcaccagccccctgttgtctgaattgggggcatgagctcaggactttcccactccagtttgaatcagggcttacccctcttcctgaggtgaccttggggaagtcatttaccacctcagcgctccggcgttctttagactgagtcccgggggtaactagggagagggtgcggagcagggcttgagaatgcactagaggagaaatgacgacgtgctagggctgtcttggggtccagttactgtttttccttcagggaatatgttcgagattttcccacgtccctcacttttttcttttctttctttctttttcatttttcattttttttttttttttttttgacagagtctcgctctgtcgctaggctggagtgcagtggcgggatcttggctcactgcaacctccgcctcccgggttcaagcgattctcctgcctcagcctcccgagtagctgggactacaggcgcgcaccaccaggcccggctaatttttgtatttttagtagagacgaggtttcaccatgttggccaggatggtctctatctcttgacctcttgatccgcccgcctcagcctccccaagtgttggaattccaggagtgagccaccgtgcccggcctcactgtttgcaaaactgagtcctaccgttagattggagttaatttcctggtaatgtacttcgtctatacataacccaccccaccccaactgctgccactactctgcccagattcttaaaactagaatctgaggtcatgaaaccttgagcaggacacttaattcgatgaatctcaaattttcaatctgtaaaatgagaagaaataatggtggcaaaatctgcctaattacaagattattgttaggactgaagaagataacgtctgtaaatgtagactcgtaagtcagaagataaatgtaaggttctagtgcaactctttttataggtgaggaaacagagggctagagaagtagctgctaactgggagaaacaggactgaacctgcctcttggcccagggtgtttttacttataccacacggatccaatgcactgactttttttaagttatgtcttctttcttccccttcccttttttacattctacttctctgtttcagacatctgaagagctgccatgtctggggcatcttcctcagaacagaacaacaacagctatgaaaccaaaaccccaaatcttcgaatgtcagagaagaaatgttgtgagttctggcagagaggagggactgctctctctcagcattttatcttgggaatatagttataatcctggactctgctgcttggtgggagtgataaataattatttgacatggaaatttaatgcaaagtctccagggtagaatgtcctgtctaaaacaagtagacttagtgaaatgtc

SEQ ID NO: 2427 - DNA, 4001 bp, Homo sapiens
tgtccagttaatcctttctgacataccatgcatctcagggtgaagcggttgacatcagtaaactgtctccttcttctagcttcatctgctaattccagtgcttgtacaagaacaatatcatcattagaggagaaaatggtcagaggaggtgtatctggatcagggaagttacgctgaagtggatcatagtggatgccatcataaataagcagaacccttttggtatatcctgcatcttccccaaaacgatcaattcttactgtctgtgtatccactacacatatttcacattggtaaaacttggacaaaatcgatatctctattgctcctccccaagtgtcatcccttttgatccagtcacagtactcttgatttgtttttcccagtattgcctcactatagaagtctggatcgcttgctacaatttgtgctatgaggcgtctcatctcaggggcacaagctggattcaagactcctccttcgacgacatagtacacactagtaaagaggcaagagttgtctgctgggaccacggttctggtaagcacaggcaaagtttccctgacgtaactagaagcaccacgtttagtaaatgcaggtgaacttctgggcctggtttggtcttcttcaatgatcagcatgtcacctgttaaaaataaaacaaatcccgatctgcaaagaaattacagaagaaaccgagtgttctctagccaagtctgtaaattacaaactgaaggagttaaagcataaactggggttactaaggagaatacagttttgcaagtaagttaccagtaagaatctttgttcactgaattttcataaagatgaaaaaagaacaaaaaacacttgaggttgcatcccaatttagtgaaggggtctggagtaaacaacttcaagcttacctaaaaagatacatttcaaaaacaaaatttcctttccttatacagtattttacagaaggtgctcactacagagtaggccgctagggggttctccttctccggaaacttatctactctagagtgtttacaacatccttgatacagcaactgaaagcttttaattataaacactgatgttcaagttttgatatggcacagaaataactgctgctggttagaaattgaaagagctttcagtgggtgttttaaaagctaactcgaaaatgagtatgcctgtcaaacgaagtatctacgaaggggactgcaaaaatgaatcaagaaaaaaaaaatcctgcacccttgagatctcatcggtgatatagggaaaaagagacataaggacagagaaaataggccctactttatatttttgtggacgccgagggaaaacaaaatgggatagtttcaaagccgaccagaaagcggaatggggaagggggtcttcaaggctttgggttccctttcaaccctgtgtcaagacaaggagttgctagacacttgccctggcccccgtcagcattctctgttctttgatctatcctcgcccctggcctcaaagcccccccgccgactcacagccaccttgccttgactggtgttttgttctctctcacgcccctctccatcctcccgggactttccctggccccagccctgattccttaccagattggatgggcaagtcttccagaatggtatccccattgctgagatccaggcactcgggagggtatccgacgaggattcgctgaccgccgggggcgatcccggtgatggcggcaatttggccctggagttcccgcacccgggtccggctggacagcccctgcaaaacatgggtgccgtccttggccttgcagcggagccgccacatcgtgtcggtccggctgcccacaggccaggcacccgcggggccagctttggtcccggcagcctgttgggagacgccgccggggaaaccaggcgccgggtggactccaaaatggcgacctttagcggggccaaacatcgcgagaagttgcgggtggttgcagttatcgcgacgcttcggtgcggcttctgccttagtaccttagcaagcgcgaactcttttaaagtgacaactgatttttcccccaccctcagaacgaagatgtaaacctccgtattcctaaaggacaacgggtcttgctacctatagagcgagtgaggtgccctccgcgtgggtagcatatatgctcaagaaaagagggcgggggaaggagttcctgaatgaaggtctggagattggaatgtgaccttgcacttagtgaggtcggaaattattaaattggggcttccacactacacccagactacaccaggagaaacagaatcatagttcacaacgcaaacgaatgccaggaatggtcagtgagtcaaaggaccagtcaaaaacaatcacacttgtgactagactcgtggctgcattaaacattgactcattggggttccaggggccaaaagactggcctttctgcctccctgggactgtgcttgaaaacgtctatttgccacttcagaaagcacagtatgaggtcagcatctgggcccagggcagctgcctcattcaggtggtggcagtgtaaggaggagtcgtgtaacgcgtgtcatcagattccagttcagttcctgggcatacaaatatgaagacttcattcctgccttcattgtaacaagtattcattgcagttgggagacagggtggggtgtgagacacacagccactgaatttcaaagcaacgtgataatgctagattatctgtaccttttcaaacgtgtatgcctagaacccaggactgtgcctcgcaaataaaaagtgttcaacaaatactggctgaatgaataaagacagagttgtatagacatagagagggcaactagagcactctgggagttgtaaaaagccttaaagaggagataactgtttgaacttttggaagaattagtttaattcccaggcgaaggaggaataaagacatccctgaatttatatctctcttttccaagaaatccatactcattgttctttatccagccgggattcagacagcaagtcccacttgccaagagtgggtttatcaagcatcaaacgggcccgctggggcaactatgaaaagtgtagttcacttggtgcaaactcacctccactgtaaaagactttgcttctgaataaattatatgtaatgtttccatcttttcacatctttcatgactcaatttttttttgctggtgcaattttcctccttggttcttcaagacgactgcaacggatgatacagcctgggttagggggtaggtaggagggaaggtaggagtggttagaagtccaccggggtggccgggcgcagtggctcacacctgtaatcccagcactttgggaggccgaggcgggtgaatcacccgaggtcagaagttcgagaccagcctcatcaatatggagaaaccccgtctctactaaaaatacaaaattagctgggcgtggtggtccatgcctttaattctagatactgggaggcaggagaatcgcttgaacacgggaggcaaaagttgcggtgccaaggtcgtgccattgcactccagcctgggcaacaagagcaaaactccatctcaaaaaacaaaaaccaaaccaaaccaaaacaaaaaaaactccaatggggtgtatgggtgggtccagggaagcttctggttcaacgatgagagtggttgattttcttaggtcacagcgtctgacctgtggagccgggtatgtatacaccctaaggcataattagctcaagtgttgtggtagtttattctagcaaaaacatctttaaagcttacgttcccatttatggatctaatgaggttctgctgggattcaggaatgagagcgttaatctttgcagcattttctcgtcacccggcacacccgctctcaagacgcctaccgaatagtctactctcgcgagagtcagaaaaaagtcaagctttttattaacaccgcccccagccctattagttaccaagcaacagtgccaccaggctcctcggcgctg

SEQ ID NO: 2428 - DNA, 4001 bp, Homo sapiens
acttcatctttttttttttttttaagagacagagtctcgctctagagccctgcctggagtacagtggcacaatctgagctcactgtaacctctgcctcccaggttcaagtgattctcctgcctcagcctcccaagtagctgggattacaggcatgcgccaccatgtctggctaatctttgtattttttattagagatggagttttgccatgttagccaggctggtctcaaactcctgacctcacatgatccacctgcttgggcctcccaaagtgctggggtcacaggcatgagccactgcccttggccttcttcatctttctttacagcactgtcgtgaagatttatagcctaactgtgttctccagaaactgttatctccagaaaaacaggaagacattgttcttataatctttcctattattataaagactgaagaaaagaccaattctccccctggcttttcagactttgagataaaatctttcaaatttttttaatttatattgccccccaccacctccctgccagctgggcaaccttcccactgttggcccaagaactctcatgcctggccatcccagtgtactatcaatgccactgattcacagaaaacagtatgtgcgctggtgacatttccaggggaaggactgggtaaactcacctcgacattcagagaactggcctgggagctgaggttggcactagtgagagcaagcggaccctcaaacatctgagccaagtcttgcataaaagcatgatcaggaatccgaatgcctacaagctgtaaggcaaggggaaagggatcatgagaaaggttggaagggataagagggtaagtcttatctggatcctagtgaaagccaagtggcctggagtctggggacacaagagaaaacttgactcacaggcgtaaaagggtttaggtccttgttgagctcctccgagcgttccatcaccagggtcactggtcctggcagtaggtctttcaggagcccctcaggtactctcacacggcagtatctgggaaacacagaagaataaatccattcaaaattgaagggccactggtggtcctttcctagactctaggcagacgtagaaaaggaatccttcgagtttacaatgggagccgcctgtctccctgcttcacctccctaagagcttgagcagaaagcagggctccagaggcgcacccctggcttgacgcccatgtgcctctggtctcagggactacaacagctgcaccgctgtgatatcatgatagtgggatcaagctccacgttttattttcttcaaggcattcgctattaaattaagctactgtgtttgtttgcttttttcccgggggcctccccaattagcacaaatacgccaagggaacagggtccctgcctttctcgtgtgttgctgcttcccagcagcatgtagttcagggcccggggcacgttaagtcctcggtacatatttccagttccggattccttggtgagcctggacaagcccctcccgctctctgcgcctcagtctcccaagcctgtcaccggaaacccctcccgcggtgccgcccctagcggggccgggtcggggcggccttacctgtagacgtcggccacgcggccgaggcatacggccagaggcttggcctcgctgcgacccttgaggcggtacacagcgcgcagagccgccgagcagctcgccgcgcaggccaggccgtacagcgtatcggtggggacggccaccacggcgccggcgcgcagctcggccacggcggcccgcagcgcctcggtccagccggcgcgctccgggctcgcggcctgcacggccccgctccccgggagccgcaacagccgggcgccgggggccgccggagcgggactcggcgggcggaagaggcgaccgctccgggagccagcaggcccctcgctcaaccccacgctggcagccaccgcggccctcatccccctgcaccgacgcgccggagacatccgcccaggcccgcttccgggaggaagtgacgctcccagccagcttccggtccaggagactcggccccgcctctgcgccgggcagcttaaagggaccacgacccccaggaggattgaaggagaccggtggggacggggcggggcgcagccttgcgaagccctaacgcagcgctggggaggggggcggccgaaaggggggcggtggtcgggccgcgcaagcggagatggaatggggcccgggctcagactggtcacgggggtgagagggggcccgtcggggcgggaggaaggggcttggccccgcgcaagcgccggccctgaccgtctgtctctcgctctctcccgggcagggaggctgccggcgtggaccgcgggaaggcggggctggggctcggcgggaggccacccccacagccgccccgggaggagcgcgcccagcagctgctggacgcggtggagcagcggcagcggcagctcctggacaccatcgcagcctgcgaggagatgttacggcagctgggccgccggcgcccggagccggctggtggcggggttagtgcccaccctgggctgggctggggtggggtggggtctgcccactggctaggctggccaagccctagcttaccctggaggggggaagtatgtctccgccgctttatccctaacctcctttgatctggtgagaggtttcgaaaaagttaatactatccaaatgccaaatggccacatccttgtggggcctaatccaaggccttgcctcccagcctcacttttttcctttctgttccaactagaacgtctcagccaaacctggagcgcccccccagccggctgtctccgccagaggcggctttccaaaggatgctggcgatggagctgcggagccctgaccatccccgagcagaataccctgacttctctccctccccagggccggtggctggactctgaacaactcccttcagtaaaggggccagtcttcactggcagtggctggtacttggctctcagcctggagtggcagctctgctagcagctgggttcactcccacttcatcctggctgaaagcagtgctgtgctttgaaatgcagccaatgaatacccagtctgattacccagatttgggcagaccagcagtgctcgccagagtggtctggcctgctatgggggatccaggtggtgttacatgtccatttcatgttttgggggcttttagccccacaaaacaccttcagtagagccttgattaaaaggaaacctgcagactctcctggtgaccgacgtttcctttctgtcccctctccaagactgatggctgggaaggggggagtggtggaaaaatgtcaactatgggcagggttggtaagaaatgccacagatactaccagatttaaataagcatttaattaggatttcattagtatttaatattgctttttcaattccaaaaagttaaattttcactttttagcagatattttaaagtacaatattaagtttatacaaaatgagcaattaagcaaacaccattatttcacattcttcaaaaatacaaattcatatttattcttttttgggtttggaggtttcttcctttggaagtactgaacctgtaacgttttcacatcgctcagtggaagtccgttgttcccatgtttcacacttacttttacataatccaaataaaactatttgggattttaaaagttgtcaccaagaccccggccaatgattagtgtatgtcaaaaaaaagggctcttgggggctcttgcctttcctggctagaagatctgagccagaaattcagcaaaaatctgtttccagccaccctccccaaatagggactagaaagagttcacaggaaaagggaacagacaccttgaactctgacccccacccccacattctccaaaacacaacgaaggatgtagactgttgagtcaaatagcccttgggaggcctgagaacacagcaggaaaagggcaagagaaagcctctgacttggcacac

SEQ ID NO: 2429 - DNA, 4001 bp, Homo sapiens
aaaaatagaaaaactagctgtgtgcggtggtgcacacgtgtaatcccacctactcgggaggctgagacaggagattcgcttgaacccgagaggcggaagttggagcgagccgaaattgcgccactacaccccagcctgggcgtcagagcgagactcagtctcaaaaaaacagaaaacagaaaaaagaaaaaaaaatgaatcctcagaaaatgggatttattggtagaaggcggagaaagaatataccacacccttcgattagatatgtaaatagttaactactcacgggccttgcctgtggactcaagtaaggttcaaaatcatcatcgtttaatccatccttttgatgtacagatccattttgtactaaagaaaaaaaaattcaattaggagtgtcccaatcctacaatcttcctttcaaattagttcatatatgctaaccagagaaaaaccttactagttaacaaagcacgtaagattgaacttcaaaagggtaagagatgacagtgaatgctgaagcgacagtcgccagtgaaaatgtccccctccacccagagcaagttgatctaaaaaggtcattttattggctcctctggatttccattccctcccgcttcccctcccccatcacatgagagtacttccagagagtgatccacgaggatgaaaaacaaaggccttctaagacctacaggaaactaaggacctggagcgtttcaaaacccaatccacccccacccttaatgaattactccttgttagcgaaaaagctgttcgccagctgcaagaacacaccgaaagggtcaaaatacttaagtgtgcggcacctgcgaactaagcggcttccgaaaggtcctccgcccggggcgcttcccggagaccccgcccccaccgccccgcgtccccctcccggctcagggccaccggcggagcgggacttacctttgtttccttgaccttttggtctctgcaggggaaggaaacgtcgccgagcagcaagttgtccaaaggagaaatggaaaaggaagaacaaattaaggcagggcccgaagggagaataaaggagcaggcccgaggggaggcgtcaggaatggtagtgaggaagaggctgaaaatgggaggcgggggaaagcgccaggcccgtggggcaggggagaaaacgcggcagacgcgccaccggcgacgcgaggaacccagggctttaaggaaggggaaggaaacaaggaaggaaaacgaggcccgccgagagaagggaacgcggcgcggcccggcccgtgggctccgaggcccgaggagaagcgggaagaacaggctgagggagaggcgccgggcgcggccggcctgagaggcccgaaacctggcccgcaagagacgacgcctcggctcggctcggcctgcccaggagcggcgggcccgggcctagtcgggctccttctcgcctcacacaatggccgaggcatgcgggccgggcctgtacctgctccaagaggctgctggccgacatggctctcagatcctcacgggcggcgacggcggcgaactctcctcagcgcggcggcggcggcagatgagccccgtctgcgggagcaggcggaggcttttgtccctgacactcgggggcctcggcggacgcagcggagacacagcgcgcggctcaggctccggctccgactcggcgacgctctagcccaagagctcaatgcccgtctctatgcttttacgcgcgcgcccgccccccaccgcctaaagcagagcgccgaacagcggaggcgggcggcgcgcgcggcgcgagcgctgactctcacattcactcacccacgcggaaggggcccggcgcgaagaaccccgggaagggagaggccggccgctgcgccctctggcggattggaggagcggaagccgtgctcacggcctccccgcccccaccgccccaggattaaggcctagggggtttgggacgaccagggtcgcaccacgaggtttcgactaacacctggaaagactagctctggcttcagaagaacgacaaaagccggtttctcagtgagggaggggcctccgaagcccgcgagaccttaaaatgaacctgccttccagctgcaagtgataccccacccccatctgggaggtaacccgacccctagggagtcacacagtccccagggaaacttcatgggggccctgtccgggagtgacccgcccccgcccccgcgaggggcttggtcatcctctgttagccgactacagaaagagtacccagagagcaaaacacacaccgaaagaatccagtctcccgcaaaagagattcaccccttagcattgcaggaaggagaatctacaatttattttcggggaaatcgctggccccaagataatctgttaaattgtggactttatttccaagaaaaatacacctcatgcatctacacaaaactttcaaggagtccggagaacctatgaatcttaaggacctcaagagggaagcaaggaaattaacattattgaaataccagctgtgggccaggctttgttgttaggtattttcaaacacattaaagtctttcgacaacttcaaaatcgctatcagtctttcggttttttacgactggaaaaacagaaagcttaagtaatgtgcccaagtttacaaaactattaaatagccaggtgtatctgacactaacataatggtatctctctacccctacgagactctgtattagggaaccagaatataggggagatgcaaaggatgggcaaaagtattttcaatcagaagcaaagccaactcatgcaggaatatttgatactaggaaagcccatctaatagcttttgttattgcaagtacgtcgtggtaaacaggtaactaatgcactaattgtcaacctcgtactatccacacgctggatataggaggcttgggtggactcggtaaaataaataacatggcatcttggatttaacatcataatttggtcaaagtgctcaaagcactttttttctctgcccataatcacatttatggtaggaatgagtaaggtcaggcaccaaaggtgaaggacttttaatggagacagtaaaatgtcaagtctgggagcatagattccatcaagggaatagaataaacctagtaatacttctttttaaagatactcggctacggcgggcgcggtggctcatgtttgtaatcccagcactttgggaggccaaggcgggccggatcatgaggtcagaagatcgagaccatcctggccaacatggtgaaatctcgactctactaaaaatacaaaaattagctgggcatggtgccatgcacctgtagtcccagctaatcggaggctgaggcaggagaatcgcttgaacccgggaggcagaggttgcagtgagccgagatcacgccattacactccagcctgggcaacagagcgagactcgtctcaaaataaataaataaataaataacaaataataataatcagccacttagctccatggcccagatttatgtataaactgtaagcggttgcctatacttacccttggaggcaacatggcattgtaaaaacagcattagacgagaagtcatatgctgggagacaaagggtctaaataatggtttccccacccagatgtgcaatactgggtaaacaactaaaacctttcttagattccctcatttgataaaggggatgatggataatgatacctacccaacaggtttgtcgtgaagataaactttaaaaaaaaaaaaaaaagccgggtgcggtggctcacgcctgtaatcccagtattttgggaggccgaggagggcagatcacccgaggtcaggaattcaagactagcctgcccaacacggtgaaaccacgtcggtactaaaaatacaaaaattagcttgagcgtggtggtgggcccctggaatcccagctactcgggaggctgaggcaggagaatcacttgaccacaggaggcggagcttgcagtgagccgagatcgcgcaattgta

SEQ ID NO: 2430 - DNA, 4001 bp, Homo sapiens
aatagaaaaactagctgtgtgcggtggtgcacacgtgtaatcccacctactcgggaggctgagacaggagattcgcttgaacccgagaggcggaagttggagcgagccgaaattgcgccactacaccccagcctgggcgtcagagcgagactcagtctcaaaaaaacagaaaacagaaaaaagaaaaaaaaatgaatcctcagaaaatgggatttattggtagaaggcggagaaagaatataccacacccttcgattagatatgtaaatagttaactactcacgggccttgcctgtggactcaagtaaggttcaaaatcatcatcgtttaatccatccttttgatgtacagatccattttgtactaaagaaaaaaaaattcaattaggagtgtcccaatcctacaatcttcctttcaaattagttcatatatgctaaccagagaaaaaccttactagttaacaaagcacgtaagattgaacttcaaaagggtaagagatgacagtgaatgctgaagcgacagtcgccagtgaaaatgtccccctccacccagagcaagttgatctaaaaaggtcattttattggctcctctggatttccattccctcccgcttcccctcccccatcacatgagagtacttccagagagtgatccacgaggatgaaaaacaaaggccttctaagacctacaggaaactaaggacctggagcgtttcaaaacccaatccacccccacccttaatgaattactccttgttagcgaaaaagctgttcgccagctgcaagaacacaccgaaagggtcaaaatacttaagtgtgcggcacctgcgaactaagcggcttccgaaaggtcctccgcccggggcgcttcccggagaccccgcccccaccgccccgcgtccccctcccggctcagggccaccggcggagcgggacttacctttgtttccttgaccttttggtctctgcaggggaaggaaacgtcgccgagcagcaagttgtccaaaggagaaatggaaaaggaagaacaaattaaggcagggcccgaagggagaataaaggagcaggcccgaggggaggcgtcaggaatggtagtgaggaagaggctgaaaatgggaggcgggggaaagcgccaggcccgtggggcaggggagaaaacgcggcagacgcgccaccggcgacgcgaggaacccagggctttaaggaaggggaaggaaacaaggaaggaaaacgaggcccgccgagagaagggaacgcggcgcggcccggcccgtgggctccgaggcccgaggagaagcgggaagaacaggctgagggagaggcgccgggcgcggccggcctgagaggcccgaaacctggcccgcaagagacgacgcctcggctcggctcggcctgcccaggagcggcgggcccgggcctagtcgggctccttctcgcctcacacaatggccgaggcatgcgggccgggcctgtacctgctccaagaggctgctggccgacatggctctcagatcctcacgggcggcgacggcggcgaactctcctcagcgcggcggcggcggcagatgagccccgtctgcgggagcaggcggaggcttttgtccctgacactcgggggcctcggcggacgcagcggagacacagcgcgcggctcaggctccggctccgactcggcgacgctctagcccaagagctcaatgcccgtctctatgcttttacgcgcgcgcccgccccccaccgcctaaagcagagcgccgaacagcggaggcgggcggcgcgcgcggcgcgagcgctgactctcacattcactcacccacgcggaaggggcccggcgcgaagaaccccgggaagggagaggccggccgctgcgccctctggcggattggaggagcggaagccgtgctcacggcctccccgcccccaccgccccaggattaaggcctagggggtttgggacgaccagggtcgcaccacgaggtttcgactaacacctggaaagactagctctggcttcagaagaacgacaaaagccggtttctcagtgagggaggggcctccgaagcccgcgagaccttaaaatgaacctgccttccagctgcaagtgataccccacccccatctgggaggtaacccgacccctagggagtcacacagtccccagggaaacttcatgggggccctgtccgggagtgacccgcccccgcccccgcgaggggcttggtcatcctctgttagccgactacagaaagagtacccagagagcaaaacacacaccgaaagaatccagtctcccgcaaaagagattcaccccttagcattgcaggaaggagaatctacaatttattttcggggaaatcgctggccccaagataatctgttaaattgtggactttatttccaagaaaaatacacctcatgcatctacacaaaactttcaaggagtccggagaacctatgaatcttaaggacctcaagagggaagcaaggaaattaacattattgaaataccagctgtgggccaggctttgttgttaggtattttcaaacacattaaagtctttcgacaacttcaaaatcgctatcagtctttcggttttttacgactggaaaaacagaaagcttaagtaatgtgcccaagtttacaaaactattaaatagccaggtgtatctgacactaacataatggtatctctctacccctacgagactctgtattagggaaccagaatataggggagatgcaaaggatgggcaaaagtattttcaatcagaagcaaagccaactcatgcaggaatatttgatactaggaaagcccatctaatagcttttgttattgcaagtacgtcgtggtaaacaggtaactaatgcactaattgtcaacctcgtactatccacacgctggatataggaggcttgggtggactcggtaaaataaataacatggcatcttggatttaacatcataatttggtcaaagtgctcaaagcactttttttctctgcccataatcacatttatggtaggaatgagtaaggtcaggcaccaaaggtgaaggacttttaatggagacagtaaaatgtcaagtctgggagcatagattccatcaagggaatagaataaacctagtaatacttctttttaaagatactcggctacggcgggcgcggtggctcatgtttgtaatcccagcactttgggaggccaaggcgggccggatcatgaggtcagaagatcgagaccatcctggccaacatggtgaaatctcgactctactaaaaatacaaaaattagctgggcatggtgccatgcacctgtagtcccagctaatcggaggctgaggcaggagaatcgcttgaacccgggaggcagaggttgcagtgagccgagatcacgccattacactccagcctgggcaacagagcgagactcgtctcaaaataaataaataaataaataacaaataataataatcagccacttagctccatggcccagatttatgtataaactgtaagcggttgcctatacttacccttggaggcaacatggcattgtaaaaacagcattagacgagaagtcatatgctgggagacaaagggtctaaataatggtttccccacccagatgtgcaatactgggtaaacaactaaaacctttcttagattccctcatttgataaaggggatgatggataatgatacctacccaacaggtttgtcgtgaagataaactttaaaaaaaaaaaaaaaagccgggtgcggtggctcacgcctgtaatcccagtattttgggaggccgaggagggcagatcacccgaggtcaggaattcaagactagcctgcccaacacggtgaaaccacgtcggtactaaaaatacaaaaattagcttgagcgtggtggtgggcccctggaatcccagctactcgggaggctgaggcaggagaatcacttgaccacaggaggcggagcttgcagtgagccgagatcgcgcaattgtactc

SEQ ID NO: 2431 - DNA, 4001 bp, Homo sapiens
gccagtagagtgttatcagtattacgttctcaatacagtatggttgctgatattacagagatgggaatctcaacggcctaggacatttgcagttaactgttttataatacattaataggtattaaggaggtgaaccctcagaacatgggatttcctgatagagggcagagaaaaaatacaggtattaagaaagtgaatcctcggctaggcgtggtggctcacgcctgtaatcccagcactttgggaggccaaggcgggtgaatcacctgaggagttcaagaccagcccggccaacatgaaaccccgtctctactaaaaaaatagaaaaactagctgtgtgcggtggtgcacacgtgtaatcccacctactcgggaggctgagacaggagattcgcttgaacccgagaggcggaagttggagcgagccgaaattgcgccactacaccccagcctgggcgtcagagcgagactcagtctcaaaaaaacagaaaacagaaaaaagaaaaaaaaatgaatcctcagaaaatgggatttattggtagaaggcggagaaagaatataccacacccttcgattagatatgtaaatagttaactactcacgggccttgcctgtggactcaagtaaggttcaaaatcatcatcgtttaatccatccttttgatgtacagatccattttgtactaaagaaaaaaaaattcaattaggagtgtcccaatcctacaatcttcctttcaaattagttcatatatgctaaccagagaaaaaccttactagttaacaaagcacgtaagattgaacttcaaaagggtaagagatgacagtgaatgctgaagcgacagtcgccagtgaaaatgtccccctccacccagagcaagttgatctaaaaaggtcattttattggctcctctggatttccattccctcccgcttcccctcccccatcacatgagagtacttccagagagtgatccacgaggatgaaaaacaaaggccttctaagacctacaggaaactaaggacctggagcgtttcaaaacccaatccacccccacccttaatgaattactccttgttagcgaaaaagctgttcgccagctgcaagaacacaccgaaagggtcaaaatacttaagtgtgcggcacctgcgaactaagcggcttccgaaaggtcctccgcccggggcgcttcccggagaccccgcccccaccgccccgcgtccccctcccggctcagggccaccggcggagcgggacttacctttgtttccttgaccttttggtctctgcaggggaaggaaacgtcgccgagcagcaagttgtccaaaggagaaatggaaaaggaagaacaaattaaggcagggcccgaagggagaataaaggagcaggcccgaggggaggcgtcaggaatggtagtgaggaagaggctgaaaatgggaggcgggggaaagcgccaggcccgtggggcaggggagaaaacgcggcagacgcgccaccggcgacgcgaggaacccagggctttaaggaaggggaaggaaacaaggaaggaaaacgaggcccgccgagagaagggaacgcggcgcggcccggcccgtgggctccgaggcccgaggagaagcgggaagaacaggctgagggagaggcgccgggcgcggccggcctgagaggcccgaaacctggcccgcaagagacgacgcctcggctcggctcggcctgcccaggagcggcgggcccgggcctagtcgggctccttctcgcctcacacaatggccgaggcatgcgggccgggcctgtacctgctccaagaggctgctggccgacatggctctcagatcctcacgggcggcgacggcggcgaactctcctcagcgcggcggcggcggcagatgagccccgtctgcgggagcaggcggaggcttttgtccctgacactcgggggcctcggcggacgcagcggagacacagcgcgcggctcaggctccggctccgactcggcgacgctctagcccaagagctcaatgcccgtctctatgcttttacgcgcgcgcccgccccccaccgcctaaagcagagcgccgaacagcggaggcgggcggcgcgcgcggcgcgagcgctgactctcacattcactcacccacgcggaaggggcccggcgcgaagaaccccgggaagggagaggccggccgctgcgccctctggcggattggaggagcggaagccgtgctcacggcctccccgcccccaccgccccaggattaaggcctagggggtttgggacgaccagggtcgcaccacgaggtttcgactaacacctggaaagactagctctggcttcagaagaacgacaaaagccggtttctcagtgagggaggggcctccgaagcccgcgagaccttaaaatgaacctgccttccagctgcaagtgataccccacccccatctgggaggtaacccgacccctagggagtcacacagtccccagggaaacttcatgggggccctgtccgggagtgacccgcccccgcccccgcgaggggcttggtcatcctctgttagccgactacagaaagagtacccagagagcaaaacacacaccgaaagaatccagtctcccgcaaaagagattcaccccttagcattgcaggaaggagaatctacaatttattttcggggaaatcgctggccccaagataatctgttaaattgtggactttatttccaagaaaaatacacctcatgcatctacacaaaactttcaaggagtccggagaacctatgaatcttaaggacctcaagagggaagcaaggaaattaacattattgaaataccagctgtgggccaggctttgttgttaggtattttcaaacacattaaagtctttcgacaacttcaaaatcgctatcagtctttcggttttttacgactggaaaaacagaaagcttaagtaatgtgcccaagtttacaaaactattaaatagccaggtgtatctgacactaacataatggtatctctctacccctacgagactctgtattagggaaccagaatataggggagatgcaaaggatgggcaaaagtattttcaatcagaagcaaagccaactcatgcaggaatatttgatactaggaaagcccatctaatagcttttgttattgcaagtacgtcgtggtaaacaggtaactaatgcactaattgtcaacctcgtactatccacacgctggatataggaggcttgggtggactcggtaaaataaataacatggcatcttggatttaacatcataatttggtcaaagtgctcaaagcactttttttctctgcccataatcacatttatggtaggaatgagtaaggtcaggcaccaaaggtgaaggacttttaatggagacagtaaaatgtcaagtctgggagcatagattccatcaagggaatagaataaacctagtaatacttctttttaaagatactcggctacggcgggcgcggtggctcatgtttgtaatcccagcactttgggaggccaaggcgggccggatcatgaggtcagaagatcgagaccatcctggccaacatggtgaaatctcgactctactaaaaatacaaaaattagctgggcatggtgccatgcacctgtagtcccagctaatcggaggctgaggcaggagaatcgcttgaacccgggaggcagaggttgcagtgagccgagatcacgccattacactccagcctgggcaacagagcgagactcgtctcaaaataaataaataaataaataacaaataataataatcagccacttagctccatggcccagatttatgtataaactgtaagcggttgcctatacttacccttggaggcaacatggcattgtaaaaacagcattagacgagaagtcatatgctgggagacaaagggtctaaataatggtttccccacccagatgtgcaatactgggtaaacaactaaaacctttcttagattccctcatttgataaagg

SEQ ID NO: 2432 - DNA, 4001 bp, Homo sapiens
agaaatgctctgcttcctccataaatccaaaataatatagccatggatatgcatttcatacaggtcagactcggcaaggacagctacgttccacatacatatctgacacaatcggtctcccccaaatacaagccaaccagtcttatgtgctcctatctttccagcatactcagatttgccgacaaagacttcctgaggcaccatggtatgctgaatatactgctgcagtagtagtgaaaatatgggagttacagttccaactttgtcaccaatttaacatgcggccttggagaagttctctccttatgcctaaatttcctattttgtaaaatggaagaaagcatcctaccattttcacagagattcagtatcacaaagaaactgaaagagctttcttattgtattgtaaactattactataaacccgcgacaacaaataaggccacccattctttacagctttgtagcaatgattctgttaaagatattttggcccttcacatttacacaactcactctaaccaaaggcacaaactattcttaagaccacaactggctatgccaagtttctcccctccctgacctcacagacacatgctgtacagaacactaccattgccgctctttcccaacaagtaactaggggctcccaatccctaaaatacacacacatatcaacctgcaaggaacctcccaacatttattcaagaaataagctaacttataaggggaactccattacacttacacaaataaaggcaaactcttacggaaacacttgccatcctcacatacacacaccaacacagccgctacacaccaacagaccatctgtctgctagaccaaaaacatctctttccatgtacaaactaaccagtgacatttattaaacgtacaacactgagatcatcctgtcgttcccacataccgttcaacgcggcagggacaccacagaccttgtcacacaggtaaaatcccctctcaagatcgtgtcctcgaccactcttatcccttaattaaacacacacaaactggactatgggggaggctccgatcatgcctacaaacacaaactaacctgtcaggggcacagccgactccgcctccactcgcttacttcccagccccctccgggagtctgcctgtcagggacaccccttcaccccgcctggagggacttcccggtaggctcaggatccccctccctgctctcccctcccccatcttcaccactgctctcccagaggtccaggtccgggagatgacagtggctcccagaaagcccaggattcaatcgctgagagagtgcttaggcccgaatgccggcccaaatcgttctactcaccgtgtcggaggccgagagcgatgagagtacagggaagtgaggaagagggggtggccgccaggctcctccgcttccctgggtccaccgcggatccctcccgcttgtcaggaggcggccagcgggtaagccgactggcggaaatgcgagagaggagaagggaaaggtggagggctaaaggggcaaactgagaggaggcggatcccgcaaccgacactgggatcgtttcccctcgcaaagcgaacccaaaatggcggcggcagcggcggcagcagagtggccgcggcagctcctccagagggagggagctaagggcgcctagcgacacccccaacctcccactcctccctcctcgcgttcttccccacggtcccccgcttcgcccgactccggccatgtagcgcgcacgtcagcccgcacgcgtacgagtgtctacgggctcgtcgctggctgctcccaccaaccaccaccttcggccgtcctgcgagccagccatcccgtacgcgctcacccacgggaacctcctcgcccagttctccactccccctcagaccctgtcaagccggctccagcgcaggccctcacgcgtaccttcagcggcgcgagcccaagccttctccacctcctcttctctcctccccctccctccccgcccgcacggccaccaaccgccgccaaagcagccgccgccagcacccccaccctacactcctcgcgcgtgcgcctcccacagtccccaccgcgggactgttccattcctggcggctgcaggggcaggagaggaagggaccggcaaagcgagtctggcttgccgtttgactggaattgccagggtggccggccgagtcccatgacaacctacctccctgggttcgtcgccgcggcgctgcggctcgcctcctcctccatgggaccgcggcgaggggatcgagggcggcctagcgcccctctgccggccggtggttggaggccgcggcggctgcgcgttgagtcgtttcctgccggatgacccgacccttttttgcagtctcaggacgggcgctttggagccggccccaggcagcgtgtgtcggtcgcctagtctggagaactagtcctcgactcacggtgagggaatggaccgacacgggtattgtaccgctgagggaaaggagcgggactccggacctccaggaggtagggagtgaggccggtagaccggcgcgcctccgggggggattcctcccgggcgttgagttgccaacctgggacccgaggaagttcggcgtggtggtgtgctttttgttgttgttaaccctcctcggatttctcgaatttcacaccactgtccatatgcgatgatgtttgtttgcccttgacgcacttactcatggatggtacttcagcctcgttagacagcctggtgatggaggatgaagaaaccatgtgcttctcattcagttctggactcagtttcccttgtcttcagcaagttatttttgttagttccttatcaaaaagtgtacataaaaattaggcaactccaaacatgcctccagggttggtgtgtgaaataataagatagggctgggcgcggtggctcacgcctgtaatcccagcactttgggaggccgaggcaggtggatgacaaggtgaagagatcgagacaatcctggccaacatggtgaaaccccgtctctactaaaaatacaaatattagccggccgtggtggcgggcgcctgtagccccagctactcgggaggctgaggcaggagaattgcttgaacccgggcggcggaagttgcagtgagccgagatcgcgccactgcactccagcctggcgacaaagcgagactccgtcacacacacacacacacacacgaaataataatatatgtaaagtggaattagctcctaggcatagggaaggtgcagagtattgccgtgttgtcatttacagttctgttgatgtcgataacgtttgtgggtgtaatgggtagtgttctgtccctccaagtcgttaataaaacaaagcaggccgggcgtcttgttaaatagttgtatcaatgacttgatttagattaatgaggatatatttttcaaatttatgccttttacaaaatttttaaagagtaggtaatgtcggtgatagatataaagaaaggaaaagatctccagatgtggaatcttctactggatcctgtaacagaaagaagacattaggctgggcgcagtggctcacacctgtaatctcagcactttgggaggcggaggagggcgcattgcttgagcctaggagttcgagaccagcttaggcaacacggtgaaaccccatctctacaaaaagacacaaaaattagacaggtgtggcacacgcttgtagtctgagctacttgggaggctgaagcaggaggattgaggaagaggttgcaaagttagccgagatcacgccatcacactgcagcctaggtgacagagcgagaccctgtctcaaaaaaagaaagaagacattagcagaaaagctgaggaaatgcaaataaagtctgcaatttttaaatagtattgtaccagctttaatttcttaattttgaaaattgtaccatggtcatatgtatgtaacattaaggaaactctaatgaaaattgtaagaaagcactttgtactacctttgcaactct

SEQ ID NO: 2433 - DNA, 4001 bp, Homo sapiens
catgcagctgctctggtacaagttaagctgtgaaagccttctccctcacgcatacaaccttaagtgtcagaaatgctctgcttcctccataaatccaaaataatatagccatggatatgcatttcatacaggtcagactcggcaaggacagctacgttccacatacatatctgacacaatcggtctcccccaaatacaagccaaccagtcttatgtgctcctatctttccagcatactcagatttgccgacaaagacttcctgaggcaccatggtatgctgaatatactgctgcagtagtagtgaaaatatgggagttacagttccaactttgtcaccaatttaacatgcggccttggagaagttctctccttatgcctaaatttcctattttgtaaaatggaagaaagcatcctaccattttcacagagattcagtatcacaaagaaactgaaagagctttcttattgtattgtaaactattactataaacccgcgacaacaaataaggccacccattctttacagctttgtagcaatgattctgttaaagatattttggcccttcacatttacacaactcactctaaccaaaggcacaaactattcttaagaccacaactggctatgccaagtttctcccctccctgacctcacagacacatgctgtacagaacactaccattgccgctctttcccaacaagtaactaggggctcccaatccctaaaatacacacacatatcaacctgcaaggaacctcccaacatttattcaagaaataagctaacttataaggggaactccattacacttacacaaataaaggcaaactcttacggaaacacttgccatcctcacatacacacaccaacacagccgctacacaccaacagaccatctgtctgctagaccaaaaacatctctttccatgtacaaactaaccagtgacatttattaaacgtacaacactgagatcatcctgtcgttcccacataccgttcaacgcggcagggacaccacagaccttgtcacacaggtaaaatcccctctcaagatcgtgtcctcgaccactcttatcccttaattaaacacacacaaactggactatgggggaggctccgatcatgcctacaaacacaaactaacctgtcaggggcacagccgactccgcctccactcgcttacttcccagccccctccgggagtctgcctgtcagggacaccccttcaccccgcctggagggacttcccggtaggctcaggatccccctccctgctctcccctcccccatcttcaccactgctctcccagaggtccaggtccgggagatgacagtggctcccagaaagcccaggattcaatcgctgagagagtgcttaggcccgaatgccggcccaaatcgttctactcaccgtgtcggaggccgagagcgatgagagtacagggaagtgaggaagagggggtggccgccaggctcctccgcttccctgggtccaccgcggatccctcccgcttgtcaggaggcggccagcgggtaagccgactggcggaaatgcgagagaggagaagggaaaggtggagggctaaaggggcaaactgagaggaggcggatcccgcaaccgacactgggatcgtttcccctcgcaaagcgaacccaaaatggcggcggcagcggcggcagcagagtggccgcggcagctcctccagagggagggagctaagggcgcctagcgacacccccaacctcccactcctccctcctcgcgttcttccccacggtcccccgcttcgcccgactccggccatgtagcgcgcacgtcagcccgcacgcgtacgagtgtctacgggctcgtcgctggctgctcccaccaaccaccaccttcggccgtcctgcgagccagccatcccgtacgcgctcacccacgggaacctcctcgcccagttctccactccccctcagaccctgtcaagccggctccagcgcaggccctcacgcgtaccttcagcggcgcgagcccaagccttctccacctcctcttctctcctccccctccctccccgcccgcacggccaccaaccgccgccaaagcagccgccgccagcacccccaccctacactcctcgcgcgtgcgcctcccacagtccccaccgcgggactgttccattcctggcggctgcaggggcaggagaggaagggaccggcaaagcgagtctggcttgccgtttgactggaattgccagggtggccggccgagtcccatgacaacctacctccctgggttcgtcgccgcggcgctgcggctcgcctcctcctccatgggaccgcggcgaggggatcgagggcggcctagcgcccctctgccggccggtggttggaggccgcggcggctgcgcgttgagtcgtttcctgccggatgacccgacccttttttgcagtctcaggacgggcgctttggagccggccccaggcagcgtgtgtcggtcgcctagtctggagaactagtcctcgactcacggtgagggaatggaccgacacgggtattgtaccgctgagggaaaggagcgggactccggacctccaggaggtagggagtgaggccggtagaccggcgcgcctccgggggggattcctcccgggcgttgagttgccaacctgggacccgaggaagttcggcgtggtggtgtgctttttgttgttgttaaccctcctcggatttctcgaatttcacaccactgtccatatgcgatgatgtttgtttgcccttgacgcacttactcatggatggtacttcagcctcgttagacagcctggtgatggaggatgaagaaaccatgtgcttctcattcagttctggactcagtttcccttgtcttcagcaagttatttttgttagttccttatcaaaaagtgtacataaaaattaggcaactccaaacatgcctccagggttggtgtgtgaaataataagatagggctgggcgcggtggctcacgcctgtaatcccagcactttgggaggccgaggcaggtggatgacaaggtgaagagatcgagacaatcctggccaacatggtgaaaccccgtctctactaaaaatacaaatattagccggccgtggtggcgggcgcctgtagccccagctactcgggaggctgaggcaggagaattgcttgaacccgggcggcggaagttgcagtgagccgagatcgcgccactgcactccagcctggcgacaaagcgagactccgtcacacacacacacacacacacgaaataataatatatgtaaagtggaattagctcctaggcatagggaaggtgcagagtattgccgtgttgtcatttacagttctgttgatgtcgataacgtttgtgggtgtaatgggtagtgttctgtccctccaagtcgttaataaaacaaagcaggccgggcgtcttgttaaatagttgtatcaatgacttgatttagattaatgaggatatatttttcaaatttatgccttttacaaaatttttaaagagtaggtaatgtcggtgatagatataaagaaaggaaaagatctccagatgtggaatcttctactggatcctgtaacagaaagaagacattaggctgggcgcagtggctcacacctgtaatctcagcactttgggaggcggaggagggcgcattgcttgagcctaggagttcgagaccagcttaggcaacacggtgaaaccccatctctacaaaaagacacaaaaattagacaggtgtggcacacgcttgtagtctgagctacttgggaggctgaagcaggaggattgaggaagaggttgcaaagttagccgagatcacgccatcacactgcagcctaggtgacagagcgagaccctgtctcaaaaaaagaaagaagacattagcagaaaagctgaggaaatgcaaataaagtctgcaatttttaaatagtattgtaccagctttaatttcttaattttgaaaattgtaccatggtcata

SEQ ID NO: 2434 - DNA, 4001 bp, Homo sapiens
cctaaatttcctattttgtaaaatggaagaaagcatcctaccattttcacagagattcagtatcacaaagaaactgaaagagctttcttattgtattgtaaactattactataaacccgcgacaacaaataaggccacccattctttacagctttgtagcaatgattctgttaaagatattttggcccttcacatttacacaactcactctaaccaaaggcacaaactattcttaagaccacaactggctatgccaagtttctcccctccctgacctcacagacacatgctgtacagaacactaccattgccgctctttcccaacaagtaactaggggctcccaatccctaaaatacacacacatatcaacctgcaaggaacctcccaacatttattcaagaaataagctaacttataaggggaactccattacacttacacaaataaaggcaaactcttacggaaacacttgccatcctcacatacacacaccaacacagccgctacacaccaacagaccatctgtctgctagaccaaaaacatctctttccatgtacaaactaaccagtgacatttattaaacgtacaacactgagatcatcctgtcgttcccacataccgttcaacgcggcagggacaccacagaccttgtcacacaggtaaaatcccctctcaagatcgtgtcctcgaccactcttatcccttaattaaacacacacaaactggactatgggggaggctccgatcatgcctacaaacacaaactaacctgtcaggggcacagccgactccgcctccactcgcttacttcccagccccctccgggagtctgcctgtcagggacaccccttcaccccgcctggagggacttcccggtaggctcaggatccccctccctgctctcccctcccccatcttcaccactgctctcccagaggtccaggtccgggagatgacagtggctcccagaaagcccaggattcaatcgctgagagagtgcttaggcccgaatgccggcccaaatcgttctactcaccgtgtcggaggccgagagcgatgagagtacagggaagtgaggaagagggggtggccgccaggctcctccgcttccctgggtccaccgcggatccctcccgcttgtcaggaggcggccagcgggtaagccgactggcggaaatgcgagagaggagaagggaaaggtggagggctaaaggggcaaactgagaggaggcggatcccgcaaccgacactgggatcgtttcccctcgcaaagcgaacccaaaatggcggcggcagcggcggcagcagagtggccgcggcagctcctccagagggagggagctaagggcgcctagcgacacccccaacctcccactcctccctcctcgcgttcttccccacggtcccccgcttcgcccgactccggccatgtagcgcgcacgtcagcccgcacgcgtacgagtgtctacgggctcgtcgctggctgctcccaccaaccaccaccttcggccgtcctgcgagccagccatcccgtacgcgctcacccacgggaacctcctcgcccagttctccactccccctcagaccctgtcaagccggctccagcgcaggccctcacgcgtaccttcagcggcgcgagcccaagccttctccacctcctcttctctcctccccctccctccccgcccgcacggccaccaaccgccgccaaagcagccgccgccagcacccccaccctacactcctcgcgcgtgcgcctcccacagtccccaccgcgggactgttccattcctggcggctgcaggggcaggagaggaagggaccggcaaagcgagtctggcttgccgtttgactggaattgccagggtggccggccgagtcccatgacaacctacctccctgggttcgtcgccgcggcgctgcggctcgcctcctcctccatgggaccgcggcgaggggatcgagggcggcctagcgcccctctgccggccggtggttggaggccgcggcggctgcgcgttgagtcgtttcctgccggatgacccgacccttttttgcagtctcaggacgggcgctttggagccggccccaggcagcgtgtgtcggtcgcctagtctggagaactagtcctcgactcacggtgagggaatggaccgacacgggtattgtaccgctgagggaaaggagcgggactccggacctccaggaggtagggagtgaggccggtagaccggcgcgcctccgggggggattcctcccgggcgttgagttgccaacctgggacccgaggaagttcggcgtggtggtgtgctttttgttgttgttaaccctcctcggatttctcgaatttcacaccactgtccatatgcgatgatgtttgtttgcccttgacgcacttactcatggatggtacttcagcctcgttagacagcctggtgatggaggatgaagaaaccatgtgcttctcattcagttctggactcagtttcccttgtcttcagcaagttatttttgttagttccttatcaaaaagtgtacataaaaattaggcaactccaaacatgcctccagggttggtgtgtgaaataataagatagggctgggcgcggtggctcacgcctgtaatcccagcactttgggaggccgaggcaggtggatgacaaggtgaagagatcgagacaatcctggccaacatggtgaaaccccgtctctactaaaaatacaaatattagccggccgtggtggcgggcgcctgtagccccagctactcgggaggctgaggcaggagaattgcttgaacccgggcggcggaagttgcagtgagccgagatcgcgccactgcactccagcctggcgacaaagcgagactccgtcacacacacacacacacacacgaaataataatatatgtaaagtggaattagctcctaggcatagggaaggtgcagagtattgccgtgttgtcatttacagttctgttgatgtcgataacgtttgtgggtgtaatgggtagtgttctgtccctccaagtcgttaataaaacaaagcaggccgggcgtcttgttaaatagttgtatcaatgacttgatttagattaatgaggatatatttttcaaatttatgccttttacaaaatttttaaagagtaggtaatgtcggtgatagatataaagaaaggaaaagatctccagatgtggaatcttctactggatcctgtaacagaaagaagacattaggctgggcgcagtggctcacacctgtaatctcagcactttgggaggcggaggagggcgcattgcttgagcctaggagttcgagaccagcttaggcaacacggtgaaaccccatctctacaaaaagacacaaaaattagacaggtgtggcacacgcttgtagtctgagctacttgggaggctgaagcaggaggattgaggaagaggttgcaaagttagccgagatcacgccatcacactgcagcctaggtgacagagcgagaccctgtctcaaaaaaagaaagaagacattagcagaaaagctgaggaaatgcaaataaagtctgcaatttttaaatagtattgtaccagctttaatttcttaattttgaaaattgtaccatggtcatatgtatgtaacattaaggaaactctaatgaaaattgtaagaaagcactttgtactacctttgcaactcttctgtaaatttacacttttttttgtttgtttgctttgagataggatctatgtcgccaaggctggaaggcagtagtgcagtcctggctcactgcaacctcaagctccttggctcaagggatcctcccacctcagccatctgagcaactaggactacaggcacatgccaccacatccagctaatttattttattttttttttgagacggagtctcgctctgtcacccaggctggagtgcagtggcgcgatctcggctcactgcaagctccgcctcccgggttcgcgccattctcctacctcagcctcctg

SEQ ID NO: 2435 - DNA, 4001 bp, Homo sapiens
cttagttttaacaaggattatttaggtaattgataagggaagccccagagtttttgttttgactgtctttttctcctctctcttccttattgtgttttaagatgtgcttactctctatggacttacagagggatttttatttagtcaaagattaaaacaaaaacaggtttgtatttgcaatcgaaagagaagcagaagctgcccaagtacagtcatgcgccacagaatgtttcagtcaataacgaaccacatagtcagaggtggctccataagattactgtaccttttctatgtttacatacatatgtacttaccattgtgttacaactgcctacagtattcagtacagtacagtaacacactgtacaggttttgtagcctgggagcaataggtatgcagtaggctaaaccatttaggtttatgtaagtacattctacgatgtttacacaatgatgaatcgtttaatgatagatttcacagagggtatgaccatgagatgatatatgactatattccattgaataccagaaggtaactggattctaacaggaattttaaattagttctatattttccaaattttaagaagttataaagagttgatcagcaaaaccaaaatatttattaatcagatcctattatacgttcccaggatgaatggttccattctgctataccagaattttgttctatgaactataaattaaaataatgggtcaaatactgacttagcaatcttgagatttttgatgtagttgtattgtgatatttgttgtaatggagaatgactagtagttctagtttttaagacattggttggcctatcttatcttttttcactaaattggaaaatccctaaaggtctagctttcagatggaacccaagctctctgcttagtagtgctgttaagttcaaacacaggactaattacagggactattctctttgctttgttccacttatggcacaaactgcatcctgacctctcgccatcgacctaatgattatatgctgctacaacagaataaagtgcagatgcaaatccaccacaaaatgaggaaaaaattaaagcctctactttctggatgctgtaacacaagtgccaactttaggcaaaaaggtcagcacgtatgtttcagactccttactgcaggtgcttcagggtttgctccactaatgcctaggtgactaacaaattttcagtcacatttagcagatattaatggcacataaaaagaacaaaagggacagactggatattacaatatagggtagtttgtgtggctggccacattgagtcctacatacctctccagcaccactcacccggagaagtggatatggatgccagctactgttttttctcccttcccaaacagatacagcttggcctacagctgcactgccccataacaaggagacttcacttgacacctaactcctgacaggactctgcatccttacatcagtaacagaagctggctggggatgaaaaattgttaactgcaacttctgaaaaccttttcagaaataaactcttcctctattccaaatctcaaggtcttcaactagcctaccgtagagcttgaggggtgttaaagttagcttgaggctcagccacacgctcctcctcttctgggccatcatcttccatgttggagaatcccatctcatcttggaactgtgggcaaaggaaagggagggttttcctggggaatgggcttttgaatgttgctccagtgttgggaaggaaaagtgaaaactataaacaatactttaataatgctggcacccagaaagagcctacatcagaacctttctcacttcaggactcctacaaacccacatatggaatgactattatgccaggaaagaagttgctcaaccagtcaacttgtatcagtaagcacagagctaggataactcaaaatgatcaatttcttaaacagaaatatctttttagacaaatttatggaaaaggtaattatttgtgtgcaaaatactttaaaactagttggcaatctttaaggacacaccaaatgacagtaggggaagccatcaaaagttttcaaggggcaagatgtgctggctcacacctgtaattccagcactttgggaggttgaggcaggaagattacttgagcctatgagttccagaacatggcaagaccctgtctctacaaaaaaataaaataattagccgggcctgtaggtgtgtgcctgtagtcccagctactcaggaggcttagatgagagaattgttttgagccctggaggtcgaggctgctgtgagctgagatttcaccactgtattctccagagcctgggtgacagagcaagactttgcctcaaaaaaaaaaaaaaaaagcttcaaggaaaattttagtaagaataacctacatgtggataatcaagagtctagcagttagcaaatttcttttgtcattatattctttcccaggtagactaaaaggagaattggttcagtccctcttctagaaggagcatcacagagatcaaaggacacattttgttggagaaccaacttacaatcccatgttctcacttgaggatcattactcacagtttcaaacagatcttccatcagctcatttgcttccttttctgcaaaaaagccaaacgttgttggtataaattagattcattttacaatatggaggaattccatgtagacaatgtatgatgttttcaacaaggcatctgacgaattcttcatatctatccttattcctgagacagggtctcactctgtcacccgggctggagggcagtggcttgatctcggctcactgcaatctctgcttcccaggctcaagcgatcctcccacttcagccctccaagtagctggggcaacaggagtgtgctgtcatgcccggctaattcttccatattttgtagagatgggttttccccatgttgcccaagctggtcttgaactcctgagctccagtgatccacccaccttggcttcccaaagtgctggggttacaggcatgagccaccacgcccagctatccttcattcatttattcaaaaacatttattgagtacttactatgtttcaatccctgttttagatgcttgggatatatgagagaatgagagagagagagagttctaatctcattgaacttaaattctaataggaagaagacaaggagaaaatgtgagctagatgatttttttttttttttgagacggagtttcgctcttgttgcccaggctggagtgcgatgacacgattttggctcactgcaacctccgcctcccaggttcaagctattctcctgcctcagcctcccaagtagctgggattacaggcatgcaccaccacgcccagctaattttgtgtttttagtagagatggggtttctccatattggtcaggctggtctcaaactcctgacctcaggtgatccgcccacctcagcctcccaaagtgctgggattacaggcatgagccaccatgaccagcccaatgattttataattagatggcctatccaaacccacacaatactgaatggaatcaagagacaagtctcccaacctgggcaaaatgtcaacatatctctaaaaaaaaatttatctgggcttggtcgcacatgcatatagtcccatatacttgagaggctgaggtgagagaatctctttgagtccaagaagcagaggctgtagtgagctgagaccgtcccactgcattccagcctgaacgacagagcaagacactgtctccaaaaaaaaaagagacagacagagacaagtttccaacagtgtttcataggactctatctttggacccgacctattcaaaaactccatcagtgaattagaagaccaagagaacatacttaacaaatctgtagatgatgtaaagctgtaaagctgaaagggactgccaatccaattgatggaaaattcagaatcatattttctcaaatcaactggatgtaacacgtaaggataaatttaaagtt

SEQ ID NO: 2436 - DNA, 4001 bp, Homo sapiens
gcatttcatacaggtcagactcggcaaggacagctacgttccacatacatatctgacacaatcggtctcccccaaatacaagccaaccagtcttatgtgctcctatctttccagcatactcagatttgccgacaaagacttcctgaggcaccatggtatgctgaatatactgctgcagtagtagtgaaaatatgggagttacagttccaactttgtcaccaatttaacatgcggccttggagaagttctctccttatgcctaaatttcctattttgtaaaatggaagaaagcatcctaccattttcacagagattcagtatcacaaagaaactgaaagagctttcttattgtattgtaaactattactataaacccgcgacaacaaataaggccacccattctttacagctttgtagcaatgattctgttaaagatattttggcccttcacatttacacaactcactctaaccaaaggcacaaactattcttaagaccacaactggctatgccaagtttctcccctccctgacctcacagacacatgctgtacagaacactaccattgccgctctttcccaacaagtaactaggggctcccaatccctaaaatacacacacatatcaacctgcaaggaacctcccaacatttattcaagaaataagctaacttataaggggaactccattacacttacacaaataaaggcaaactcttacggaaacacttgccatcctcacatacacacaccaacacagccgctacacaccaacagaccatctgtctgctagaccaaaaacatctctttccatgtacaaactaaccagtgacatttattaaacgtacaacactgagatcatcctgtcgttcccacataccgttcaacgcggcagggacaccacagaccttgtcacacaggtaaaatcccctctcaagatcgtgtcctcgaccactcttatcccttaattaaacacacacaaactggactatgggggaggctccgatcatgcctacaaacacaaactaacctgtcaggggcacagccgactccgcctccactcgcttacttcccagccccctccgggagtctgcctgtcagggacaccccttcaccccgcctggagggacttcccggtaggctcaggatccccctccctgctctcccctcccccatcttcaccactgctctcccagaggtccaggtccgggagatgacagtggctcccagaaagcccaggattcaatcgctgagagagtgcttaggcccgaatgccggcccaaatcgttctactcaccgtgtcggaggccgagagcgatgagagtacagggaagtgaggaagagggggtggccgccaggctcctccgcttccctgggtccaccgcggatccctcccgcttgtcaggaggcggccagcgggtaagccgactggcggaaatgcgagagaggagaagggaaaggtggagggctaaaggggcaaactgagaggaggcggatcccgcaaccgacactgggatcgtttcccctcgcaaagcgaacccaaaatggcggcggcagcggcggcagcagagtggccgcggcagctcctccagagggagggagctaagggcgcctagcgacacccccaacctcccactcctccctcctcgcgttcttccccacggtcccccgcttcgcccgactccggccatgtagcgcgcacgtcagcccgcacgcgtacgagtgtctacgggctcgtcgctggctgctcccaccaaccaccaccttcggccgtcctgcgagccagccatcccgtacgcgctcacccacgggaacctcctcgcccagttctccactccccctcagaccctgtcaagccggctccagcgcaggccctcacgcgtaccttcagcggcgcgagcccaagccttctccacctcctcttctctcctccccctccctccccgcccgcacggccaccaaccgccgccaaagcagccgccgccagcacccccaccctacactcctcgcgcgtgcgcctcccacagtccccaccgcgggactgttccattcctggcggctgcaggggcaggagaggaagggaccggcaaagcgagtctggcttgccgtttgactggaattgccagggtggccggccgagtcccatgacaacctacctccctgggttcgtcgccgcggcgctgcggctcgcctcctcctccatgggaccgcggcgaggggatcgagggcggcctagcgcccctctgccggccggtggttggaggccgcggcggctgcgcgttgagtcgtttcctgccggatgacccgacccttttttgcagtctcaggacgggcgctttggagccggccccaggcagcgtgtgtcggtcgcctagtctggagaactagtcctcgactcacggtgagggaatggaccgacacgggtattgtaccgctgagggaaaggagcgggactccggacctccaggaggtagggagtgaggccggtagaccggcgcgcctccgggggggattcctcccgggcgttgagttgccaacctgggacccgaggaagttcggcgtggtggtgtgctttttgttgttgttaaccctcctcggatttctcgaatttcacaccactgtccatatgcgatgatgtttgtttgcccttgacgcacttactcatggatggtacttcagcctcgttagacagcctggtgatggaggatgaagaaaccatgtgcttctcattcagttctggactcagtttcccttgtcttcagcaagttatttttgttagttccttatcaaaaagtgtacataaaaattaggcaactccaaacatgcctccagggttggtgtgtgaaataataagatagggctgggcgcggtggctcacgcctgtaatcccagcactttgggaggccgaggcaggtggatgacaaggtgaagagatcgagacaatcctggccaacatggtgaaaccccgtctctactaaaaatacaaatattagccggccgtggtggcgggcgcctgtagccccagctactcgggaggctgaggcaggagaattgcttgaacccgggcggcggaagttgcagtgagccgagatcgcgccactgcactccagcctggcgacaaagcgagactccgtcacacacacacacacacacacgaaataataatatatgtaaagtggaattagctcctaggcatagggaaggtgcagagtattgccgtgttgtcatttacagttctgttgatgtcgataacgtttgtgggtgtaatgggtagtgttctgtccctccaagtcgttaataaaacaaagcaggccgggcgtcttgttaaatagttgtatcaatgacttgatttagattaatgaggatatatttttcaaatttatgccttttacaaaatttttaaagagtaggtaatgtcggtgatagatataaagaaaggaaaagatctccagatgtggaatcttctactggatcctgtaacagaaagaagacattaggctgggcgcagtggctcacacctgtaatctcagcactttgggaggcggaggagggcgcattgcttgagcctaggagttcgagaccagcttaggcaacacggtgaaaccccatctctacaaaaagacacaaaaattagacaggtgtggcacacgcttgtagtctgagctacttgggaggctgaagcaggaggattgaggaagaggttgcaaagttagccgagatcacgccatcacactgcagcctaggtgacagagcgagaccctgtctcaaaaaaagaaagaagacattagcagaaaagctgaggaaatgcaaataaagtctgcaatttttaaatagtattgtaccagctttaatttcttaattttgaaaattgtaccatggtcatatgtatgtaacattaaggaaactctaatgaaaattgtaagaaagcactttgtactacctttgcaactcttctgtaaatttacacttttttttgtttgtttgctttgagataggatctat

SEQ ID NO: 2437 - DNA, 4001 bp, Homo sapiens
tacagttccaactttgtcaccaatttaacatgcggccttggagaagttctctccttatgcctaaatttcctattttgtaaaatggaagaaagcatcctaccattttcacagagattcagtatcacaaagaaactgaaagagctttcttattgtattgtaaactattactataaacccgcgacaacaaataaggccacccattctttacagctttgtagcaatgattctgttaaagatattttggcccttcacatttacacaactcactctaaccaaaggcacaaactattcttaagaccacaactggctatgccaagtttctcccctccctgacctcacagacacatgctgtacagaacactaccattgccgctctttcccaacaagtaactaggggctcccaatccctaaaatacacacacatatcaacctgcaaggaacctcccaacatttattcaagaaataagctaacttataaggggaactccattacacttacacaaataaaggcaaactcttacggaaacacttgccatcctcacatacacacaccaacacagccgctacacaccaacagaccatctgtctgctagaccaaaaacatctctttccatgtacaaactaaccagtgacatttattaaacgtacaacactgagatcatcctgtcgttcccacataccgttcaacgcggcagggacaccacagaccttgtcacacaggtaaaatcccctctcaagatcgtgtcctcgaccactcttatcccttaattaaacacacacaaactggactatgggggaggctccgatcatgcctacaaacacaaactaacctgtcaggggcacagccgactccgcctccactcgcttacttcccagccccctccgggagtctgcctgtcagggacaccccttcaccccgcctggagggacttcccggtaggctcaggatccccctccctgctctcccctcccccatcttcaccactgctctcccagaggtccaggtccgggagatgacagtggctcccagaaagcccaggattcaatcgctgagagagtgcttaggcccgaatgccggcccaaatcgttctactcaccgtgtcggaggccgagagcgatgagagtacagggaagtgaggaagagggggtggccgccaggctcctccgcttccctgggtccaccgcggatccctcccgcttgtcaggaggcggccagcgggtaagccgactggcggaaatgcgagagaggagaagggaaaggtggagggctaaaggggcaaactgagaggaggcggatcccgcaaccgacactgggatcgtttcccctcgcaaagcgaacccaaaatggcggcggcagcggcggcagcagagtggccgcggcagctcctccagagggagggagctaagggcgcctagcgacacccccaacctcccactcctccctcctcgcgttcttccccacggtcccccgcttcgcccgactccggccatgtagcgcgcacgtcagcccgcacgcgtacgagtgtctacgggctcgtcgctggctgctcccaccaaccaccaccttcggccgtcctgcgagccagccatcccgtacgcgctcacccacgggaacctcctcgcccagttctccactccccctcagaccctgtcaagccggctccagcgcaggccctcacgcgtaccttcagcggcgcgagcccaagccttctccacctcctcttctctcctccccctccctccccgcccgcacggccaccaaccgccgccaaagcagccgccgccagcacccccaccctacactcctcgcgcgtgcgcctcccacagtccccaccgcgggactgttccattcctggcggctgcaggggcaggagaggaagggaccggcaaagcgagtctggcttgccgtttgactggaattgccagggtggccggccgagtcccatgacaacctacctccctgggttcgtcgccgcggcgctgcggctcgcctcctcctccatgggaccgcggcgaggggatcgagggcggcctagcgcccctctgccggccggtggttggaggccgcggcggctgcgcgttgagtcgtttcctgccggatgacccgacccttttttgcagtctcaggacgggcgctttggagccggccccaggcagcgtgtgtcggtcgcctagtctggagaactagtcctcgactcacggtgagggaatggaccgacacgggtattgtaccgctgagggaaaggagcgggactccggacctccaggaggtagggagtgaggccggtagaccggcgcgcctccgggggggattcctcccgggcgttgagttgccaacctgggacccgaggaagttcggcgtggtggtgtgctttttgttgttgttaaccctcctcggatttctcgaatttcacaccactgtccatatgcgatgatgtttgtttgcccttgacgcacttactcatggatggtacttcagcctcgttagacagcctggtgatggaggatgaagaaaccatgtgcttctcattcagttctggactcagtttcccttgtcttcagcaagttatttttgttagttccttatcaaaaagtgtacataaaaattaggcaactccaaacatgcctccagggttggtgtgtgaaataataagatagggctgggcgcggtggctcacgcctgtaatcccagcactttgggaggccgaggcaggtggatgacaaggtgaagagatcgagacaatcctggccaacatggtgaaaccccgtctctactaaaaatacaaatattagccggccgtggtggcgggcgcctgtagccccagctactcgggaggctgaggcaggagaattgcttgaacccgggcggcggaagttgcagtgagccgagatcgcgccactgcactccagcctggcgacaaagcgagactccgtcacacacacacacacacacacgaaataataatatatgtaaagtggaattagctcctaggcatagggaaggtgcagagtattgccgtgttgtcatttacagttctgttgatgtcgataacgtttgtgggtgtaatgggtagtgttctgtccctccaagtcgttaataaaacaaagcaggccgggcgtcttgttaaatagttgtatcaatgacttgatttagattaatgaggatatatttttcaaatttatgccttttacaaaatttttaaagagtaggtaatgtcggtgatagatataaagaaaggaaaagatctccagatgtggaatcttctactggatcctgtaacagaaagaagacattaggctgggcgcagtggctcacacctgtaatctcagcactttgggaggcggaggagggcgcattgcttgagcctaggagttcgagaccagcttaggcaacacggtgaaaccccatctctacaaaaagacacaaaaattagacaggtgtggcacacgcttgtagtctgagctacttgggaggctgaagcaggaggattgaggaagaggttgcaaagttagccgagatcacgccatcacactgcagcctaggtgacagagcgagaccctgtctcaaaaaaagaaagaagacattagcagaaaagctgaggaaatgcaaataaagtctgcaatttttaaatagtattgtaccagctttaatttcttaattttgaaaattgtaccatggtcatatgtatgtaacattaaggaaactctaatgaaaattgtaagaaagcactttgtactacctttgcaactcttctgtaaatttacacttttttttgtttgtttgctttgagataggatctatgtcgccaaggctggaaggcagtagtgcagtcctggctcactgcaacctcaagctccttggctcaagggatcctcccacctcagccatctgagcaactaggactacaggcacatgccaccacatccagctaatttattttattttttttttgagacggagtctcgctctgtcacccaggctggagtgcagtggcgcgatc

SEQ ID NO: 2438 - DNA, 4001 bp, Homo sapiens
tatgcctaaatttcctattttgtaaaatggaagaaagcatcctaccattttcacagagattcagtatcacaaagaaactgaaagagctttcttattgtattgtaaactattactataaacccgcgacaacaaataaggccacccattctttacagctttgtagcaatgattctgttaaagatattttggcccttcacatttacacaactcactctaaccaaaggcacaaactattcttaagaccacaactggctatgccaagtttctcccctccctgacctcacagacacatgctgtacagaacactaccattgccgctctttcccaacaagtaactaggggctcccaatccctaaaatacacacacatatcaacctgcaaggaacctcccaacatttattcaagaaataagctaacttataaggggaactccattacacttacacaaataaaggcaaactcttacggaaacacttgccatcctcacatacacacaccaacacagccgctacacaccaacagaccatctgtctgctagaccaaaaacatctctttccatgtacaaactaaccagtgacatttattaaacgtacaacactgagatcatcctgtcgttcccacataccgttcaacgcggcagggacaccacagaccttgtcacacaggtaaaatcccctctcaagatcgtgtcctcgaccactcttatcccttaattaaacacacacaaactggactatgggggaggctccgatcatgcctacaaacacaaactaacctgtcaggggcacagccgactccgcctccactcgcttacttcccagccccctccgggagtctgcctgtcagggacaccccttcaccccgcctggagggacttcccggtaggctcaggatccccctccctgctctcccctcccccatcttcaccactgctctcccagaggtccaggtccgggagatgacagtggctcccagaaagcccaggattcaatcgctgagagagtgcttaggcccgaatgccggcccaaatcgttctactcaccgtgtcggaggccgagagcgatgagagtacagggaagtgaggaagagggggtggccgccaggctcctccgcttccctgggtccaccgcggatccctcccgcttgtcaggaggcggccagcgggtaagccgactggcggaaatgcgagagaggagaagggaaaggtggagggctaaaggggcaaactgagaggaggcggatcccgcaaccgacactgggatcgtttcccctcgcaaagcgaacccaaaatggcggcggcagcggcggcagcagagtggccgcggcagctcctccagagggagggagctaagggcgcctagcgacacccccaacctcccactcctccctcctcgcgttcttccccacggtcccccgcttcgcccgactccggccatgtagcgcgcacgtcagcccgcacgcgtacgagtgtctacgggctcgtcgctggctgctcccaccaaccaccaccttcggccgtcctgcgagccagccatcccgtacgcgctcacccacgggaacctcctcgcccagttctccactccccctcagaccctgtcaagccggctccagcgcaggccctcacgcgtaccttcagcggcgcgagcccaagccttctccacctcctcttctctcctccccctccctccccgcccgcacggccaccaaccgccgccaaagcagccgccgccagcacccccaccctacactcctcgcgcgtgcgcctcccacagtccccaccgcgggactgttccattcctggcggctgcaggggcaggagaggaagggaccggcaaagcgagtctggcttgccgtttgactggaattgccagggtggccggccgagtcccatgacaacctacctccctgggttcgtcgccgcggcgctgcggctcgcctcctcctccatgggaccgcggcgaggggatcgagggcggcctagcgcccctctgccggccggtggttggaggccgcggcggctgcgcgttgagtcgtttcctgccggatgacccgacccttttttgcagtctcaggacgggcgctttggagccggccccaggcagcgtgtgtcggtcgcctagtctggagaactagtcctcgactcacggtgagggaatggaccgacacgggtattgtaccgctgagggaaaggagcgggactccggacctccaggaggtagggagtgaggccggtagaccggcgcgcctccgggggggattcctcccgggcgttgagttgccaacctgggacccgaggaagttcggcgtggtggtgtgctttttgttgttgttaaccctcctcggatttctcgaatttcacaccactgtccatatgcgatgatgtttgtttgcccttgacgcacttactcatggatggtacttcagcctcgttagacagcctggtgatggaggatgaagaaaccatgtgcttctcattcagttctggactcagtttcccttgtcttcagcaagttatttttgttagttccttatcaaaaagtgtacataaaaattaggcaactccaaacatgcctccagggttggtgtgtgaaataataagatagggctgggcgcggtggctcacgcctgtaatcccagcactttgggaggccgaggcaggtggatgacaaggtgaagagatcgagacaatcctggccaacatggtgaaaccccgtctctactaaaaatacaaatattagccggccgtggtggcgggcgcctgtagccccagctactcgggaggctgaggcaggagaattgcttgaacccgggcggcggaagttgcagtgagccgagatcgcgccactgcactccagcctggcgacaaagcgagactccgtcacacacacacacacacacacgaaataataatatatgtaaagtggaattagctcctaggcatagggaaggtgcagagtattgccgtgttgtcatttacagttctgttgatgtcgataacgtttgtgggtgtaatgggtagtgttctgtccctccaagtcgttaataaaacaaagcaggccgggcgtcttgttaaatagttgtatcaatgacttgatttagattaatgaggatatatttttcaaatttatgccttttacaaaatttttaaagagtaggtaatgtcggtgatagatataaagaaaggaaaagatctccagatgtggaatcttctactggatcctgtaacagaaagaagacattaggctgggcgcagtggctcacacctgtaatctcagcactttgggaggcggaggagggcgcattgcttgagcctaggagttcgagaccagcttaggcaacacggtgaaaccccatctctacaaaaagacacaaaaattagacaggtgtggcacacgcttgtagtctgagctacttgggaggctgaagcaggaggattgaggaagaggttgcaaagttagccgagatcacgccatcacactgcagcctaggtgacagagcgagaccctgtctcaaaaaaagaaagaagacattagcagaaaagctgaggaaatgcaaataaagtctgcaatttttaaatagtattgtaccagctttaatttcttaattttgaaaattgtaccatggtcatatgtatgtaacattaaggaaactctaatgaaaattgtaagaaagcactttgtactacctttgcaactcttctgtaaatttacacttttttttgtttgtttgctttgagataggatctatgtcgccaaggctggaaggcagtagtgcagtcctggctcactgcaacctcaagctccttggctcaagggatcctcccacctcagccatctgagcaactaggactacaggcacatgccaccacatccagctaatttattttattttttttttgagacggagtctcgctctgtcacccaggctggagtgcagtggcgcgatctcggctcactgcaagctccgcctcccgggttcgcgccattctcctacctcagcct

SEQ ID NO: 2439 - DNA, 4001 bp, Homo sapiens
tttcatacaggtcagactcggcaaggacagctacgttccacatacatatctgacacaatcggtctcccccaaatacaagccaaccagtcttatgtgctcctatctttccagcatactcagatttgccgacaaagacttcctgaggcaccatggtatgctgaatatactgctgcagtagtagtgaaaatatgggagttacagttccaactttgtcaccaatttaacatgcggccttggagaagttctctccttatgcctaaatttcctattttgtaaaatggaagaaagcatcctaccattttcacagagattcagtatcacaaagaaactgaaagagctttcttattgtattgtaaactattactataaacccgcgacaacaaataaggccacccattctttacagctttgtagcaatgattctgttaaagatattttggcccttcacatttacacaactcactctaaccaaaggcacaaactattcttaagaccacaactggctatgccaagtttctcccctccctgacctcacagacacatgctgtacagaacactaccattgccgctctttcccaacaagtaactaggggctcccaatccctaaaatacacacacatatcaacctgcaaggaacctcccaacatttattcaagaaataagctaacttataaggggaactccattacacttacacaaataaaggcaaactcttacggaaacacttgccatcctcacatacacacaccaacacagccgctacacaccaacagaccatctgtctgctagaccaaaaacatctctttccatgtacaaactaaccagtgacatttattaaacgtacaacactgagatcatcctgtcgttcccacataccgttcaacgcggcagggacaccacagaccttgtcacacaggtaaaatcccctctcaagatcgtgtcctcgaccactcttatcccttaattaaacacacacaaactggactatgggggaggctccgatcatgcctacaaacacaaactaacctgtcaggggcacagccgactccgcctccactcgcttacttcccagccccctccgggagtctgcctgtcagggacaccccttcaccccgcctggagggacttcccggtaggctcaggatccccctccctgctctcccctcccccatcttcaccactgctctcccagaggtccaggtccgggagatgacagtggctcccagaaagcccaggattcaatcgctgagagagtgcttaggcccgaatgccggcccaaatcgttctactcaccgtgtcggaggccgagagcgatgagagtacagggaagtgaggaagagggggtggccgccaggctcctccgcttccctgggtccaccgcggatccctcccgcttgtcaggaggcggccagcgggtaagccgactggcggaaatgcgagagaggagaagggaaaggtggagggctaaaggggcaaactgagaggaggcggatcccgcaaccgacactgggatcgtttcccctcgcaaagcgaacccaaaatggcggcggcagcggcggcagcagagtggccgcggcagctcctccagagggagggagctaagggcgcctagcgacacccccaacctcccactcctccctcctcgcgttcttccccacggtcccccgcttcgcccgactccggccatgtagcgcgcacgtcagcccgcacgcgtacgagtgtctacgggctcgtcgctggctgctcccaccaaccaccaccttcggccgtcctgcgagccagccatcccgtacgcgctcacccacgggaacctcctcgcccagttctccactccccctcagaccctgtcaagccggctccagcgcaggccctcacgcgtaccttcagcggcgcgagcccaagccttctccacctcctcttctctcctccccctccctccccgcccgcacggccaccaaccgccgccaaagcagccgccgccagcacccccaccctacactcctcgcgcgtgcgcctcccacagtccccaccgcgggactgttccattcctggcggctgcaggggcaggagaggaagggaccggcaaagcgagtctggcttgccgtttgactggaattgccagggtggccggccgagtcccatgacaacctacctccctgggttcgtcgccgcggcgctgcggctcgcctcctcctccatgggaccgcggcgaggggatcgagggcggcctagcgcccctctgccggccggtggttggaggccgcggcggctgcgcgttgagtcgtttcctgccggatgacccgacccttttttgcagtctcaggacgggcgctttggagccggccccaggcagcgtgtgtcggtcgcctagtctggagaactagtcctcgactcacggtgagggaatggaccgacacgggtattgtaccgctgagggaaaggagcgggactccggacctccaggaggtagggagtgaggccggtagaccggcgcgcctccgggggggattcctcccgggcgttgagttgccaacctgggacccgaggaagttcggcgtggtggtgtgctttttgttgttgttaaccctcctcggatttctcgaatttcacaccactgtccatatgcgatgatgtttgtttgcccttgacgcacttactcatggatggtacttcagcctcgttagacagcctggtgatggaggatgaagaaaccatgtgcttctcattcagttctggactcagtttcccttgtcttcagcaagttatttttgttagttccttatcaaaaagtgtacataaaaattaggcaactccaaacatgcctccagggttggtgtgtgaaataataagatagggctgggcgcggtggctcacgcctgtaatcccagcactttgggaggccgaggcaggtggatgacaaggtgaagagatcgagacaatcctggccaacatggtgaaaccccgtctctactaaaaatacaaatattagccggccgtggtggcgggcgcctgtagccccagctactcgggaggctgaggcaggagaattgcttgaacccgggcggcggaagttgcagtgagccgagatcgcgccactgcactccagcctggcgacaaagcgagactccgtcacacacacacacacacacacgaaataataatatatgtaaagtggaattagctcctaggcatagggaaggtgcagagtattgccgtgttgtcatttacagttctgttgatgtcgataacgtttgtgggtgtaatgggtagtgttctgtccctccaagtcgttaataaaacaaagcaggccgggcgtcttgttaaatagttgtatcaatgacttgatttagattaatgaggatatatttttcaaatttatgccttttacaaaatttttaaagagtaggtaatgtcggtgatagatataaagaaaggaaaagatctccagatgtggaatcttctactggatcctgtaacagaaagaagacattaggctgggcgcagtggctcacacctgtaatctcagcactttgggaggcggaggagggcgcattgcttgagcctaggagttcgagaccagcttaggcaacacggtgaaaccccatctctacaaaaagacacaaaaattagacaggtgtggcacacgcttgtagtctgagctacttgggaggctgaagcaggaggattgaggaagaggttgcaaagttagccgagatcacgccatcacactgcagcctaggtgacagagcgagaccctgtctcaaaaaaagaaagaagacattagcagaaaagctgaggaaatgcaaataaagtctgcaatttttaaatagtattgtaccagctttaatttcttaattttgaaaattgtaccatggtcatatgtatgtaacattaaggaaactctaatgaaaattgtaagaaagcactttgtactacctttgcaactcttctgtaaatttacacttttttttgtttgtttgctttgagataggatctatgtc

SEQ ID NO: 2440 - DNA, 4001 bp, Homo sapiens
atggtgaactgagtagcaatgctccaagagccattttaacatataaaaagtagaaatccaatggccagtttcgtcctgcttcaaattcttccatggaagttggtgatcattttggaactcttgcagtatctgacgggccttgaccgaatgactaaaatgatgacaagttttcctggcagccactaacatattctcaatgcttttgtgctcgcagaaaaagtcctgaatgaccatatttaaacaatgcaggaagcatggcacatgggtaaaaccaccatctttgattgcatgtaccacattagaggaattgtcagaaacaatgaagctagggataaggaaatttggagaaagccacagaccaatctggtcatttaattcttgtaaaatattggttatcaaacagtctttagccaaacctgtaacacaaagcactgcccactttctaaaatcggggatcctgccattattgagaaaagacgcagtttccaaagaaacccagtgtacagtcacaataaaatagtcagtggatgggtcatgggtccatatgtcaacagtcaggtgtatcttttggctttgaacattctctaaagttaagaaaattttttctctgacacaatcatataactgaggtacagccttagtgaaaaagtaagtctctgatggcaacctataatcaggggccacaatctgcatgaacctctgaaaggctggggttgagaaatagttgtaaggatgcatatcctccacaatcatttggataattgcctgacttatgtgacttgagactggatttccacaacatgttgtttctctctcctgcgcacgcatcagagtgccttgctctgcaacgggaataggactttcagatctgttttcaacctctaacataggttcatctgaatcagagtcactaaggtcctcagctgttaaatcttggctgcctgtagacttttctccatgcaaggtatcactcaagagatcacttctctcagtctcagcttcatctaatccatttgcaacagcaccactgtctttgttggcaacagcccaatggataggatgtgtggcttgcaggtgtcgttgaagtgttgaagtccctaagtgggaccctggcctaccccggctcacacttcttttacatatattacacacagctcttgagatgtgctgaggatcagtgtaaaaaaaattccaaacggcagatgtcttggctctagttccaggaattaaagcatgcttgacaatgttacttttgatgagaaatctccctctttctgcccttagggcatcagatgctgatttatcatgcttcttgcccattctattatcatctaatggatcagtaggaatatattcaaagcttccattgcttccagaagagggagataaagacacatccaaggtaaagtcctcctctccactagcaactccaaacttgttggccctggtccaatgaggtgaatgccttgcttgcagatgtcgttgaagagtagatgtaccaagatggctacctggtttacccctgctgacgcttttctcacagaggttacaaatggcccgccaggtgtactgggggtcaacatgaaagaagtgccacacaatggaggtcttggctctagtactaggtagatagatctgtttttctatattgctctcaaaaagactttcttcatcctgctcagggtcattggaagctaacaaagcaggggcatctgcaacaggcctcccagatcccaaatccttactaaactttttggcaagaatcaatttttttcgacgccttttccccttaattcgcaaacccttctttcttttctttttagcaggctgttttgcctctttattcactccttctgctaccatcttttcctctaccacatcttcttcatctgtattagaattaataggaacacatcccagaatcccagaatcactaaaagtgttgcatcttctgccaggagagagtgaagaaactggtacacttagagtacatacactcattctctttatgtctccacaattcgtaccagaatctgttagtgggtttattactcaagcagaaatacagctgttcctctctacttgcattaccttttctccagtttctatggggaatcaaattcccactggaccaataacttccaagccaggttatttttggaggaaaactgacagcaatggagaacattcccgaactctttcttagagggctttaaggtcccttccaattttctaagttctgaattcaaatagtccagtgtcctcatgttacagaagtaagaactgagtccccctttcccagagtcacagagttggttagtagcagctagaagccaggtcttccaaatcccagatccatgttcttcctgcttcatcaagaactatatctacttgaaatgccttcaccttgtaaaatacatatttttatgatgcctcatgatagcgacatcaatttcccttaattctgaaattaactattttcaggaaatctcatttaaacaaaaacatagtgcatcattcaacattcatcatttaggactgtgatttgccaatacaacccaaaaagtcaattctggaaagccaacacagactccgcatactggtcacagcaaatgctagttgagccctttcagttctaactaaaagtaatacaaccttttaaaatgtgagtggctggaaaaaaatgctttgagaaaaaaattttaaaacaaggttaaatgctgcattttcaaagtactgtttgtattaagagttaattcaagtttagttttcagatatttttagacttgagaagcttttacagcctgtaagtaactcacaagttgtacgctatagagatagcaaaaagtgaaatatgaactttaaaccacttccatttttcgattgatccctccccttcccccaatacctacatacatttaccctaaaaagcatcgctatctctagttccacagcctctttctcaaggtccagaaccaaggcctggaagatgtcaacaatataggccttccccataggaatccgcaccgattatgggagtttaggggtgttcttcattacggtttcaccagtcctacaaggagaacggaagtgtccctgttgctcttgactccgacgctgagggccaggggtgggagtgtaatgagagtggggaatgggtgtaggataccggaataaggtcggtggctttctgtatgtggagtttgagacaagctccaaagtaccgggaccctggagaggaatgagagtaggtaaattcagcgcccggcactcagtctgattgatttaggcagtgagggtccgctcaactagagaaactgttgccccgaagaaagcaatctagtgtcagttctctcttcgggattcgggggaacagtcggttttcggggctgctccgggctcctcgagattagcgaacaccggatgtgggggaggggaggaaggttggctgggaaaggagcaggcgccgtgggggtggggtgaacggggtgggggtggggaggatgggaaaagtgagcgggagcctggggctcccagccagccccggcgagggccgcgaccgggaggtgggggggaggggtcgttacggcgaagctgaaggatccgctctgacttcccgggataggccgcgacccaggggcgaggggaggccgctgccactcccctcgccctctcccccacctccccggccccaagccacccgggaatcaaaaaaacgggtctagttaccagagaacagaaactttaccgaaccgatgacactatccccgactcccgcttgctgccacgtctttcttcttgcttggccgctgccgtccgtcgtcctcccagcagcagcagcactagcagaaaaccaagactgccagcgtcaaagatggcgcctggctacaggctccgctctaaggcccggccggtaaaagtgccagcacgacgcagggcgcgaggattctggaagatgtagttcctctatgaggcgatgcctaagatggctgctccgggtc

SEQ ID NO: 2441 - DNA, 4001 bp, Homo sapiens
aactatgattatgctgccactgcactccagcctgggtgacagagcaagacgtagtctcaaaaaaaaaaaacaaaaacaaaaacaaaaaaaacctgattcttttatttcaggctggaaataaaagaatcctcccacctcagccttccaagaagctgggaccaccagaggtgtactccaccatgcccggctattttttttttcctttttttttttttttcttttaataaagatggggtcttgccatgttgcccaggcttgtctcaaactcctgggctcaaatgatcatcccacgttggcctcccaaagtgctagaattacagagtaagccaccgcacctggccacagatctgattcttaaatggcttcccattaacctaaagtttaaagtccttaactaggtttacaacgtcccctaagaccagaccacagcttgctgctgctttttttttttttcttttttgagacggaatctcgctctgtcgcccaggctggagtgcagtggcgccgtttcggctcactgcaacctccgcctcctgcgttcgagcgattctcatacctcagcctcctgagcagctgggactacaggcgcgcgcaagcacgaccggctaatttttgtatttttagtagagacgggggtttcaccatattggccaggctggtctcgaactcctgacctcaagtgatctgcccgcctgggcctcccaaagtgctgagattacaagcgtgagacaacgagcccggcccagtctgcttctttatttagcctgatctctctctcctctctctacgaagatgagttttctcacaaactacacccttaactgggaatacccgttttcctgcctcactccgctgagcttcccttagatcttagctttctgggggacagaagcctcccgggattccccctaggctgagtgatgtgtctctactccgtgcttcagaggaaggagggctttctgccctcgcagcagtatcagaattgctgatttacctgtatgtctcccacatgggtctctgagctctgggtgacaatggtgatacaattaataacagcaacaaacacacagcatttactttgtacccataagtgttctaggagcctcatttcccctttattacaatcttaggaggctgattttattatcatctctgcttaaaggatgaataaacccaggcagagagaaaaagccaaaagtgcctaaggtcacagcagggaatggggattcaaaccccgctgctgggctccacggttcacactcctaactccaggatcgaggatcctggaggatcgagtccgcccgcatcactcgctctagcttcaccatctatcaggtgctgaaccaccgtccgcagtacgaatgaatgaatgaaatgcttttatacagggacagcgtcggcctcctctgtcagctcctcctaggcccgggcagccccgctccctcccgccccggccggccgacaggagctgccccggcactgcgctccctcgcggccgcagaacgcccaccctcgacagcgcgcggggtcaaggggcggtgacagccgtgcggcgggggcggagatgctaccagctggggtgtcatccagcccgggaggtgacacgcgccccctcgcccgggcggtcgcctggccgcccactccccgccagcacgcccggcgacgccccccgccccgccaccccacaatctcccgcccagcggtgtcccctcagccccggttggcgtcccattccacttccctcccctcccccacacaaccgtcaccggcgtcccaccgcgccccatcctccgccgcctccgccccggctcccgggacttccccggccccgggcgattgttgacactcacctgccatgtcccggaccccaccgcagagggaggtgcatcacggccgcgagaaggccggggacggcactccagagcagacaaagggcgccgccatgttagagtcgggcggaaccgacctcgcaggcttcccggctgcaacttccggcgcatgcgcagcgtcctcgctaggagagcgcccatagacagacgcatgcgcctagctatccaaaagttccaccttacagtacttcggcgctcagagttgtcctcattgtacccctgccttggtttctcttccaaatataacagtaacatcatgtgttcagctcttactgtgtgccaggcactgtgttaagcgctttacatgcattatctctttaaatcctcacaccaattataagatagtattattctcctaattttaaaaaagggaaaacagactcaaaaagtgtaaatcaatgtccatggtcacatatcttgtaagtggtggaccggagatatgaatctacttgtggcttcaaagctgcagatcccagttgtgtttttctaccttctaaaccgaacattatccccttccctgattgtcttggacgtgaataaaggtgtctgaaaacaaaagtgtctgcagacttgcatggcccctccgtggcccctcttctacctttttggtagctctaggccactgacttctccactttctcacagtctgagggctttctcctttgtttacttctaggcctgcatattttccataatctataattttaacaacactcttgccactactgtaagctcttttgcccccttgcctttttgtcacatggatttggtaagaataccaacgctgtgtgaatccaaatgcaccttttctctttgttagctcccaaacagccaagcacagctgaagaaagtatgcagtggggagactgttccctagagattcatgtccactagccttcagtgggatgcaacatatgccaatctggcaactcactcctgtcttcacaatggctagagaaacaaaaaagcccagcagttgacttcaccccttcttgtctttaggttttttttttttttttggagacagagtctcactctgtcttccaggctggagtgcagtggcgctgtctcggttcactgcaagctccgcctcccgggttcacgccattctcctgtctcagcctccagagtagctgggactacaggcgcccgccacaacacctggctaattttttgtatttttagtagagacggggtttcaccatgttagccaggatggtctcgatcttctgacctcgtgatccacctgcctcagcctcccaaagtgctgggattacaggcgtgagccgccgtgcccggccgtctttcttttctttcttttttttttttttagatggggtctcgctatgttgcccggctggactgaaacccctaggcttaagcatcccatttcaacctccccagtagctgagactacaggcatgtgcacccacaactggctaacttcacccgttctttttaactatatttttaatttttatttcagtagtttttggggaacacatggtgtttggttacatggataagttctttagtgatgatttctgtgattttgggggacccatgacctgaacagtgtacattctacccaaggtgtagtctttttttttttttttttttttttttgagatggagtcttgctctgttgcccaggctggagtgcagtggcgccatctgggctcactgcaagttccgcctcccaggttcacgccattctcctgactcagcctcccgagtagctgggactacaggcgcccgccaccatgcccggctaattttttgtatttttagtagagacggggtttcaccgtgttagccaggatggtctggatgtcctgacctcgtgatccgcccgcctcggcctcccaaagtgctgggattgcaggcgtgagccactgcgcccagccaacccaaagtgtagtcttttatccctcacccctcccacctttccccctgagttcccaaagtccattgtgtcattcttatgcctttgcgtcctcatagcttagctcccacctaaaagtgagagcatatgatatttggttttccattcctgagttacttcatttagaataatggtctctagctccatccatgttgctgcaaatgcca

SEQ ID NO: 2442 - DNA, 4001 bp, Homo sapiens
caggaaatccagattcacttttattcaactccaacgtttagtttctaaagcagtttagggatatttttaaaccaacccatttgacatctccagtcccatttcaacattattaccgcacttttttatttttttctgctgagataatggtatacatgtctcaaatgttggcagacttgttcagaactattacttcagactggttcaccttattatttcactcttatgtaattacttatctacaactaccttctcagaaaaatttcttacactgccacagtcaatgcaaatttcaattctcggtaccaacaagctgaaactgcactttctgaaatcctggaaagtacttcagttcaacgagaccaattaataaactgatacaacctgctccagtcacttaaaatgaatgctgcacctgcatatctgatctttctgctcagaaaaagcagaaccttgccttccccttgatctgtgtcccttaacaatcttttttttctttgggggggggtcactctaatgtttatgatcacaagaaaatctttgtgtggggggaagccaggtctagtaagtttgagaacttttcagccagtttgtgggtcttttctaatagctgatgaaactgtaacgcgacccgggctgggctgaccggtaccgggcagggtgctgcgacatctctgaatgtcaaatacatctcctcagactcttgggagggcgaggggtagaaaaggaactggggcctgaggcgccagcgtcccagccctggtgataaccacttcgttcccattagaaagccgtggcggagagttaaagagtaacaaaacccgacgactccgtcctgtccttctcgctttcccaaagtcacaaacctaactttctccaacttcgcggtgagtgacataattatgaacacttagtccaggagacatcctcgggagatcaatttcttcccagccacaccacctattctccacaaatgccctcgacccattccaatatatcagacattaatcaccccatttacccagtggggtggggggtgagtgacagtttaatgagtcccgggcaccgcaatgggccagcaactcccactccacaaatcaaccccttcacgtctcgctaccgcggatccatagaggttttgtgaggttggggttttgtttttcagagaggtgggggcgggggtgccgagtggggaagcaatgcaaatctttacgtagttcgccgtgcataaaacacacggggaaagaggaaggttaaaaccacagggaaggaggtggagggcgcagagccggtgcagcaggaaaacaccttaaacaacagaggagaaaacagacccgggtcacggcaacaacaaaagaaaagtcgtaagaagcagccagcgggaggagagtggttgctaccgcttccccgatgccgcgacgcgcgagcccccggggcctccgggcaactgcaccagcccgggagggccccctcccccgccggccccctcccccgggcgccactgcagctgcaccggtccccggagccgcggccgtcccgggcgccactgcagctgcggctgctcccaagccccctcccccagcccgccgccctccgcacccgagaggcgccaccgcagctgcaccggccgggagcccgccccgcgccgcagctgcaccggcccgcgggggcgcggcgcggagccgggaacccgcaccccgcccgaccccgcagctgcagcggccccgtccccgcgcccgggcctcccgcagctgcgccgccccccgccgccccaacagctccaaccacacaaactaactccactcgcgggggcgcccccgacccggcccgccctccgcccgcgccgcccagccggccggggccgcacagctggcgccccccgcccgccggggtgccggggcgcggagggggcgccaggtcaggggccaggggccggcgccgggactcacacggagcggccctaagtcaccgcgtccccgccgccgccgcgtcctccgcctcctcctcctcctcctcccggccgccgccgccgccgccggacttggtgggcttcctccggctcttgcccccctccctcccggcccccccaccccccaatcccggctccgtcgcccgctcccccccgcccctccctcccgcccacccccgctggcagccggaggagcgcggcggagcgaagagggccccactctcaacggctccccatggcagcagcccagcggcggccgcagcctgccagacacagcgagggagcgagcgagggagcgagcgcggagccgccgggccgggtgggggggcgggggcggggggggggcgggcgcgggggagggggaggggagggggcgggaggacgcaccacgcacgcacgcggcggcgccggccagatgttccccccaccctcagtccgcccctctccttcccctgcctccctccctccgggcgttgggcttctgcgattgaccgaaagcggctggaccggcgctccccgcccgcccccagccctcagactcctccaatgggaaggcggctcttcgggaaggcggagggggtggtgggcagtcgtcggactgacaagggggcccagccaatgggggtggcgagccgtagctgccctcccgcgcgttccaatcgcaggcagcaactgttggggtgggcggggctcgggcgggcggggatccggagcgaagcggcgcggggcggagtcctcgggcgcagcggcggtggcagcagcggcgcccctctgggtgacttggccgtgagaaagtgaaaggagcccgcaggcggcggcgacagctgcgctgggaggggcttgtttccaggctcagaggccccgcgcactctgcgggtgcggagcgagcttttcggtgtgcactgtgacaaccacaaacacacttttgaacgtagtggggcttggctgctgcgagttacgcaggtatcctggagaggcagggcacccggggacacggatgactcgaggccgacttcgggtggctctctctgctccttcctgtgggggtgaagacgcccgggtcctcgccggcccgtgcgcaggggagcgggaccgaggagcgctctcgctccgtcctgcggcgtcccgcgcccaggtgcacatcggggagctggggacgcaggcgactcaggcagtttctgggagtcgttcttacgtcatcatgtcacgggcagaacagggcagagcgcccgcctttctcgcaaaaccctcctgtcccttgtgtacttacactgttacaagtaaagacttccccaagtgaccaaattttagagcattacagtaaaattggtacttgcagatgcctcagcttgattccttaattgatacgtatctagccacaactttaaactaccgagggacgatgtaagactgctgtgtcgcttttctttccttcaaataaacttttactcggtacctgttcttggcaattagactgcgttaatcacagccacaaagacgtggaaatgtctgccgtcaagaaattggaaatcgtatcgaggcaagaattacaagtaaaaagttgaataacaagtggtgggggagggggaatggctgaagaaaataaaatagaaaaaaaaaaacaacttcatagtgaggaagtcagtccactagtcattgtctaatgaaatgtgtttattctttgctaacagaacccagactggcaagcctgttgctaaccaacctgccaggagacctttcaactgggcaaaatgtgctttcactttgttccaggtcaaatgggtaaagtagctggaaagtattgtgtgggcaaatcagacatgttgaattgctaatgaagtaaaaacaggagcagacagaattcctggaactgaaatagcttcgagatatctggttagaaacagtagtgatgtgcctacttttttctcaaccctctacgccctcatgattcatcactgaggtcaaggatatcctatgaaaattggagtttttgtattccatgaaggcttttgttgtatctgtgctgtcgatgaat

SEQ ID NO: 2443 - DNA, 4001 bp, Homo sapiens
gcaggcgtgcggcttctcgcgggtgtgcaccacggcatggcggctcaggttgtgcgagtactggaagctcttgccgcactgggtgcatgtgtagggcttctcccccgagtgagtcctctcgtggcgcttgagggtgtacatgcaagagaaagtcttcccacacagcgagcacgtgggcacgttgacatcggcggcgggcttgctgcggatgccgtcctgctcgcggaagtgcgtgctcaggtggatctgcaggatgtgggggctggggaagaccttgttgcacagggggcacatgaagatctggcccgcggggctcaggatgttggagacgtaggggagcagactgctctccatgcctccctccacctggacacgctcgctctctggggtcatcatctcatcatcactggctttgtcctcccggtccagctccctcaagaccgagtcctccctcaggggagccagatgggccggctcatactgtaccctgttattagtgctcacactttctttcacagtgctatgttccatgtcatagtcattagtgccaacatcactctcatcacaggaagcctctttctccaccttcacctgcaccaggttgcttctcagcacgtcctgtgaagagaaataagagctgttcagattttcaactcctgaaaggctggacttgacagacaggtccagcacacagtcaacatctgccgaatccctcacggaggtgacagacctctgggacaaagactctgttgagctgcaggggctggctactgtttttccagctgctgtggcgtgtggctctgcctctccgccagcctgggggatgcctgctgagtctgagggcaatcgcatccacatgttcccaggctcggccgccaagtcccttttgctgggcaggatgttcaatttttcatcttctccttcatcttcatcactgggcaaatcgcctgctatgtggctgctgccatcggagagactctcgactttgtccgaacaacttgaagcatcttcttcctttttggtgctgtctgcctccgtggtggctttctctttcagcttctttttgcagactttgacaatgtcatacatgtggagataactggcagctgctagcacgtcttcaatgggcaagtctttgaactggagtttcccttcatacatgaattcaagcaggagagcgaaagcgggggctgtaacaatgtcgctgttcagatgaacaatgtctcttttgtccagctggtccttgtaaaagaggtggaaatacatgctgcatgaagccagtacagctcggtgcgctcggaactgggcatctcccaccagaacagtgcagtcacaaagaaaaccctggtgtctctgctcgctcagacactgtagcaaatgtctactatggtctggaaactccatactgtcttcataacctggggagagaggaatttctcattagagcctggtcaggaacaacttttcagcgctccagtccccatataaaaaaattaattccgctttggccgccgtggtacatgtccctgaattttaatcaggcttatgacccaagcaccaccaaatcacacggacaagacctaaatgccagaaggaaaatgcacactttctgaacttcctcacccccgccaaagagcttccgacgcatctccatcttccttgaacccaagttctaaaagccttcctttaactacagtctctcactaagaataagaatttagatctcttccagaagaaatttaattaactctacttatcaaattatgtcccacaaaacctacaaaatagctttaatttcaaagggaacaactcatataataaacaaagaaaagtcccaaacatatcctggaacatacaagaaaacttgttcaaccatcctttttattacttttgctacctgactgtgcttagaaagcacagtttaaacacacacacacacatttggctgaatcaagaaaaaaaaatgaaattgcataattagtccagaaattagcaaacaacttacttttaaagtcagggtgttacaacaaaagccctgtgtataaaaacagatgttaatgccttcagatttgcaggtatagcacacatgtacgagatcagaaggagctgcaccaacagatggaaaagatcatctttactatgaacaaatccaaagatttttcaaaacgaactgagaaaaaagtagttacatttctttgtagaaactgtactttcagaatattaggaaccagaggggctttactgaactccgaaaattctcatctaaactttgatccgttgcaaggcaaaatgagtttcatattgaaattaattcaaacttttaaaaataaaggcatacagcgcttaaataaaactcaaaagctttacaggttcaacgtttttttttaagcctttttagaaaaagagaacctttttttttttcctggttctgccttacctcagccaacagaaaatactttgtttcaatataatttgatatatttctgttttcccactagcttctattcttgcaaatattcatcattgcccttgttttgtgatgagggaaagtgaaatggagggaggagaaaggcaaagatgtacaaagggtcagaattcaactgcagtgggtaaactcctgaaaaataaagaagacccgacttcccctttcctgtgaccagaagcaagcctccacaccacccatctcagcaagtgcattttgggaatagatacacttaatttaatattcagaaattacttcctttcttcttgttcttctacactttgcccaagacagactaaaactttatcctaaccccagacacattctgcaagatgccactgctagaataaactaagatttacaatacaatcactttaagtgccccacagctaacatcaatcctaatccttgagaaggctaaaaataaagattggagggcagctcacaaggtagccgtgatcaaattaggaggctgagaggacagagagggacgaagaaggaagcttataaacatctgatccagctgactgtggccatatggcagctgctgcccagataaagagattaagaatagaggagtgcgattacagctgtctggccaattcaggcagctcaaatctacaagttctaaattagtcgctaacacaaaaactcctgcaaataattattgttatgctgaaataaaagatctcttaaatatatatttgaaagagaaatgaggaaaccagtcaaactattctcctggggacaaaagtttggtttttttttcttcttcttaaaaacctgcagtttcaacagcactacagctgtatgtttcagtagtgctgctcaatgttttgaagaataaagtttcacagaggaattaattatacaacaatctagctgcttaactagaataatcttctcatataagtttgaatgctggattccagtttactatttccccaccaccaccaccccaatcaaatctaaatagcagtgaacaacaaaaaagcattttaatccaacgtgatttccaaaagcagcattttaaagcctttcttaacatttcaaaacttgaaatatttgtgtattaaagttatttactcgctcaagtaaaagggataaaaaattaaaactaaacaagctcaagactttcaactccagtaagatgttcatttaatactcaatttcatatattattcctaaactgggttagaaaagtaatgtgatttttaaaattaaataaacaaaacaccaaaacagaaatatgctcaatctaatctcttgctactcctacctttaggacacataaacctgattaagtcctttcctctgagtcctgctggctccaggtctgttacatcggtggaaaaaaagcagactaagagagacagatgcaaagtggagatgatgttagagaggaatgagataccttctccaccacagatccgcacacactaactccctgtctgtgtgttagaataaaaggctgagggatggcaggctgtcagctgctctgacatcatgttcagatgga

SEQ ID NO: 2444 - DNA, 4001 bp, Homo sapiens
tgaatcaagaaaaaaaaatgaaattgcataattagtccagaaattagcaaacaacttacttttaaagtcagggtgttacaacaaaagccctgtgtataaaaacagatgttaatgccttcagatttgcaggtatagcacacatgtacgagatcagaaggagctgcaccaacagatggaaaagatcatctttactatgaacaaatccaaagatttttcaaaacgaactgagaaaaaagtagttacatttctttgtagaaactgtactttcagaatattaggaaccagaggggctttactgaactccgaaaattctcatctaaactttgatccgttgcaaggcaaaatgagtttcatattgaaattaattcaaacttttaaaaataaaggcatacagcgcttaaataaaactcaaaagctttacaggttcaacgtttttttttaagcctttttagaaaaagagaacctttttttttttcctggttctgccttacctcagccaacagaaaatactttgtttcaatataatttgatatatttctgttttcccactagcttctattcttgcaaatattcatcattgcccttgttttgtgatgagggaaagtgaaatggagggaggagaaaggcaaagatgtacaaagggtcagaattcaactgcagtgggtaaactcctgaaaaataaagaagacccgacttcccctttcctgtgaccagaagcaagcctccacaccacccatctcagcaagtgcattttgggaatagatacacttaatttaatattcagaaattacttcctttcttcttgttcttctacactttgcccaagacagactaaaactttatcctaaccccagacacattctgcaagatgccactgctagaataaactaagatttacaatacaatcactttaagtgccccacagctaacatcaatcctaatccttgagaaggctaaaaataaagattggagggcagctcacaaggtagccgtgatcaaattaggaggctgagaggacagagagggacgaagaaggaagcttataaacatctgatccagctgactgtggccatatggcagctgctgcccagataaagagattaagaatagaggagtgcgattacagctgtctggccaattcaggcagctcaaatctacaagttctaaattagtcgctaacacaaaaactcctgcaaataattattgttatgctgaaataaaagatctcttaaatatatatttgaaagagaaatgaggaaaccagtcaaactattctcctggggacaaaagtttggtttttttttcttcttcttaaaaacctgcagtttcaacagcactacagctgtatgtttcagtagtgctgctcaatgttttgaagaataaagtttcacagaggaattaattatacaacaatctagctgcttaactagaataatcttctcatataagtttgaatgctggattccagtttactatttccccaccaccaccaccccaatcaaatctaaatagcagtgaacaacaaaaaagcattttaatccaacgtgatttccaaaagcagcattttaaagcctttcttaacatttcaaaacttgaaatatttgtgtattaaagttatttactcgctcaagtaaaagggataaaaaattaaaactaaacaagctcaagactttcaactccagtaagatgttcatttaatactcaatttcatatattattcctaaactgggttagaaaagtaatgtgatttttaaaattaaataaacaaaacaccaaaacagaaatatgctcaatctaatctcttgctactcctacctttaggacacataaacctgattaagtcctttcctctgagtcctgctggctccaggtctgttacatcggtggaaaaaaagcagactaagagagacagatgcaaagtggagatgatgttagagaggaatgagataccttctccaccacagatccgcacacactaactccctgtctgtgtgttagaataaaaggctgagggatggcaggctgtcagctgctctgacatcatgttcagatggaaatgctacctccagctgtgctccttttaatgccatatgctactcctctacactcctgccaccagctttttcttaggagaacttttctcttctgttagtataaacaaaatacttcaaagtcttcctttttttccaaactttctaacagaagaaattgaaaaactcagcatatggagttctactgtatttatggaatagcaacacttctgtcttaagttggtggactggcttacatactgacagcacactcaagccacggtgctattcaggaaatccagattcacttttattcaactccaacgtttagtttctaaagcagtttagggatatttttaaaccaacccatttgacatctccagtcccatttcaacattattaccgcacttttttatttttttctgctgagataatggtatacatgtctcaaatgttggcagacttgttcagaactattacttcagactggttcaccttattatttcactcttatgtaattacttatctacaactaccttctcagaaaaatttcttacactgccacagtcaatgcaaatttcaattctcggtaccaacaagctgaaactgcactttctgaaatcctggaaagtacttcagttcaacgagaccaattaataaactgatacaacctgctccagtcacttaaaatgaatgctgcacctgcatatctgatctttctgctcagaaaaagcagaaccttgccttccccttgatctgtgtcccttaacaatcttttttttctttgggggggggtcactctaatgtttatgatcacaagaaaatctttgtgtggggggaagccaggtctagtaagtttgagaacttttcagccagtttgtgggtcttttctaatagctgatgaaactgtaacgcgacccgggctgggctgaccggtaccgggcagggtgctgcgacatctctgaatgtcaaatacatctcctcagactcttgggagggcgaggggtagaaaaggaactggggcctgaggcgccagcgtcccagccctggtgataaccacttcgttcccattagaaagccgtggcggagagttaaagagtaacaaaacccgacgactccgtcctgtccttctcgctttcccaaagtcacaaacctaactttctccaacttcgcggtgagtgacataattatgaacacttagtccaggagacatcctcgggagatcaatttcttcccagccacaccacctattctccacaaatgccctcgacccattccaatatatcagacattaatcaccccatttacccagtggggtggggggtgagtgacagtttaatgagtcccgggcaccgcaatgggccagcaactcccactccacaaatcaaccccttcacgtctcgctaccgcggatccatagaggttttgtgaggttggggttttgtttttcagagaggtgggggcgggggtgccgagtggggaagcaatgcaaatctttacgtagttcgccgtgcataaaacacacggggaaagaggaaggttaaaaccacagggaaggaggtggagggcgcagagccggtgcagcaggaaaacaccttaaacaacagaggagaaaacagacccgggtcacggcaacaacaaaagaaaagtcgtaagaagcagccagcgggaggagagtggttgctaccgcttccccgatgccgcgacgcgcgagcccccggggcctccgggcaactgcaccagcccgggagggccccctcccccgccggccccctcccccgggcgccactgcagctgcaccggtccccggagccgcggccgtcccgggcgccactgcagctgcggctgctcccaagccccctcccccagcccgccgccctccgcacccgagaggcgccaccgcagctgcaccggccgggagcccgccccgcgccgcagctgcaccggcccgcgggggcgcggcgcggagcc

SEQ ID NO: 2445 - DNA, 4001 bp, Homo sapiens
gaaaagcttgtccttgcacattgaccacaatatcacagagacggccctgcatgcgcaactggtttagatggctcaggacagagttgctgaagtcaggaatctccaattgtatgttcccacctttctccatggtcgtgcctgagggtgcattcaaccctgctgaaaaaagaaaccatattctcattaataattataattttacttcccggatggtttccatttcaaaagtatttaaacatagttatctggtaaagtttcaaaatctccagataaaagaaataccttccttatatttagatgtggaaacagaatcaccaacaggtttttcagtttaagtttcacaggaggacatagttaaaactaaaaagtgatctttagactcctaaaaattcatgttatgaccatgctttccttactaataagttatataacatcaaaacagaagttcaacagaaggtagggggaaggacttttaagtgttaactataaggtacttgcagactgaatataacatctcataactttacaacttttctctggaggaggaaagctttctgaataaatgcaattctacatagcttgatatccctcttcttagtattttactacctgctgcaagaattatgtttattattttataaaaggactaatatcccacatgaatgtaggctaatatttctaagcttaagaatcagagccccccccacaaaaagactttggttatagggctgtgaagcaaactctaggaaaaatcccacagctgtgccaggattcaaccaagatgcagagaatgtgaagttcagttgtcaaaattaggaaagctgggtaaatctgccaaattcgaagttggcaattccgaggtggtgatgaatacttccatcctgaaacttagttctccagatccgatgaaaaaatacagcatttaccaagtatgccaacatttttccattaaaatatttttaaaaaatggctgaaacactaaacctgaagctgtatacaagatagttgaaagtacagtttcaactactgaaaatagtttgtataaatccgaacaggaagacatttacttaagcccaatgtgcgttcacttatctatatattacatagttacaccacacctgaaacttcaggaacttactctgccaagctcacagtactgccccgcattaacaacacacttattaaatagggaagtgtatacactgttttcaacaatcaactttagccaatctgacctttttccaaagcgttattgtttgttttgaaacttttaatccaataagagcctctgtcgatgccatcatgaattcagatgtgtttattttggagcctacaccagcgccttttttgtttgctctttccggcaattccccagtgaggaagcccctggaggaaagtctttcgctaccgtcggcactggaggggtgagagctgtaaaagggagaattgggaacggcatggggttggccactccagcacttgagcagctttcttctgcgttaggaagcctggggagaggggaactggctaaagggcaaaatgtcactgaggaacttcggagaagatggggacaaggcgtcgggcgggggagccagcgctcaggtgagaactaggaagggggcggcgcccagggaccggctccaggcggcggcgggcggggagctgccaggaggtgggtgtgcgtatctgggtgtgtcccggctgcggtgggggagggggccgcccttcccggggtcctgagggaggggccccgcgagggggcgggtccggcagatcagcccggccgggggccaagggggtggaaggtcgcccggtgcctggaggcggggtgaaggaaagtagctgagcgccccaggagcgcgctgcggcggagggcgggcgaggtgaccccggtgcagggaagtggcactggggtgtggggcccgagtccagtcaaggagcagcacctacctccgggggtggaaatgggccggaatgggccggaacaccgtcccggaagtgaaatcccccaccccctcccacggagcgggcgacgtgccggaaggaaatcactcagccttacaccgcccccccttcccccatccccagagctttccttgcctcgcgccccctcccctctctgctcttcctcctcagtcgggaggagggcgggagcacggcatcacgtggacggtcatgtctctgcccacaatggcgaggaagggcggggaaaaggggcggacttaaggggtgggaagaaggtgatactggatgagaggaagattgagggaggttagggggaggagccgaagcggacgctgccgggagcgtgcgtcgtgacgtcatcaaaagaactcttatatacaggagcccaggcaccatactgtcttttcgaggtaggagtcgactcctgtgaggtatgttttatctttgcgaatgttgcgggttttggggcgctccagcctttgtctgctaaggtcaccctgaattgactgggacttctaagccagtcgcgcgcctttgcagggcctacaagttgaggatggtgggggattgcacatatggtgcatgcgtgacctaagctgcgactatgttagagtagaactgcggagaagcctcggctctcgtgccctgcctctgatgaagcctgtgttggtagggacatctgagagtaatgatgaatgccaaccgctctgatggtggcacatgccgagtcacccgagtaagctattgttaagggccgtgacccgagcctccatcagccgtccgctctcatgaaaggctgtcggtggtagtccacgtgcttaagtgcctgcattccgcagtgtcaccaatatttccattagtgtttcttttttcttttttgagaccgagcctcgttctgtcacccaggctggaatgcagtggctcgacatcggttaatggcaacctccgcgtcccgagttaagcagttctgcctcagcctcccaagtaactgggactacaggcgcgcgccaccatgctaggcttttatatttttagtagagacggggtttcaccatgttggcgagactggtcttgaactcctgacctcaggtgatccaccagccgtggtcccccaacatactgggattacaagccgtgagccaccgcgcccggccgccatcggtggttcttaactgcgggtgcagtgcttctttgtaacattaagtgtatcctttacctgtcgctagataatgaatggtatgttacctgcatcattggtttaaaaagacgaaccgtttttttaaagaacactctttaaaaaaaagaaccgtggaacaatgaattaaaatctgtacctgatctctttaggtatggtgctgggtgcagatgcagtgtggctctggatagcaccttatggacaggtaagaattggggaaagtatggtgggaagaatgaaatctaagaggtggtctcagcctgtgatgctttaagagtagtggacagaagggatttctgaaattctattctgaggctttaatgttaacagcatttatatttaacgtgactgctgtgaggttcattctcactgttttgcttgcatctttttgttttctagttgtgtccccaaggaaggatgagaatagctactgaagtaagttgaaaattccctctcaaaaaggtttaaagccattggatgtgccacaatgatgacagtttatttgctactcttgagtgctagaatgatgaggatcttaaccaccattatcttaactgaggcacccaaaatggtgagttggggaacatagagagtacacctaagttcacatgaagttgtttcttcccaggtcctaaagagcaagcctaactcaagccattggcacacaggtgagacacctctattttgtacttctcacttttaagggattagaaaatagccaaagcaatgatgattatctatgttagtgcttctctcccctcttttcaaatgagaattttgctctcatattgatactaagtttaatactgaagaaaatgtgaaaacagatactatgatggtt

SEQ ID NO: 2446 - DNA, 4001 bp, Homo sapiens
aacaacagtaaggtgtggtccctgcccttaaggacctcctaagctagtaggaaagacaataaacagatggaacaatacagggtgttcagtgtgatcagattagcttcagctctcagctgaatgccttagctatgtaacctcgaacatctctccgacgtgagtttgtttcctctatgcgtaaaatggtaatattaatactacttatgtcatagtattggtgtgaggattaagtgatagtccatataaataaagcacttagcacagtacctggcacaaaataatcactcagtaaatagcaactaataattttattatgatgatgctattacagctgtatttgaaattatctttgtctacctgtataccacttgtccaagccccacatagaatttaaattccatggaagggcagaaatcatatttgtcttgttcaccactgtatttccaggaatttgaaacgtctctggtacacagtaagtgctcaacaaacactaaatgattaatgaatgcatgcgtacatgcatggggtgttctgaaaccatttgttaaaccactaatgaatagctaagtttggggactactgacatagaagaaaagtgtttatattagaaaggaggggcagaagtttgatgatttagctaagtagaaaaaaatttcactgagattgtaattaaatctccattaaccatacaaagatctgggtacaattccagggaagaacaaacaattccaggtagaaaagacttgaaagaataaaatccaaagcagtttgaccggtgccatcaggcagggggctcccagggacaggctcaatttggcagccctataacctagtacacctatacatatattaaccactcagaacaaatttcttcctcgtttgtaaaatggaaataccatacttacttataaagcgtcgtcataaagtagaacaacacttgtatgaatataaataaagcacctggttcattgcagcactggctgcatggtaccaacgctattcaaagcaggagaaactctgaatagtcagtaagaccagaagggaagccagagtgttctgtcaactaaagtgctctcggtgcatcgcgcagttttaactcttttcccactccagaagaaccgacgagaggaatagctgaatgacaacactgatccaatctccttgtgtttagggcaggggtcagtaaacttttgctgtaagggaccagacagaaatatttctggctttgtgagccagccgatcaaagccaagcaacggctgcgcaactactcagctctgccctcttggcaggaaagcagccatagacaatacatcaacaatgaacagggccgtgttccaataaaacttcatttatggacttgatttcatagaactttcgcaaattacatgaaatattcttccccctaaccatttgcaactgtaaacaaagaccgagaggggaagagagaaggggggcatggattaggcccaaggccatagtccgctgacgcccggcgaagggacctgaagggagggggagtgagacagcgacaagaggcctccggacgggccgagagggaggtgcggggcgacagcgagccccaggcggtgtcaggtcgggcctggcgccctgagtgggtccccgcggtctctcccctccgcagtctacagcagagccggcgccaggggtgcggaccgcccctggagggggcacgtccggggtgtaggtgaggcggccgtgattcggccgagtcccgcggagttcgccacgcggaagggtctgtatacacccctcatttagggcgcacccgggcccccgctgcaggaagggtctccacgcggagtcccagccccgtttctatggttacctgttcagcaccgattcaaactgccgttctttattgacagcgccatagaggacacgaacactcctgcccgaagggaacaataaagctttcgccattcaacagcgccggagacgccagaaggcggccatcttgaggccggcgcgcaatgggtatcagaggggagggggcggcccgacctgccccacgcgccgcggtcacgtgctgggggcggggcctgcgtcacgcgctcgctctccacctatgctaggacggcgggggccggctggttgctaggctcttctctgacctctgaccttggccactccctccttccctccccacacttcctaagtaaagtttttttcttttttttttttttgagatgggagattcgctcttgtttcccaggctggagtgtagcggcgcgatctcgccccactgcagcctccgccttccaggttcaagcgattctcctgcctcagcctcccgagtagctgggattacaggcgcgcgccaccacgccctgctaattttttttttctcttctatttttagtagagacaggatgtcaccatgttggccaggctggtcccgaactcctgagcccagatgatccacctgcctcggcctcccaccatgcccggccctaaggaaagttctaatggagctccgcagtctcgctccggcagctctaggattaggattttgtttcaaaggagggcaaggaagtgaacacaaaaggcttcgtttttccaaaacaacacattcacgtgcgaggcggagaggcgacctgagccgcgtccccagcccgcactctttgtgggacaggcttggcgctggtggggcgcagtgggctgaaggcatcctggaggcatcctgatcctgcctctcgcacctcccaattttgggatttaggggctttgggatttagtcctagcttttcttttgctcattttccttctcacacactatgcgttccctgttgaagcgtccccttgccacccttccttacacaaacatttaaatcagatccagcagtaacaaactgagtcacctccgcgctggcccactgaacacagtcaccctgtcactgacatgcagccactttttctgtccctgacagttacgtgcccaaatccagccatcttagtgcaatgtccagcttcctctgtggttataccttttccatctgcaatgtcaatattcagtcgttctgagagctgtctctggctgactgactcaccccatcaccgttttacatcacaaattcaatctactgggcagaactgtcacttgcattgttgctgtctcccggtcgatcatatttactgtcactgtctgacatgcagctaccgtcattgaccataaacttcaaacggttctgttcaaaatagcactttgtttgcccagctgttgccctttctgttgttttcactgtcattgtcatgcagccacttttgctgccacacagtcaagccagtatttaacaggccccttcagggtacactgttgtcctcatacccttgtgcccagttagtcactttcactattatactcatgtcaccgttacattcagggtcggatttactgtagctgttatttagtcacttttgtagtaactggaaccacgcctacagctgttgtgtctcctaagccctcatttccaccagcctcacattctcttttagtgggaacatagggttgctagatttagcaaacaaacacctagaagggtgcttggcacatagtaggtgctctagaaatatttatcgagttaatgggattacaggtgtgagccactgggcattttgggagcattttgggaggccgaggcaggcggatcacctgaggtcaggagttcgagaccagcctggccaacatggtgaaacccccgtctctactaaaaatagaaaaattacctgggcatggtggcaggtgcctgtaatcccagttactcaggatgctgaggcaggagaatcgcttgaacctgggaggcggaggttggagtgagctgagatcacgccactgcactccagcctgggcaacgagagcgagactccgtctcaaaaaaaaaaaaaagagaaatatttatcgaattaatggattttaaaaaacagtatcattgccaatgtgctgtatgtgaatgcagatggcttgaagctcaggagtctcaat

SEQ ID NO: 2447 - DNA, 4001 bp, Homo sapiens
tttacctggaagcttaattgttgcaactgaaaagtttacattagaacagttcatctcagacacttccaagaattatcttacctagcaaatattagacaacttgaaattaaacatgtactgacataaaacttaaagtgatagactacatttcctcaaattcttttctaaaagaaaaaaagttgatgtattcattattataacaaccaaagcttcttggccttttggctaaagtcacatgtataatataaccagagtgctactaactaggatactacctaaagtctctatctacagtattaaattacattcatttcaattttatccttcaccatagtttaatataaaacatcccctttctattaaatagtgctagatactggaaaagtgacaacatttataactcatatattaccatgcacggggaaaacagtatacacattattaaatctaatataatccacttttttaatgagttaaaaatagtatttatcactggaattaaaccggcatataaatcaaagctctacatgataattattgacactctggagtctttcatagcaaatacatgatctaatgatgtgtcactgggagatgaagaaaagtaaaggctaatataaatacttaaattaattcctgaatcacaacaactttaaagtaacaggataaacactattgaaaaccaaggtattctccctacttaaacagtctttttagaagttactttccaagtttagtttttatttatcacctttaaaatatccaagaaaagtaagtgattagagatagaaaaccagttttcttttcttacctattcggtcaaatgttttatcacatttaggacactgcaatatttttttgttgctgttctgaatgaccactggagttaacccctcatgaacatttcctacagaatcaccagcctcaggttcttcttctgcatcattatgatccttttcactttgttcttcaatgtcagagtactcatctgacatctcctcctctagctcatcttcttcagcattatattcacttccagggtcctcagaatcatttctatctgacttttccttatcaaaattttcttgattcaaattgtctgacccatcaccactttcctgttcatcatcgctggtgtcatcaaacttaacagggcacttccgattcctttttgatcttcttgcggagaaacttctctccagcatttttaacccatgttttttccctaataaaagggacctatgggttttagccaaatgattctctaaagactttttataacaaaaatgtctactacagaatttgcactgatgattatttgatagtcttccagttaattcatttagtgtttcttctggtgatgacttttcagttagctctgaatgaaaaggggcaacattttcgttatttaacaacttcactgcatctataatgtccaaaaattttgcagcctctaaaacaagaggtatttcatatttgtacacaaaaaattctgatgtgtaaagaaattcaagcaaatgctgaaaaactgaatgtgttacgtgatccagggtgacaacatcagtgcttggatttttgctcaaacacgcatgaaaataactactgccgacagcaacgactactttatgtgcactaaattcttttccttccactatgataagtaaatcacaaaaagatggttgcttctgcctatcatcatttaaatattttagcaaattcttattatactgcaaagaacttaaaagctttctctgatctggagagggaggaagttcctggtaacagtgaagagcttcaggagttggtcttcctgcagaatgagtataggtcacttggtcacactccactgcaacatttccttctgaagaatctttatgatagcctagatggatcttctcaagatttgaagtaacctttctcctcttcttcattgcagtacagcaatttcagaacaagaaacttcataagtgtcttaagtgatttataaaggaaaactagattgtcttggataacagcttctgaaggggcgtgcccaagggtttcatggtctgcaaaagagtgagaaccacgtaaaataactccatggcaaagcaatgctaaatcagccaacggcaatcatcaacgaattctttctaattataactgaatgatgataaaatcacagcttacactcattcgtggcaaagattttggggcggagaacaaggagggccgggtttagaaaaggcagccaacaaaagaataattttaaaggaacccaggcacaccttccaggcctgattcacgaacagggtgaaaatacccgggcagaaaggggagagatcttccaagatcgttgacggtgcgggttgaggaggctgaagtcgtggtttaggggtgctgggatggtgacaataaggccgtggcggccgcgagatccgagtctctccattaacatgctttcctcgggcgggcaaggcacagctcttcaggaatagagagcgtccctcagccaaagccacccggtgagagacggccccaggaggggcgcagagcagaagtggggtcaaccagagggacgactaaaggaagcagaagagctttcccaggcccgggcaaggcggagaatgcgcttgtagtcggcgatcccgctacccttcccacccagtttccctgggaaaacgccccacagatccattaccgggaacccaaggctcccccgctggctcccagcagctgagctccactctgggcgcgctcgctcctgcgcctacccacttccgggttcagccccccacctcaccaccccctcccctccctccgctccttcccctcccagagctccgccgcctccgcagccaacgaacacgtcaaccgctcgcgcagcctccaagccctcctgagagagaccggcgcgcgaccctgcgcgaacgagtgcgcatgtgcgcgcacgccgctttacgcatgctccttaagttccccgtactccctcggagaccctagctacacgccgaatccgttactccgggttttcgcagtggctcggtggcctaccccgatcgaaaccgtgaggcttttgctgagggagggcaatgggagaggggaggatggacgcagagtttagaagtagtttgccgaggtgcagtcgcacgaatggatttcatcctcactggtgtatttaatagtttgtaatctaccaaacagcaactgccagaagccagtcccagctaacctactggcgtgcacgaaagaacccagcgatgctgatctcgtttcgttatttttctgacttaaacggttaaatctaaacgcgattactaagaaaaaaaattttatacctatcattgtacacagaaaaaaaatagaaaaatgtttatataagcgtaaagctggtaggacaggaaaggaagccgaaacaaaaagtaaagaaaaatccacaaggacaacttttggagctagtgcctgagattttggatttctgagtcccaggaggtgctgatatcatttatctgcggactcgtattatgaagcgcaaggtcctagagcgtgtgattttacaggcataaggaatataagatgaaggctgagacaaaataggatgggtggcctaattttcttcccccaccctctcgtccctcccatacacatacaacctgacaactaaaagggccgcactccatggaagaactcctgcagagttggactccccaccggcaaacaggaggaggctatgaagaaacttgcctgtctccgattttcttgggaattgaaaaaataaaatttttaagcctttcatgaaaattcctagcaaaaactcacattcacatggatttgcacaaagattcatatcacctgtgagactcatcccacaaaaactagccacactgaaaagagagaaaaatgtaaaaccaagatagaaaaaggatggtagtctgcagatattgcaattatcagaaacaagtatatttaaagaaatgaagggaaatgaaaaaattatcaaaaataactaagcagattaaaag

SEQ ID NO: 2448 - DNA, 4001 bp, Homo sapiens
cagctccagttccatcccaagccccaaccctgacaagtcccttcatcagacaagttccttcaggggcccaaggcagagcatctgaatcttggattcagaggaaagtggctgtgtttgtggggaactggaagctcagctggaaacactgccctggggaaacacctgtaaccctgatgctgcccactcctctcaggaaggtggcaaccgtgaacagctggggcttgcagaaaggtcagcctgaggtcaccagcttcctttggagaaagcctgttccaaacccacattaacagagattgtcttaaggtccacatattttttttttttttttgagacaggatcttgctctgtcgcctaggctggagggtagtggcaccatctcagctcactgcaacctccacttcctgggctcaagtgatcctcccacctcaccctcctgagtagctaggactacaggtgtgtgccaccacacccggctaatttttgtatagtctttgtacaaatgaggcctcgccatgttgcccaggctggtctcgaactcccaagctaaagtgatccaccccccttggcctcccaaagtgctaggattacaggcgtgagtgagccatcacacccagcccagggtccctattataccaaaaaagtgtctattccctctatttgtctccccagtcccaacaccctgggcacagtacctcattactgccgccctgcagctgggcaccttcagcctctaagggccttgggggcactttgcagtcctcgggtttcttgtcctcaaggggacaaggcttcaaggcctgcttcagtttcccacagagggaggaggggccctcactctgagctggggaatggagctggggcctctgaggactatgactgcctctgggctcctgatccctggggactagacccagagtcctcgaaacttcctcttcttccaagcctgccggctccttgacgtggctgttcacattctgggaggcagggggccccagcccactctggccacctgctgcctgtcccactgaagttttgggcttgaagctctggcacagctctacggcctctggcactcgcaactccctggctgccaggagcacctgatcccggttccctgaggtgagagcgaggtgaccagtgtagaaaaagtccaacaagaggccaaagatctcagcgaagccagcagggaggacgacactgccccctgagccatccccgtagaggctctggaaaaagtgactgcagcaggcaaggacactccagtgtgccttaaacaccaggccccccacgtccagagtggcgtcgcagtactggcccttctcccgctgcttgttgagctcctgcagaaccctcacactgtgctggacgaaggagccgtccatggtctggagggcagggaggcagaagtgacaccccggccagcctaagcgagggtatgcaagagaaagctcctggagtcaagagagagaaacgggaagttggcctctactcaaataatcatatttatcagcacgagggcttgggtcagggtgaggggtgcacgcggagggctggaacacactgacagcctcccgggggccgggggccatattggattggccaggggggatgctggatggggggccagggtcgtgaagaagggcctggtgagaaaaatccaagtttggggaaaggagacatgggatgagagcgaacggactggcccggcacagtgagaggatcccggacggcggagggcggcagccggggacaggtgagcgaagcccacgccgcgcccacaggtcccgagcggccgagcggaaggcagccacggcggcccgcagcccctccctccctcaccccgcgccctcctcacccaggcaggtcctccctgagctggccccactggccccctgctccgtcgcctccacagcccacgaacctagtgcccggctatgcgtaccccgccgacagtgcggagactccaccgtctccgcgccggacgtgacgtcaaagcgtgcaggccaggaggtgcgcctcggaagcgtagagcttctagctccggcccccgagggcggggccccgcagagaacggccaatgggatgcggggacgacgcctcgccctgttcttttggcgctgggcccgcctccggagttgcctagcaacgtcaatctgggcggtcagccttttccaggctctgggttcagacttgaatccgttacacctcacactctcccacgacaggagaccagatacgcatttcacttctttattggcagcccggagcctggtctaggctctcccaggcgcttacacgtcccaaccccagaccgcgatgcccaaagacctcccggacacccccggcctgctcgaccttcgaccctcagggcagagaaggctgccagccgtgcctgctgacccactggtcaggtggagccgcagcgcctcgtgtagtcctgaatggaggcctggaagtgctctgtgctgttgaggtctgggcggcagaggatcacgtagcacttaggcagaaaatacccaccgaagccgctgctcaggctgctcagcccagccatcatgttggccgcaggcaggtacttgccgtcgtagacgctggccgtggtgaagaaggcgatccaggacacgaagttgaagagcaggctgaaggtgacacatttggcctcgttgtagttctctggcaagtccttacccaggtagctgcaggcaaaggcactgatggagaggaggccattgtagaggaaggccagtatgaagcccagggagttggtctctgtgcactcaagcatcaccagatgggggaagcgctggtattccctagcaggcagtggggtccacaccaccagccaagttagacagataagcagctgggccgctgagctgatcatcacaaacaggccagcaccgtggttttggacccaggcgtggtagaatgtaggtaccttggtggaaaacttgaagatgatgattagttggaatgagcgaactgtcaggcaggacaggaagatggtgaaaccaagggcaaagagggcctggcgtagcaagcacgcaggccttgtgggttccccaaagaagccatagaggctgccactacctgctgccagggagcccagcataagaaagcacaggcggccccctgctgacctcaccacaggggtgtctaggtgccaggcaaacaggccagcagtcccaagcagcagcagcagcagcagcgtgttagctgccagcagcacccaagaggtgtgctcacgcaaagccaaaaacaccacagtgcgcgggaagcaggtctggcttccctcaggtgcccactcttctttcccacaaggctggcatctgtagaggtctgaaagggaaggccaagaaggttcctgagagccagatgagcagagtaggaataggaaataggggcctgcaagatactgggagaattgtaccagggcagctagactatactaggcatagtgggatgggggtagccgggagtggggcctgaggccacgcatttcctcaaaatgcctgtgttaattacagactctggagacacacaggtcggttctgtatggctcatgatcccatgagggttttgcaaaccctagggaggaccttaacctggtagctctgcccacataccagagaggttacgatctgatgggagcagcctgctcccaagggagggcattgtaacccctctctcttgccagcatttccatgaaccactttcctgagctgctgctctgtggtttctctgagtcctgaccctctgaggacagaagggaagtattcctgtccctacagagatggtgaaaggaaagaatgtggcccctggacaccaactaaggacctgagtccttagctacctaatttgctctctgttcttgaccttgcatttctggatggggaatgctgtttttttctctgctgcagacacgctagtatctgtattcaggccaagctgttcaaggagctagctgtctttggcatgggcaacagaagggacagtaggac

SEQ ID NO: 2449 - DNA, 4001 bp, Homo sapiens
atagtcacacatatgtccctctctagcgcagcacaacactccttatgcccactctctcctccccaacctgatgtccactccatgccagctctcccagcagtgccaggcgggtacaggggtgaccaaaccagttggtgtgtgtggggcagcaggaggcaaccccataatcctccaggcctcatccccacactcacacatactcccttagggaccagacagttcccatcctgctttaacccctcacagcccaatctggttcccccgtccctgataagcggtctccctcctccaggaataagttgggggaagggggaatagctgcgctgactcattcccattctcggctgcagctaggggtctccaaggcattcgggcgggggtcaattcaagaacaccctccacctggcccggaagcctggacagcctgccggtctccccctctccccagcacccacttccggtgtcccaaactaggtcagcagcgctcgtttcctgtgggtcagctagcaccggcgcctctgcccctcccctgctccggacccaggctccccgcccccctgccccccagggcgccccgaggtctcaccatgtctcagccgccctttgatacgtgggggttgtgcggggcggggggcaggggacccgccctctctctaaacaccagcagggccggggcgcctgggcaggcacgtgtccgggcacaacccgctgcccacgccgcccccccactcccgcccccacctcgctctggccgggacacgtcgctctcttacttgggatggggtgggaggagggagagaaagctggaaattgaaagcagcgccccccacccctttgaatggcagccttctgccaggcgcactctgtaggttctacaacaacacagtagcgacccccactctgggctggggcaggtgcgccggcgccggtggggggacgggtagtaggtaggagaattcttcctagtcacccgccctcgctcttgggttctgtggtcatgagctggcgtggaaaaggtagcggcgggactggagcctgaaggaagggagtgggattgaggggcagggaagagagcggtcgttctatgtcggttcagaggttgttgctgagccccactaccgctggagagagcgcggctctggaagcgcaagaaaccgaatagtccagccggtaactttcccccaagccgcggctcctcctgcgcccccccaacccccatgcaactggcctggggccaatccaccgcgccagggggcgcggggtggggggggggtgcgcgttgtcctagttagagtccgtcagcgtttccattccctcaactcagtccggtctggggtctccccctaaagtcacgaaggagactgggggaacgctcagcgtcgcctcaccccctctccatcccgaagccgtctgtctgtctgatcccaggagaagtgcagataaactttctggggaccctccgcctagggttggggggcatccgcagttccttctctgtctttcatctcagttaaaaccaattccagagacccggggtgttgggaaagcacagggaaggggagtggtgggaatgtgatctgcatgcgtgtgtatctgggggtcccacttacaggacggacgaaggacactgcagtagtctcgagcctagtgaaccccgagccaggagacaaaagtggggtacactcacctctcagccgtcgggtccgctggctggagctgctgaggctcacagtgtgggaagaagcgcgtcccccaccaggcccgggggcttggggccctgctccggtcctggtcagaaggccgcggtcagttgctcgccgctcgctgctggggggctcctcctccgccgccctctgcctcctcctgccgcccgccccccctcggccgccaagagccgtacattcacctggctcccacccgcccccccctcagggcccgcctcacctgtcctgctgtctcacctgtcctccagcttgctttccccccatccctcccctccctccccccgcccctgccaccccccaaactccccccccccaacacttagaaacaccctctgtcacttcctggtttttcacccgcccccccaggccccctccctccgcccaataaggacataaacttcaaccccttcgtccagccagtccctgcagagcgcagatgggtccctccctccttttttgcccccttctccaaactcttacttagctctcctagcctttcccaccctcctcctttccctccttctttccttctctctgtctcccttcacctgccgcggtccctctctcccccccctttctcctgcccctatctctcccagtccaccttaactcaaactccgcccccggcccccatccagccctttgctgctgctctgcccgccccctgcacgccaccgccctgtccgctcattggcctgaatacccgctcatctccagtaggtctcgccttgcgttcgtccagggagggggcggagccgaggggctggcctggaacctggagaggaggggggagggggcagtgtccgcagcggccagggaatcgagcaccccctacaggggctccctctccttcaagaggggcttctgtagggtcaggacctcaggagggaagggtatgagaggttagggataggctgggtgggggtgaattggggacttagggtcttgagggagggggtcccgtgaggggctgtaatcaggtcagggacctagaagggagggggagggggagccaccaggccttcggctccggcccctacgccccaccccctctcggagggagccggggagttgagcctgcgggcgccctgcgtccctccccacgcgtgacggtgccccgcggggagggaagggcgccccaggcaagcagcctctgtgctgtcgccagtgcccgctgcggccttggcattgtcggaggggaggggcccagtctgcgaagggggagggggcgcgccgacgcttttgctccccacctccatcccgcgggttccctaagtggagaaactgagtctccaccgaggagggatagcttgacatgaattcgctgagagacccaggtggcgaggggtgcctggatgttttgggatgtgtggtatgtgtaggttttggggaggaccgggataaatacttaggagtcccccaactgagaaaggtagcgggtgaaggatgtttctgactgagcctgcggagctgcgtaccccaaagggcccctcccactagtgtcaaatggaatcaaatccggctacctagggccaggtttggctcccctgcgacaagccaggccgaaccgggtcggactcgctttcccctcccaacccccctccgcagggggcctccctccctttccagcaggtggcttctcgggacaccagctcaacctgttggaccacaatgggcggcgccaggggggccctggccctcacccgggctgacccgggatccccgcgcacgaggggcggagtccaggtccctccctccctctttctccctctctccctctccgcgccgggccgtgactcagcctcggggccgctgccctgcgccccagccaggggcggaaagtgtgaggcgcccctgagggctcaggccaaaccaaacagccccccaccccagacattatctcactggagaattaggggggctataggaaggaggaggtagcggcaggcatggggcgctctggctcgagtaatccgctccgggttttcctatcgtccctgacccccttgggtcgcgaggctgatcactgctccgggttttcttctcagccccgccggacagatcctggtccggaggggcccggagccgtccaggccggggttttccccttcctactccagccgtctgggtcgtgcaggcctggtgaagggctgtgctaggggctaggcggcagtgccacaagtgaaatggagagggggctgctttggggaggaaggaggatagccaaggaaagggggcggggggcagggggcggggggcggggggggtgggaacgtg

SEQ ID NO: 2450 - DNA, 4001 bp, Homo sapiens
atcaaatctttaaatatgattaacatatcattgtgtcactgagttaagtctattacacagttttatctaaaaattagatttaaatgacatacgatgaattaaattactctatcttacaaagtttttgatggccccaaatcattatcaacagcgaagctggtgatttcagggctaggagataagggttagtggtgtggcctccttcctggagtccctactcattatgcctcctgctgacattttagagcacaatccacccagacacccatttgatcaagggccctaagccagattctcacttcccagttgccacttgtgtggccagagaggttcccaggaataaagacatctgatccctgcttatcagtgaggggctcttgctccagtctacaaacgcatccatacctgaggcatggaggagataagactggagcagaagcttgttgaggattttggaggctttcctgaaaaagatcagttaaggtttttagagcagggaagcgctgtgttaagactggcccttctaaagactcctctggaggtgccttaggagggaaggcagggcgggaacaggaggccctgggcggctatggtcaccctagcctagaggtgaaacgccatgcttcatacgtgttccctcatctgcaaagtggaattaccgtcagcctgactaggtggttgttttatgtgaaattaagtgaaataattcatataggtgaaagcactccatttaaagttgtgcaactataaaggtttatcaagcatagaggtgatattgacgtgtgtggttagaagcccaccaggtgtgtgtgaatctaccgcttccaaacgcgtcttagaatgatgtggagtagggccattggaacaatcggggatacataagcgcatctgaaggggaagggaacaagccgctgactaactcacaaaagaggcggtccgcatgggtagagatgagcatgtaaggttccgtccagaagcaaatagttgggagctcaacattggttaggcgcggtgagttcgccctcggttctaagcccagatgtcgcatcttgacataaaaccaaggatggaggctgcaccgagaaactcgggctactgccctgggagccaggttccccggcagcgcccctggccgcgcccgcagagactccggccccggccctgccctgccctccccgcgcgcccccgcggcggccgcccgtctttgctccgcgcagcccgagcccctccagagtccgcggcgcccgacggctccagacacgcccggcgccgtccccgccgccttcccgccgccgcctccaggaggctccgcgcgccttcccgcctttccccgggccgggccgggcggcgaggcgggcgcgggcggcgacggcgcggccattgtcccgcagcccctcccgggcgcctcccgccgcgctcccggcccggggacgtctgggggaggcgcgcccggggcccgcatcccagcactgccgccgcccgggccgtcagagcccgcggccaggctcgcggcgggtcccgggcagccccgacgcccgcccgccctccgccggcgccgcgtgcagccacttaccgcgggccgcggcgcaccggccggtcgcgcgcgcgggccgagggaagattcctggttctcggctggggaaggaccccctttcgaggccgttcctttgcgccctaaaacaagtagccccaacgtgagagaaacaaaaggtatttgctgacgtgggcgttggacagaaacgcccgagggctggggacacaattaaaggggcaacgcacagatttcaggcaccaaccagcagcttcgcccactccccctgcccttgcccacactcgctgcacgctccagagacaccggggtgcccagattctctagcagttgactgcggatcatgattttagtcaggagctgaaatttaaaattgtactttacgttgggaaaggcgcctccggagggcagaagggctggatttctaggatctggggatttggtttaggaaagagggagggacttaggcgtgcccacaattactgtataagtacatgtgacattattgtacttaagtttagcaacgtcaaatgcaaaagatttccacagaattttcccttgtactgaagcagttattttagttgaggataaccttttctaaacctgtacaggtcagaagcatttcatttgaataggaaaacccagagaggctgagataagagaacataattcttagttaagtccagagaaatataaaattagtaaaaatagcaagttgcgtcttttccaatgcaagcattcatcgtacaccaagcttcctctgacaaatttacgtctctaatatttagagtacagatatcaggttatacatttgctaaaatagtaaatcaatggattttcactgttactgtagaagcattacttctataaattagttttctagttccttatgctggggtcaggtactgaaaagtactgtgttatagtaaaactggagggaaaaggttcaaattatcaaaacttgcgtttagcttttaatggattcctctcctgttcaaaatcattcatattggacagtttgtaactttgatttcaggaataattagctatgcattttgaggatacaagatattcacaattgtctcaatgtcacttctgtgtcactgcagaggtgctttgctatttagttgcatttcctcaccttctgaacaggtaagtagaaacatatttgaaaaccattaggtgtctggtgtgttggatgtactcagattactctgctagcgcccccattgagaattcccccagaaagacctggacatggttttagccaaaggttttattttagccttagttaattaaaacatgcaaaagagttccacaaacatattcctcaagagagcacatcaggttggtgataaactctttgttgaggccgggtgtggtggctcacacctataatctcagcactttgggaggccgaggtgggcggatcacgaggtcaggaggttgagaccagcctggccaacatggtgaaaccccatctctacttaaaatacaaaaattagctgggcatggtggtgcgcgcctgtaatcccagctactggggcagctgaaccaggagaatggcttgaacacaggaggtggagtttgcagtgagccaagatcgtgccactgcactccagcctgggtgacggagcaagactccatttcaaaaacaaaaacaaaaacaacaaacaaaaataacctctttgttgcaaggaagaggtaatgagagttttgtccctcaccttcattctcctagctttgggagcacgtttctgtatgctagagctccaccattaaccagtgctagtctcttaaactctgtctcccaccccacccaacccccatccctgtttccacctattcagttcaaatcttgaggaagataatccattcctttttttttttttttttttttttttttttggagacggagtcttgctctgtcacccaggctggagtgcaatgatgcaatctcggctcactgcaacctccgcctcccaggttcaagcaattctctgcctcagcctccagagtagctgggattacaggtgcccgccaccacgcctggctaatttttgtatttttagtagggacagggtttcaccaggttgccaggctggtcttgaactcctgacttcgtgatccagcctcattggcctcccaaagtgctgggattacaggcatgagctaccgcacctggtcccattccaattttaacagtgcctgctaagggtaaagtttttgctctaggctcttggaatgcagtggtgagcaaaaaattcaccaagtccctgcttttatgggatttgcagtctagtgggggagacagatggtaatcaaataaatgtataatttgaaaattggataagtctgaaggaaaggtatgtcgtgtgatgagaatattgatgaagtggggacccgtctcatgagggagagggtttgtgtaaggaggacttccttgaggagg

SEQ ID NO: 2451 - DNA, 4001 bp, Homo sapiens
agcctcccaagtagctgtgactacaggcatgcagcaccacactcagctaattctgaaaacatttttttgtagagatggggtctcactatgttgccctggctggtctcaatggtcttgaactcctggactcaagtgatccttctgccttggcttttttctttgttaactaagaaaaaaaggaggcagggcagaggggtaaggagttggtaagccaggtagataaatatgtaagtacgcacaacacttcttaacttgtagtatggtctgatctataggggctcttcccagggcacttccgtctttcactggaaaagcctcctttccagaaatagcacctaaaaccaatttcttttggctttcttactgaaattattttttattctattgcaattatttttattctacttcctgacgttgcaaaagtctatccgtatagtattttcttcaaaattttccccaatcctgtacttggtatatattgtgtaaatatttatttatatcacccccatttgcctgaagtgctctgctgccccgggaagtgctgaggatcaccacttatcccagaagagcagctcttagggcagactgctctcagaagcacatttatccgcactctggcagggaacctcccaaccatcccacggttccaactcaattcaacggttaccggctacatacaatgcctgacacaaggaagatgccaggaatagaaaaatgaaccaagtatagtgcctgtcctccaggagacagcagatgccaacacaactacctgcaatacaaactctcatatacccttgagggagtcctagccagatcacacaactgtctctgttcagaggccaaaagcagccttgaattccacctccgaccctttctgacaagactcctccagtcccaccaacctgagaataacaaaaacctgctcctcaattttagtaaatattaagcactattccttataaaacactgtacaaagtacaagcatattcattttactttttaaattaaaatttttaaaaggcacggtcttgctcggttgcccaggttggagtgcacgatcctacctcaatgcagcctggaactcctgggctcaagagatcctcccaaccttagcttcccgagtagcagggactacaggtgcgcgccaccatgcctggcttttacaagcacattagttttcacctcacaataatccagtacgacagatactctaactacatcctctttttcagaggaggaactgagattcaaagatgcagataacatcaccaagttagtaatagaacagagatccgactgactcccgggttgacatccttaaccactatgctaaccggcctcctcaaaccctccaggacacgatgcgacaggttggggaagtcactcctttcttttaggcatggatcggaggagaaggacactggagaagtttccatttccatacgaagaatttcagggtcaactgcatctaaactgctcgcaagacagaccctcccccgtccagcatcagacgacctgcagagaggccaccagaaccagctacagggcacggcccccgagggtgggaccccaaggcctagcccctcccatggcctcccgcggacaaagtggccatcgctgccgctggcacttctccagtgtggccgagccccccacgcctgggcaccattcaccgtggaagtagtcggcgccgcgacccccggctggacgacgcggaggacacccaatgacagggaagctggggccccacggccgcgcctgcccctccccacgctagaagggctcgcggggcggaggtcccaggagttgccagggccaagcggtccgaaggaggatgactgagtgggggcaaccctgcccgctaaccccaatctccagccagcctcccgggtgctaggaatcctccccaaaccaacgaaagcggcagcgccaacccgcttcttcgcgctcaccttccagcgggttccagcagcgcagccacggagcaccgcgcaccgacacgcccccctttcattcacctggcgccctccgatgagaggcggggcggctggccaatcgcgggagcgcctggcctcgggaaggcgggcccttcggccagcagggtggtcaatggcgctggtgcccctcggaggatgcgctctgaaggcgctggtgctcgcagggtgatgggagttgtggtctcagcgctggcttttcgggtaaagatagagtggacaaaactacaagtaccaagatgccaaaaggggcgaggaccagtgctagcgaaaggctgcagctcggttcggtcttttgagtcccacttgagggacctgccaagtaccggtctctttgtctggagagcgaaaagcacgtcgtgggtattaatgcagtccagggaataagagctttgactcatcagtccgcacatatttcacctactggcgctttccgcaaaaatctggaaataagggaaatggtttaatcgattcaacaggtttttattgcatacccgcggtttctttcactgggtagtcgttacaaaagataaaagattcagctcttcccttgacaggctctccggttcatacatactagtgaaacggttaaatggcagtactaggtgctaagtgaccgtacaggcgtgttcttgtcagctgtgagcaagacaaggcagcttaccgctctcagggagcttagttctcatgggggtgtattcgtttgctagggctgctgtacctaagtatcaccaacccggtggcgtcaataacagatcttattgtctgacaatcctgggggcatctgaaagcaagatgttggcagggttctttccttctgagcgctgtgaggaaacggtctcttccaggcttctctcctgggcttgcatatggccatcttcatgttcacagggcatattccctgtatatgtctccatgtcaaaatgtctccttttggttgcagtgagtcgagatcgcgccactgcactccagcctggggcgacagagagagactccgtctccaaaaaaaaagtatttttataaggataccagtcatattggattaggggttcactctatgccagtatgactttttttttttttttttttttttttttgagacggagtctcagactctgttgcccaggctggagtggtggcgggtggatcacctgaggtcaggagtccgagaccagcctggccaacatggtgaaaccccatctctactaaaaatacaaaaattagccgggcgtgggccagtaatcccagctacttgggaggctgaggcaggagaatgcttgaaccaaagagattgcagtgagtggagatctggccactgcactccagcctgggcagcagagcaagactctgtctcaaaaaaaaaaaaaaaaaaaaaaaaggctacccccttcgctgagagaccctaatgaggagtagtgagccatgctaagataaaacagaaaaccggttggtacatatctaagaaacaggagaatgccattgggttgaggaagtggatggcaggtagaccagcttaatggacgtgcaacccacgcagtggcacaggcccgcacactcagaaagggctggtgcttccaggtgaggttttatacttaacaaaacaaaacaaaaaaagagccaggtgcggtggcttacacctgtaatcccagcactttgggaggctgaggcgggcggatcacttgagaccagcctggccaacatggcaaaacccagtgtctactaaaaatacaaaaattagctgggcatggtgacacatacctgtaatcccagctactcgggaggctgaggcatgagaatcacttgaacatggaaagtggaggttgcagtgagctgagattgtgccactgcactgtttcaaggaggaggaggacgaggaggaggagagagggaagagggaagaagaagaagaggaagaggaaggagaggaaggagaaggaggaggaggagaagaagaagaagaagaaagatttaattactaacaaaaagaaaatctaaataaatatttta

SEQ ID NO: 2452 - DNA, 4001 bp, Homo sapiens
atgggggctgccagagttacttttcactgcctatgttacactttctgaatttcaaatcaatatatatgacctattaaaaataatttttttttgagatggagtctggctctgtcgcccaggctggagtgcagtggtgcaatctcggctcactgcaacctccgcctcccaggttcaagcgattctcctgcctcagccgcccaagcagctgggattacaggcacccaccaccatgcctagctaatttttgtatttttagtagagatggggtttcaccatgttggccaggccaggctgatctcaagctcctgacctcaggtgatccacccgcctcaacctcccaaagtgctgggattacaggcgtgagccacagcaccaggcctttttttttttttttttttttttgagacagtctcactctgttgcccaggctggagtgcagtggtgtgatctcggctcactgcagcctccaccctcctgggttcaagcaattctcctgcctcagcctcccgagtagctgggattacaggcgcccaccatcatgcgcagctaatttttgtatttttagtagagacggggtttcaccatgttggccaggctggtctggaactcctgacctcaggtgatccacccacgtcagtctcgcaaagtgctgggattataagtgtgagccaccgcaaacggcctataatattttaaaattgtttttaagtgagagaaggggatatgctaggaggtatgccagctccagaaagcacattgcctagaatactatggtaaataagtagattttacagagaggacaatgagaaattaatgaaagattttaagcagataaataaaagtcagatttgtgctccccaaaccacagctacctttagggatgacagcttaacgtttaatatagaatttaagagacaaagataggttatgtgatttgcctaaagtcactaagcgaataaatggcaaaaccagctgggcactgcagcgcgggctatgatcgctccattgcactccagcctggacgacagagcgagaccccatctctaaaaacacacacacacacacacacacacacacacacacatttttttttttttttgagacagagtttcgctcgttgcccaggctggagtgcaatggggcgatctcggctcaccgcaacctccgcctcccgggttcaagcgattctcctgcctcagtctcccgagtagctgggattacagacatgctccaccacgcccagctaattttgtatttttagtagagacggggtttttccatgttggtcaggctgatctcgaacttccgacctcaggtgatccgcccgcctcggcctcccaaagtgctgggatcacaggcctcagccaccgagcccggcctaaaataatcatttttaaaaatcacaatcataaatggcaaaaccaggttttttgctaatatgatcgaggtgaaacatcaagttagaaatcccctaattagctttccgagtcctctaacctcgcacactctaatctcaccgttgggaaatacatgggggtaacaaccctgcaaacgcctgaaaatatggttatctttagaatttacgaagataaatgtgattaggcacatgtggaagaagttcaagagactgtaaatgagggaggccaggtttcgcgactattaaaccaggtggctttttccttcagcatccccaggagaagtacgaacgcgactacaacagccggcacaaatgggatcatgcctgaagtacccatggggcacagtagaaagagcagcaggaagccgcgggtaaggagaggggatgcctgtgtgcttacatgtaaagagagaagtaagccacctactcacactcgtacttcctattgactggcggatacttggccttgatcgccttctgttcttcagtcaaattgtaatctctaacatcttcctcttcctgcgccatgactgcaggattagacactctacttccgcccttcatccaccggacttcggcccggagttactacttccgctctagactccgccccttggcgcacacccttaaaggaccacactcctttctcggagttggctgttgacctactttagtccctaccctgccgcttggatcgcatatttaaaaagccaaaaccccatcttctgcgattccttcattactagttctttccaaagactaaggaaaaacgttgaagggcaccttgaatgaaacccgtctgggtctgactggcgaggttctttcccccgcttcacccccaaaattgataactagacccgaaggcattctagatttttcatctcagtactctgaaagggtcgtaagcttaatagccttcaagaaaatggctgccctcttgccgcgggagtgtgcggaccaaacctctctcacgtgaccctgaccgggcgcagtcccgtcaacgccggcgcgcgcaatcgctggaagtcggctcggggaggcgtggggggaggggcggagcgcgcgcctcggtccccgcggaaagctactccgcgcgtctggattggtcgcgaacgcggcttccccgcccatcccgccattaggagcgctcccattggctgatgttggcgcgaaggtgcgcgagtcagccctcgcgctgggggcgcaggaaacaatagaggccgcgcgcacagagcgagctcttgcagcctccccgcccctcccgcaacgctcgaccccaggattcccccggctcgcctgcccgccatggccgacaaggaaggtgagggtgccggggccgacccaggagggcagtgggtgcctgggctgagccgcggcctcgacatggcctaacagtgagggcaggcccgagtttgccgagtgcagtccccggtactgaaggcgtgaagagggaactccccgcggggcgtgctaacggctcgccagttccctgggaccgatttcggtcgcagctggcgaagccagcggtggggcccccggccagtgtttgtttctcttcctgcctccgatatcggtttctcggcctctgtcccgagcgtggggacaccgcttcctacccacaaggctcggagctcgggcctcctcgtcgggcttgtgagtttcggcgcgcacgagcgtgctccgaaggcctggctggccccttggcctggaacgggtaacggagtgtttggcggggatggcccgaggagtttcggcgccgcgaaagtggagagtgtggatgcctctgccgtggggatttagacaaatcacctccatttcatggttaggctgtaggagtcatgcaggtggctttgcagaggattactcggtttccgtttgtttgctaacttaaatttgtttttaaaaattttagcagccttcgacgacgcagtggaagaacgagtgatcaacgaggaatacaaaatatggaaaaagaacaccccttttctttatgatttggtgatgacccatgctctggagtggcccagcctaactgcccagtggcttccagatgtaaccaggtgacatgactctcccgaacgttattttgatgtattttcagtgtagatttctcatattgattttcttttttccgctcttcagtcacccggagaaggcatgtgatcaaaacctcttggtgacattttttctaggccacaaagtaaggcaaaataacaaaatgattttgtaacttacctgacaagagaaaacatattggcgtttttttctcaatactgaattaaatagctgtagctgatgataatacctgtaataatagtggctgtaccaaataatagtacaaaacttgtcaactttcaaaaagtattatggccaggagcagtggctcacacttggaatccgagcactttgggaggcccaggcaggagacttacttgaggccaggagttggagaccagccctgggaataccctcgtctctactgccccccacacaaaaaaagaaaaaagtattacaatgagtctagtccttacaacaaaaattttttgtttttctttttgagacggtgtctcactctgttgtccag

SEQ ID NO: 2453 - DNA, 4001 bp, Homo sapiens
ttaataggaacacatcccagaatcccagaatcactaaaagtgttgcatcttctgccaggagagagtgaagaaactggtacacttagagtacatacactcattctctttatgtctccacaattcgtaccagaatctgttagtgggtttattactcaagcagaaatacagctgttcctctctacttgcattaccttttctccagtttctatggggaatcaaattcccactggaccaataacttccaagccaggttatttttggaggaaaactgacagcaatggagaacattcccgaactctttcttagagggctttaaggtcccttccaattttctaagttctgaattcaaatagtccagtgtcctcatgttacagaagtaagaactgagtccccctttcccagagtcacagagttggttagtagcagctagaagccaggtcttccaaatcccagatccatgttcttcctgcttcatcaagaactatatctacttgaaatgccttcaccttgtaaaatacatatttttatgatgcctcatgatagcgacatcaatttcccttaattctgaaattaactattttcaggaaatctcatttaaacaaaaacatagtgcatcattcaacattcatcatttaggactgtgatttgccaatacaacccaaaaagtcaattctggaaagccaacacagactccgcatactggtcacagcaaatgctagttgagccctttcagttctaactaaaagtaatacaaccttttaaaatgtgagtggctggaaaaaaatgctttgagaaaaaaattttaaaacaaggttaaatgctgcattttcaaagtactgtttgtattaagagttaattcaagtttagttttcagatatttttagacttgagaagcttttacagcctgtaagtaactcacaagttgtacgctatagagatagcaaaaagtgaaatatgaactttaaaccacttccatttttcgattgatccctccccttcccccaatacctacatacatttaccctaaaaagcatcgctatctctagttccacagcctctttctcaaggtccagaaccaaggcctggaagatgtcaacaatataggccttccccataggaatccgcaccgattatgggagtttaggggtgttcttcattacggtttcaccagtcctacaaggagaacggaagtgtccctgttgctcttgactccgacgctgagggccaggggtgggagtgtaatgagagtggggaatgggtgtaggataccggaataaggtcggtggctttctgtatgtggagtttgagacaagctccaaagtaccgggaccctggagaggaatgagagtaggtaaattcagcgcccggcactcagtctgattgatttaggcagtgagggtccgctcaactagagaaactgttgccccgaagaaagcaatctagtgtcagttctctcttcgggattcgggggaacagtcggttttcggggctgctccgggctcctcgagattagcgaacaccggatgtgggggaggggaggaaggttggctgggaaaggagcaggcgccgtgggggtggggtgaacggggtgggggtggggaggatgggaaaagtgagcgggagcctggggctcccagccagccccggcgagggccgcgaccgggaggtgggggggaggggtcgttacggcgaagctgaaggatccgctctgacttcccgggataggccgcgacccaggggcgaggggaggccgctgccactcccctcgccctctcccccacctccccggccccaagccacccgggaatcaaaaaaacgggtctagttaccagagaacagaaactttaccgaaccgatgacactatccccgactcccgcttgctgccacgtctttcttcttgcttggccgctgccgtccgtcgtcctcccagcagcagcagcactagcagaaaaccaagactgccagcgtcaaagatggcgcctggctacaggctccgctctaaggcccggccggtaaaagtgccagcacgacgcagggcgcgaggattctggaagatgtagttcctctatgaggcgatgcctaagatggctgctccgggtcacagggtcacgtgacgggggaggcgctgggtcggggagtcccttcccttcagaggaatgcctcgaagccggctttcataacgttttgtttttgtttttaaatcaaatgaggtaataagcgggagggccgcaggaactgagactgccattcagtaagcgctcaatttattcttaccaaagtgtttgcttaatgagtaaatctcccaaaccatgtatacatttaatttagaaataaactgtacttttcctaagcatgcaatgtagaatgatttgttagtttattttttacttgaagaagtgagattgggctttgggggggtgtttctttgatttcttaaagcaaatttgtgtattggaaaagtaattcatgctcgtgacaaaattcaggagagttagttggaggtcgcaatcagcagtctcatccctgcttcattattaacattgtcccttattttcccttttgaatgtttttactttttcccccggttataaaagtaatacacgtggccggtgcggtggctcacgactgtaattccagcactttgggaggcctcggcaggcggatcacaaggtcaagagatcgagaccatcctggtcaacatggtgaaacctcatctttaccaaaaatacaaaaattagctaggcgtggtggcacgcgcctgtagtcccaactactcgagaggctgaggcaggagaatcgcttgaatctgggaggcagaggttgcattgagctgacatcgcaccactgcactccaacctggcgacagagtaagactccatctcaaaaaaaaaaaaaaaaaaaaaaagtaaaaaacttaatacacgtaagtttttttagaaacaatacagaaatatagagagtagaaagttaaaatctctattaatctcattcttgagaaatagctctcattaacttaccatatatcctttctggcttttacactgaaaatatacttaaatatattacacatataataggagcccaaggtccccctggggtagtggctcagcagaactctaattaggtggcaacattttacctaacttgggtaaaggatatagttgtgctactaagaaaggaaacacttgatgataaagcagatgggacttcaggcaccttttatttcctcgtgtgcttgttcttccagctgccgggttggtgatgtgcgagtcccaggcagcccaagactaggaatttatcagagcagaggggtcctgagcctcctcatatctgggcttttatctcctttcaaagtaagaaccacaactttagaatcttagctccaatctctgccttacgtgacagtgctctggcattgccatgtcaacagacctaataagcaagttcctggtagccaatttctttttttctttctttttctttttcttttgttttggtcttcatttttttggtctgtgtgactcttactggtaaccaatttctgtctgtgccacgacacctagggtttttaaaatttaccagagggctctccacatagcttaagggttttccaacctaggactctccaagatgcagtcctggcctgactagtgtgctatatagagtttatagttatatttcagtaaacctaaagtatcattgattgtaagatacacttttattttacaagcctctaagtggaagaaaaaaaccaacaactgccaattaaactgacaggccggccgggcagggtggctcacacctctaatcccagcactttgggaggttgtggcgggcgaaccacaaggtcaggagttcgagactagcctggccaacatggtgaaatcctgcctctactaaaaatacaaaaattagcccagcacagtggcacgcatctgtaatcccagctacttggaggctgaggcaagagaattgcttgatcctgggaggtggaggttgc

SEQ ID NO: 2454 - DNA, 4001 bp, Homo sapiens
ctgcccacaacccatgtaaagctggacccagccttgaggtcactcttggacacagtcactggacctgttttcgtgggagcccaggtctgagacaagaaggcctcagaagcccagcccctgaaataacaacaacaactgctactaccactgcctactaccactactatggttcctgaacgcttgctcctctccgggatccgcacactccctcctcacaacacccacctgagatcaggttccgaggggtgagtgagcagctgcccacgggctggtcccctttacagccctgcctcacattacaggagaggagtggagacacagtgctggcctcagggagggacccacagcataaggtaagctctgcggacagagggacctgggctggaaccctgcctctgtcacttaccagtagcgcgaccctagcctcataaaaggctttccctccctctagaccagtccctaagaaggaagtcacttcttccagcccaccagagctgcagagacagtcatccttccatgtgtcctggccacaggagagatgcgaacctcatgtgtcctggccacagaagtgacacttacctcatggccacgttgctcccatcgatgaccactggtctcaggtcgctgccctccttttcctcttctgggagtggaggctccaggttgggagccttaggggtgccaccaccccgcgggactagagggagctgagggcaggggtccggtgaggtctggcgctcccgctcggtggctgtcccgtgtttcaccagctcacccagcaccgtgttggtgtctgcctggacgcccagcttctgcaggacgctgtggatctccgtggatgaatagcccagcttccggaagaagtccaccttcatctgcagttccagggccgaggcctcctcagcggccagctcttgacccggccttggggtgccctgacggctgtggctgtcctcaaattcccacagactcatggtggggctggcttccaggacaggcttctctccacaggggccactcatagctcagactcctggaaggccccgcgccacagctcctactgaacaaccaacagggttagggacggtgaatagcgctctctcctaacctccctcccaaaaccacatccagcaggatgagggattggtggcactacacactgcatcgtgttattagttcaggttgtcctctcaaaagctctcccagctaggcattcccattcccattctataaagggagaaactgaggcacagacattaaaaacgtgctcaaggtcatccagctgttagctggtggctcgaagatcggaacttagtctgaactaagactggaactaccccagctgtaaagcctcgaacccccacgccaacccaggggacccagaaggcagggacggggctctcagatggaatcctggggctggaagtgcgttgcggggcccaaggcttccccactgaggccaccactttcgcccacccgtccggcactcagagctcaggcccaggcagcgcaaggcccatggccggactcccggagccggggagggcaagtttctggggtgacccgtggggagaaaagttgctggaaaactttggttggctgccgggagctggtgacgccgaggctgtcccggcccgagacccgcgcttgctcggcccgcgatcccgatcaggaacctggtgctcttccccggctctcccaacttgggcaaagttggaggggtcctgaggcccggcgggccggggaacaggaccccgacccttccgtcccctcccctctccacccctcccgtcccctcccgtcccctcccctcggctcggctcggaccccgccggagcgctccctgccgcttccccgccgaggcccgcaccctccccgccgcgcctcaccccgccatgcgccagcggcggccggcggcgtctccatggggccgagtcctgggggtaaggacggcggcgcctttatatggggcggcgcgcgggcaggtggtggtgaggcactgacgcggaagcgggcaaggggcggggccgtcccgggagaccgccccgggggcggggctgcctcgccccttcctgctccgctcctcgcgtcgcggccccgcccccgcggccgctgcgcgccggacggggcccaagcgggggtcggagcctcaaggctgcggcggcgacgagctccgagcgggacactgaacggcccgtatgcgcaagataagcacggactgaatcaggtacacgcacctgccggggacgcactgaccgaggtgcggacggcggtaccaggacaggtaaagccgcgaacactcggacctaagaacttgacaggtacaccctgcctgatgaagctacgtacggccaggtgcgcatcgagtgaatcaggtacgcggaggttggtccacgcaccttggaggcaggtccatggttatagacaggtacatccagacaggcacttttcagatggagtcaggccccctcaagacacactgtgcttaaagccgtcacacagaggttggccacccccggggccaggtacacttttcctgaaatctgtactttactaggaccaaaaggcaggttcagtcagcagatgcacaatgaccgaggcagaaaaccaggcaaaagagggccatttaccccaatcaccacatgaatactgtccacacaagaatactgtcacccataccgcagaactcactgagcgcccccactggaggagcacccttgctccatgaagatgcttttagtttcccaggtcagacctgatccctcgcatgagcacagcactttacaggcttacactcacgggcttacagacagaggtcattatgctgatgttacccttgagaaattctgcaaaggctaaactgccccagctggaaagactcgaaccaggatggagagctcctattctagtgctcctattatttgccatttttgtgaaccacgagtgactgagggcagaggggagcctggcttcctatgtgtgtgtgtgtgtgtgcgtgcgtgtgtgtgagtgagagagagagagagaaaacacagagcccacacgctggaggacagagccacatgccaccagtgcttactatgtgccagtcctttgttacattctctctacctcatcataggcatgtatcctataagtgctagtgttataataaatacttgtttattgtaaaagacaccatagacacaactgtacatgtacagcttaaagaataatagtaataataaaaaagccatgtatccatcacctaacttaaaaaatagaccagtgccagtaccttgaggccctctgggtgcccccatcacagcctcctgcccacatcctgaagaactagtttcctgaactttaattgtgctagtcattctcttgctttttcttgtagttttaccacctctgtatgcatccctaagtgggatattgtatagttttgctattttttactttgtgtaaacggagtcattccataattatgtgacttcctttttcatacagcattatatttttaaaaatccattttgattgcctgcatacctgtaatttattttactactgaatagtgtcccattttatgaatataccactggttacttattcagtcacctgctgttggatgttgtttctaggattttttttctattacaaagactgtgctttggatattcttgtatgtatcttaatgaaattgtacagtggaggaaatggatgttcagagattcagaaaggtgaagtcacctgctcaggctctgggggctggtggagctggaactcatgtagctctctccaaggcagtccatctccccatccacacctgcttgttcgggaggccaccaaagaccccagggaggcaggcgtgtacgtctctatctggaccctgaggctgttcctctgggcttgcttgctcttacctagcggtgttcctgctttgttgcctggtcatctttgaagaccccaaagtgtccccttctctgctccccaggcacagcagctccaggggcttggca

SEQ ID NO: 2455 - DNA, 4001 bp, Homo sapiens
atgtagacactgtactgttctagctccagcaactaaaaataaatgtaattttaggtgtcacttagaatttataaacttgaacttatatgcatgacaatatttgttaatttatctgtactaacaacttggcctatgacaatgaaaatactttaaatttcttttctgtatttaaatgtttgctggatttaaaacatcaaatgtcattaactttcacttccatttctgaattattttaagaaaacttcatttttcattttccacactagccaagtgaaaaactgcaagcagcagaaaaatttatctaagagttttaaaagtaagtttcttttgtttatattaaatataaatatttttaaagcataaaacgacttaaaattcttatcttccccaaagtatatggtttctaagaagcaatctttaaaaatttgtttataaaagcaacatagcacactagacactaatgagttatcttaagcacagctttttaagagaatcaatatttcattttaccagttgtgactaatcagtactacgatgcagtgtagtgacatacatgagttctaagcctaaagaaaatttcagcgcgctcgcgcgcgcacacacacacatacacacacacacacaaagtcggcttttctttttaaaccatcccacaattcaacacctctcggtggtattctctgaattatcatatctggctgggattatccaattttattagctaacagttctcattactttaaaaacagaaacaggatatgttctgtttcatcaagtgctacaaacatttcgctgctgtaagactggagggaaaaaatctttggaaataaaaggccatctgatccactcgggctaattactaaatgcatgccaacaatacacaattcgaattgcatttctggacacaatttaagatcacgatagggcaggtcaaatgtgtaaggaactactacttctatcaaaatgaagaagcagatatacggtatctaagatctcacgcaaaattcatctaagacttcgaaatcttctgaaaagaaaatgtgtaatcaacgttgttaatacaacagtaattcatcccattcaagtacgactagaaatcccgctgatgtgcttctttcaggtctaaacatctcattctttcgcaatccagataccaacaggagtctgaaacccttcgcagaggcgtgcaacacactaggagagcgctatctgtttacaaatacgaatctcagttacccacgtcaaaaccgcgcattaccacctttcgactggggggcgggggagagagaaggcgggcgagcaagaaacaaaatccacacagacacctctgccttctccctacaaggacgagcccggggaaacattcagtatgtattatatgcgtgtatacatttatatacattatgtagtcacctatgtctaagcaagggtgaaagaaaaaggtacacatgacagggaatcgtaactggacccaacagaaatgttcaaaccaatcccgttaactcaaaatccgccccgctggtctacaacaggtttcggtccgggaccgggagccccagccacagtgtggagttcgtccccaaagcgccccaatgccctcctcaggccgcccaggccgccgtccccacctcccttatctcagccttcccctgggacacccgaagcccgttccaggaaagaaagaagtgtcaggcccccagggggcggctgagacgctctcaggccaggcccccgacacctgcgaagcgcggcacctggggagggcgaaccgggggccgcccggccttcccgagcacaccccctcggtacccgacgctgccccgcggccggaacctcgtacctgcgaggcccgcgagctacaggcgcgcgcgacgcctcctcatctcagtggctcctgctctccctccgcctcctgctgccgccgccgtcgccgctgccgccgctggaggccgggacacgactagctcaggactccaccgccatgtccgccgcgccgcgaactgcattgtgggggggaagggatggggagggggaggaggagggagagggagagggagagaaagaggaggacccgctgaggggagggggcgagggagagcggttgccgggggagagggggaggggagaggacagagcctgtaatggggtcctggcccgggagaggaggagctacgcgcagagggaagggttcaggggtgccccctcccttcgttcggggggccccacaggcaccgtttacaccggggcgggggaggggggaaacagcactggggggaggggtctcgtggtggccgcgaagaaacaatggggagaaggccgaggtaggaggatcgcgcactcacacccacgcggagggaagggagcgcgcgagagacactcgttagctcgcgaggagggggcgggccgctggcagaggggaggagggagccacccggggctcgcgggcaggggcggggccgccgagcggaggtcgcgaggtcccgcagcccgcctgggcgccgcgggttagccgcgctgattcgcccgcttgccggagtgggtgggggtggcgggcgccccagtgctgccccagtctggttcctagtctctgccgaggcccccgagctggaagccgagcccgagggccgcctcggcgcctcgctcccaaggctgctccccctggggaggaaggccggcctggaatgggtaccctctggcctggcactcggactgggcgtggcccgagcctcggcggaccctcggaagcccaagcgggcttcggagcaacggtagggagcggggcagaggaagccgccagggtcgacccccacccactcaccacggcctccagcccaccgcagctggaccttttttcctttgaaaaggcaggcagttcaggaatgaaggagctcgaagagaaatctctggagcactccatctcccacccccaaaagaggttttagaaatcatttctttagctgcaggcgggcataaaaccatctaccatcaatgggccccctcatccccttgcttttaacgtattacattcctctacataattatttaaagtcacgggcggaacggacttaaggttttgttagttttgttttttgttgtttttttttaagaccccagcctcagagattatttagccaatctctgacctcaaagctggacaaagcacacaacctctgtgctctgtgcccagtcctttgagtttgacacatgctaggcaggaaaaaggtatgaaaagagtggacgtagaggtgaagggaagatgttaaatcttaagtatttacaagatagtgccttataaattttcttataatgtgactcaggctgggactggttagaggtcacagagggacgctccacttcacgatagccctgtgagttacgtactgttgctctcatttacggatgaaaaaactagggttcagagttagtgcattttaccccaatctggctgatgctacaaggcccaggtataatggatagaggactggatttcaagtcaaaagagccctacctggttttggcgtttatcaacatgatgcctttgagcaaatgtaccctcttgagtttcctcatctgcaaattcttaatctgtatccctgcttcgcttgactagcctggaaacaaagaaaaaatccctacttcacccggctgaaagcctaaagcctatagagacactaagaagataccgacatgcccttcaattcagtgatagcagtgtccttagaacaagttcaattgagtaaacatttcctaattacttaagagcaaagcgttgttaggtgcctagggaaacaaagacaaatcattgcttcctgtctccaaaaagttccccattgagcaagcaggtgagctacaataaaagcaacaggtcttattaacaaagggctgggcaaatccagaggagagtgtgataaattccactttggtgagacttccgtggaagaactaaaagctggaccttgaagatctgtctgctgtgtgccagacacatgtctgtgattcag

SEQ ID NO: 2456 - DNA, 4001 bp, Homo sapiens
atttctatcacaaatcattcttttgcttctgagacattcttccagtcctccttcctttcttctgtatctcctgtaggttcacctgttcttcaccattaaatgttggaactagtcaaggttctgacttagctgaccttacccacacctatggctcaattcatgtatatacaaattatgcccaattttatattcccaacacaaatctctcttctgagcacaaagctgtatttcaaactgcctcttggatgtcatgaatgaccccacacaatcaatcaatcaatcaataaaaactgatctcagctgggagcagtggctcaggcctgtaatcccagaattttgggaggctgaggcaggtggatcacttgaggccaggagttggagaccagcctggccaatatggtggaaccccatctccaccaaaaatacaaaaattggccgggcacagtggaggcgcctgtaatcccagctactggggaggctaaggcaggagaattgcttgaacctgggaggtggaggttgcagtgagccaaggttgcaccaccacactccagcctgggcgacagagcaagaacctgtctcaaaaaaaaaaaaaaaacaaaaaaaaactggtctctaatcatcttctagtgttccctatccagcttgagggattccgtgatagtgagtgaatggtaccaccatctattcaactacataagccagaaacctaggagttacctttgattcctctcttcactccctaaaatcaacccatcaccaagtcccacccattttacctcctatatacctctagaatctgtccaattctctgcagttccacccatatctcagtcctcactgacatctctgaccaggattactgcatatcccaagtggtccacatacatcgactagggcttccccaacccccgtctgttcacaccactgagcctgagggatcaagtcccctcctccaccacaccccactgggggaagacggctcagtggtatctcatccgttttaaaataaaagctacaaattcctgcaaggtctgaccgctatcacgtacagcttcatcttgtaccatactcccttcattctctttgtaccagccacactggctctttgtgcttttagtcattttcctcccaagtgcctcagggctctgaacaagtagttctctatggaaggttctgccttcacttcttcacctaattaattacaacacttcctgcagctaccagcgcaggcatcttttcctctgaaaaaccttcctgcttatttcaggcactcatagcatcaggcagcagtaggaggcatttccatgtattagtgaggtcattgtttaacgttttccccaccagagttaaacgccctgagagtagggaccgtgcccggttcacaacatacccccaacgcgctgctaaatgaatatcagcaggacgactgaggcaatgaccacgttcatgggcatgagtctcaaatttctcaacaagactgtgctctggagaaggagtcggacatttccttcatcactgtctctctcaggggggcatacagtaggccctgatcaaaaactgcaaaatcagtggcagaaacaagtcagcctcctcggccaaatggggcaccggaggaggctgggacgcaggcctttctccctgggaatgcccggcacaggactggccacgatgggcgctcttgaagaagggagccgcaggggctgggtcttgccgccagagaccccaaggctccgctcctgccccgaaagggagcccaggctactacttaccacagctggggactcggggcccgcctcccaccccttgctgtcagcaccctcagctgagaagggcaggttcagactgcacaaccgaggcgtcgcctccagactcaggcagccacccaccccgttcttcctcatacgtactaggcgtcagctccaggtccccgagtcgctgcgctgaactaaacgccgaccccagtcagccagcgcgtttccacccacaagacccagcgcgcctagggcggtcgccagctccgtccaccaatcctggtatcgcactctcatgacgtcagaaagatatgcccaataacaagagactatccgagggcggtgcaaatggaaatattgaaagccgattggttcttccaagctggaagttgtggaggaaggactaatttggaaccaattgcgtggcgcctgagagcggcagcgcggtcagtggcggcgctgaagagaccggttgccgccatgatagaacagcagaagcgtaagggcccagagttgccgctggttccagtcaagcggcagcggcatgagttgctgttgggagcggggtctggcccaggagccgggcagcagcaggcgacgccgggagccttgctgcaagcggtaagtgaagaagcaggcggcctttggccctcagctcatcttcctcccctcagagcgctgtatctggtgatccctgaccctttcccgcattgcgggggcagaacgagagtttctacgcagagttaaagcacataaacactgtaaaagctccccatagcctgcgaatgctgcgtacgtgttcccccgtttggcgcccgttttcagcctctcgactgccctgagatagcattagaattagagttgaggaccttgggctcaaaaccctgacccgggtttaagcatcctgactctaacatggatctggcatagaacaaaaattccgaagagtgtgtagaatgaatgaatgagggagggaagaaaaaagggaaatgatttgtgttggctcgttttgggactttgggcaagttgcttttccctttatttctctgcactagtattattaacaactaaatagcagctaacattcattgactcttgtactaaagtgtttcgtatatgaaatttccattgatcttggtagcagcctgttaggaacgttattaacccattttgcagatggaaaaacagacttaccaagtacgtgatagaagcagatttcgaactgagaaaccatgctcctaactacattttttgtaagatagaaatagtgatcacacttctaatgtcctgtttaggctcagacgaggaaatacgagtgtcctcacatctcctcaataaatcctgctggcaccgtcctcaaaataggtctagaattgctacttctaccatctccatcattgcctcatggcctaagccattattatctcatctggcatttttgtagtgggaccctaactggtcttccactttctacctttgtatcagcacctgttaccaagccaataaccaaaggaatccttctaaacatcagatcacattacactctgcagaaaactttctggtggctttgtacttcatccagagtaaaaaccaaaattcttgtaattatttgccctctttccctttacctctctgaccaatttcttattgctcacctggcttcagttactctctcttccaagcctctgcttcaggacctttgcatttgctgtcctctctgtgggattgctcttcacaaatgtttacatggtttactattcagctcctgcgaatatttgcccaaatgtaattttttcagtgaggattttcctgaccaccctattttaaattgcagtaccacatactgtggaacccacattgcttctctctctctctttttttgtttttttgtttttagacaatctctctgtgttgaccactggctcagtacagcctccaccacctgggctcaagtgatcctcctgcctcagcctcctgagtagctgggaccacagacacacaccaccacatctaactaattgtatttttttgtagagacaggatttcactcctgagctcaagcaatccgcacaccttggcctcccaaaatgctgagattacaggcatgagccaccatccccatcccttcttttgctctatagcacatgacaccacatatatagtttgcttgttttctctcaccttcccttctcccttccccctttcccactggaacagcgagctccattgtttattttgttcattgctgtt

SEQ ID NO: 2457 - DNA, 4001 bp, Homo sapiens
aaaaaaaagggcagagtgtgtggttaaagggtaaagggagaagctaatttataggaagtcttcaccttgcttcaaggggaaacccaaagttgcagatacatgatctggcagctagaaagggtacctgggggcgggtgtctctatgatagccttaccatggccacatgcccttgggaagtgttttttgataaagacaacacaagtactaatagcagccaacatagtgtgcttgttactgggctaaaagcttgcatgtgtgacctcatgccaccctcaggacaaccttacggggtgggtactattataaatcccattttactgatgaggaaactggggcactgagggggtgaagtgactgccctgaggtcacgcaattagtgggtggtggagctgggatttgaaccaggtctgttagagttcttaactacactgtataattaagaggaacaaccacaaaggatggggagttgggaggggacagcagggcttatgaagcaagggtgggtgggtgggcgtgtgagtgtgtgtgcaaggaatcacagtgcaggtggctcagaggtgggtggaaaacttctaatacaaatatatgaccctccatccataaaatggagattatgtgtgggccaatcctgggtcaccgggggatatgaagaggacaaaaacctaggggggcaaatatgacctgtcacacgaaagcactccgaagtctttcctgaaaaacaacaaggcaccgcagctgttgctgatgtggaacaggccagagggacgttccagaatgttgagcagggaaagaaagccaggtggtcagcaggggggccaggggcctgggagccggctgggtggaggcgggcgggatctgagggaaggacaggaagctctggagaacctaaggaaggttctggagaaggaaagggggcccgagaggcccaaagattttgagaaaagatgccttggggcctagggtgtgcgtggctgaggggaagcaaaagcggggttggtgtctgagactagagaaaaggaggggaccctggagggacccggagagggcagcgaggatgactaggatgtttatggtgggtgtgcacagccaaaggacacacaagatctagaagtggtcaggaagggatacaagggtcagaaagaacttggggggttggcaagagatggtccagggatgggtgagcaggaggggcctgttcaagaagccctggggcaggttctgagagggcagcgaggatgggggccgtggaggggcatggaggctggtgttcctggcagtggcaggcagacaggtgccagggtggggtcagggagaatggaggggctgggagggtggagggcaccagcgcggatggggtacccaaatggaccaaggaggatggggcatctggcggggatgggggtgcgcaggggccaggggggcagacaagaggcccgaggaggatcccaaaggggcggggaggatgaggaccagggaggcgaaggggaaggcacggagtgcccagcagggattgggaaggtggggtgcgcggcagggggctgggagggggcgccgaggcagcggaactcactcaaagacgaagaagaggccggtggtggtgaggatgagcagcagcgtgagcgcgaagacgccgccgtggccggccagcatgaggcggccgccgcagtagaagcgattgcgacccgggaacacctcccacttgcgccgtgggcggcggccgaggctcccgctcccgctgccgctgccgctgccgctgctgctccagcgcggcggggcgggggcggcgggcggcgcgggcccggggcccggagtcggggacgcggcggggccgggacggcgcgcccccggggaggcgggcagcggggcggccccggggctgatctgctggtactcgcagtccttcatgcagccagccgcgggcctcggctccgcgccccgcgggccggccgggccactccgggaccgggccgagcagcggaggtggcagcggcggcgcgcgcggcgctcgctcgctcactcactggggcggccccgccatcgctccgcccccggcccgccgccaccgcccgccgcggcctcccgccgcagcgccccctccgcctgggcccgggatggcgcttggccggaggcccagctctgacccgcggcggggccccgcaggtccccggccctcccagtctcccttttcccttctgcacaaagagggggccagcagacgcgcactcgagggctctttctgttctgcaagcaagccgtttgttgggcgtccactgtgtaccaggcacggtgccaaacgccgagattcaggtggtggacttcgtgatctacttctggcagtctgtaattccccaggcttcgcccatctctgagggtcgaactgacaggcatttgcagaggcaggcaggcgcggggaggtggggcacacgatttgctttgaaagccaggacctcttctaccttgaagtccagagtgcccactggaggtgtgtggcacaccctctggcctcgttcaccaagttctgtgtcctgggcccaggcccagattttcctaggtagcacataatgtagaggggtcatgcctgagggccccagtgttttttcaggaattctgggagtattcattttctactgctgtgtaacaagttaccacaaatttaaggcttaaaacaaacattatcggccgggcgcggtgtctcacgcctgtaatcccagcactttgggaggccgaggtgggtggatcacaaggtcgagagagaccatcctggccaatatggtgaaaccccgtctctactaaaaataaaaaattagctgggcatggtggcacggcatctatagtcccagctactcgggaggctgaggcaggagaattgcttgaacccaggaggtggaggttgcagtgagccgagattgtgccattgcacccggcctggtgacagagcaagactccgtctcaaaaaaaacaaaaaacaaacgttatctaacaggttccaggtcaggagccagagaacagcttagctgggtcctctgcttagtctcacaaggctgcaatcaggctgcattctcatctggagactcagccagggaagaatccacttgcaagcccatttgggttattggcagaattaacttccttgcgactgtttaactgaagagggcctgggatttttgctgggtgactgtataactgaggagggcctgggatttttgctgggtgtctgctggaggcctctctcaggatccaaaagccacctgcagttcctagagattatcacatttccttgccatgcaggtttctcctacatagccacttagtttcttgaaactgacaatgagggtctctagctccagactatgatgatagagttttatataacttactatatatgtgacagagtggcatcccatcatcattgccatctcctatggttaaaagcaaagcacaggagccatctgcactcaagaaaagggaatcacacaaggcgtaaataccaggaggcaggaatcattgggggtcagcttagggtatgtctgtcacactgtggttactgtaaaacctaaggaaaagtgcaaggaaaaaaagaactggagactaggagaaagtaaaaaaggaagtaaaaatatacaatggggaggagtaggaagccgacaacagtgaccttaaggatcaataattgatatatatgccaaaggctgctcagccgtgcctttggtgccaaaggctctcaatatgatgagccccatcttgagcaaaccacatggtgagcttcctccctttttgctccttggctgtggaacaaagtcacaaaactagacatactggttccagtacagattcctgttgtcccaccttaactgggtcctcttgcaacctgaaaccttttcttttttctcgtcactttacagaaaccaaagcaatcctactggattttcagtttacctcctctctatctcataatttctctttatttgcatctgtcctttcttcttttttagaagatgtg

SEQ ID NO: 2458 - DNA, 4001 bp, Homo sapiens
agctgtccccttcccaaaaaccacaagaatgaacccccagagaccttctctccctccttctctccacttcaatgaagtgtgtacctatcttttcacacacaaatgagatccccttcttccccctccatcagtccattctcaccttctccttcaaacattttagtcacatcctcccacaggggcgccccctccacggccttctttggatgttgcagcttcacccaggtgctggcctcggtaggcagggtgatcaggagctgctgtggcatgatgcctgccttactggacttgtccacttctggtgaggaaattgccagaagctcttgatgagacgcttcacagttgtggggtgttgctcagattccaatcacctgccctcaggactctggtgtgtccctgcagcaccaggacctgggggttcctagagactgatgtgactttaacaattctggaaaacaaactcccctttaaatcaagcactttctttgggaggcagccagttagttaggtttgagttcatgtctccatactctttagaggagcaaaagggaagggaagagggatccagaagcacttgtctccagaactccagaatctgcagaaatatatttaaaactgcaaaatacccaaaagaaaaatatccatgcaggaataaatataatacatgttcctggacgtggctctatctccagttctatacatacatacacaaacatgcaaagatgtacaaacatgcacagaccatgcctcatcttccctccttgtaagctgcatgcatcttctgcctggacacagacggggtttaagagggcaggctttgaaatcagacagcctggcttagaaacctgacacttgcacttaaaagctctatgacacttcaactctcagcttcagtttcttaatctataaaatggagataataattgtattctatagagttgtaatgttggttgagacaatgctaggcatacagtaaacccttaatgaacattgttataaacctgttatcatattgctgaatcatagtattaatttttaaagttatttttagaaaccattaaatctgaatttaaagttcaaaatatctcaactgacagaataatgacatagctgcattttggcatgaacaagcagtgacagccacgtcaccacccacgcagatgcccagcagctggcaagttccttggaaccacactgggaagatgcatcttggtttcagaaatgttaaaattggggaagagggtatgtcttcaaatggtgtaaatttagtataatgaggactactgcagaatagtaataggcaaatttggaaacaactcaaatccatcatctcaaccaaaccctagaatctgagcaggtgctttgaccgtgaccaggtccaaagtatacggcactccaagaacagtcggagctacgtgggaagggagctggcccaactttttgaagtttgttggagaaggatgggtatgtgacttataggcgtgtgtgtgtgtgtgtgtgtgtgtgtgactatatgcagagacaggagctgcgtgtgttctaggaattggagcttgtgagaaatatcccacccctgaatacataaaaagtcttgttaccaaagtgcacgaattttcgaatcttactcgggaaacagttaatggctgagaagcttcatatcgaagatgccccaccctcacagtgctcccagacatgccaccctcggactcaaagactgcacacagactcctactcaccacatcggccttggacccaggtaggaccagagacgggggcgtgggagtgctcactcttgaggttttcagcggtaaagagtgtctctttagagacggactgagtggtaacagatattgttccctcccggccttttatagacagaccacatctccactcaacgcaatcattctccaagaagcgtccagcgttgaggtcggcttccttcggaagcccggaggaccctcggcctccggagtggacgagggtctgctccacattcccatcaagggcccgcccaggcgggtgggctttcccagcagcgcccccaggagcgaggctttgagggccggaatgggagggatgccctgagccggcgtcttgcagaccccggggaggatacacctccctggctgccgctttaacacggggctggcggctgcagccaagcccacccagcctggcctcttaggccgcagccgggtgtctcgcctggcctctgcctccggccgcgccctcccggccgcttgcaccgccggccgctctcgctgcagccctggcggtcccggggcccaccccacgcggtcccgctgcagctgccacaacccgcgcgtcttccggcgggttgtgagccccggccgccggctccgcccacagggggctgccacggagcccgccctctcccgggaagcagcgcgcgccctcgaacccggaagctggaagccgcccgagcgcgcccccgagggccgtccggaaccgtgggtagcggccacccacccacgccgccccccgtttcctcacagcggtccttgggagacctccttcagcctttccggtgaagcgccttccctgtcattcattcattcactcattcattcattcattcattcagttatctattctgagtgtgtaagatctacccccacattcttattggccctgcgtatacagcagttaacaaaacgcagttcctgctttcttggaacttaattacattgaaattaattgacaataacaaatagaaaaataaatagataataccccaggcgattgtgaggaccatgaagaaaaggaaagcagggtggggagatgatgggctaggatatttgtatcaacccactgtagaaaacaacaataaaatttaaaaataaaattctggaatacgtgtgtgtgtgtgtgtgtgtgtatgtgtatatatatatacatatatatataatatataaatttgtttttgagacggagtttcgctcttgttgcccaagctggagtgcagtggcgcgatgttggctcaccgcaacctctgcctcccgggttcaagtgattctcctgcctcagcctccagagtagctgggattacaggcacgcatcaccatgcctgtaattttgtatttttagtagagatggggtttctccatgcctgagcgacaagagcaaaactccatctcaaaaaaaaaaaaaaaagaagaagaagaagaagaccctccttacaataactgggaccccaaagggcaacagcctcagggtgaggatgaattgaaaatggaacagcttaaaaggaatttacagactgcatcaaattgcctgtctcagacattatcttggtttaagactgtctctgactatggtgtcaccagatgcttggcaaaagcaaataggtggaggaaagccttataattgtagggccgacatttttcctacacataagttttcatagacaatgtcaaatacagaattaaagataaccaggtacacaaagaaactagattcttagtgagaaccagcagaaacacaaacattggaaatagacctgcagaaacaactgcttttagaattatttgatgcaaaccgcaaaataatattttcttgggctggacacagtggtttatgtctataatcccagcactttgggaggccaaggcaggtggattgcttgagctcgggagttcaagaccagcctgggcaacatggcaaaaccctgtctctacaaaatatcaaaaattagccaggtatggtggcacagccctgaagtcccagctcttcaagaggctgagatgggaggatcgcttgagcccagcaggttgatgctgcagtaagtcacgatcataccactgcccttcagcctgggtgacagagcaagaccctggcttaaaacatatgtatattttcttgcttacctattagagtttttaggaaaaaaagtaaaataaaatcatattttctttgcctgaagaaataaaaaagataacttggacaattttggcaggtacctaaaaactatacaaagtgat

SEQ ID NO: 2459 - DNA, 4001 bp, Homo sapiens
ttcctcaacttttattctggattttttccaaaccaggagttaatcaaggctcacacattcaaagtggttgttacctctagtctcttttactctagaataagtacttcccctttcttcatgatgttgtctttttaagatacaagaacagtctgactgtatcctcaatgtgaggtttatctcatttctccatcccctgtattttctgtaaaccagcagttcagtctttaaacttaatttaggatcatgttcaacatttttggtaggaataccttgtaggtggtaccaggtgctttatattacagtatctgcaaagtataaaatgcccggctatcccattactgagacatttgattaaaactgtgaccaccacacctcactattggaaaattatgttcattccttgccatttagtaagtaatttgaggggataatactttgatatcatgtgagtatctgttccccattaacctttcaattattttatttacggtaaaagattctatcattctttctacatttatttatttatttatttatttttgagacaaggtcttgctctgtcacccagcctggagtgcagtggcgccatctcagctcactgaaacctcccctttcctagttcaagcgattctcgtgcctcaacctcccgagtagctgggattacaggcatgtgccaccacgcccagctaatttttgtatttttagcagagatggggtttcatcatgttggccaggctggtctcaaactgctgacctcaaactcctggtctcaagcaatccgcccaccttggcttcccaaattgctgggattacaggcatgagccaccacacctggcctctttctaccttcattattggcacgcattttctgtaaaaagctttccctcaccaactgaagaggatctaaaaggcaaggtaaatgcacattcattcccataataacctatttttcaaagtaaggaatcagtgtattaattacctccaatgtttgcaaatgaattcccccccccccacgtctttctctattttaagtgtcaaggtgatcatgtggaattttacttattcaaggtgttaccatcagtttggatacttaagctttcccaaatctgtcgagtgagagacccttaaacctggcctcttttgacacatatccatagtctttaagctcttccttgctttctagcacaagttactccaggctcacctggtacttcccctgctgcttctctttctgacctagccaccaagttcctgtgtgaccctgggcaggcctcccatttgatttacatttccccactgttagaataagaaaaatcaggttaagtccatcctgccccacatggccatgggaaagatgaaaataaataatatacataaccatgacactgaaatactggtcctaggctgaaaagaccaccactacttaggaaaaccccagactaggagccacaatcaacaactccggaaaccctccacccactcgtctccctaagagatgcttccactcaagtgactcattccttctcacactagaggggactgcttttcctccctcccacccatcagtttattcttaccttctgctttaaacatcttagtcacatcctcccacagggccacccgctccgtggccgcctttggatgacgcaacttcacccaggtgctggcctcggtgggcagggtgatcaggagctgctgcagcatgacggcgtccgcactcctttctgaggaccctctgtcttagcccatagggcttgtccacctctgatgaggaaattgctggaagctctgacaggaggcttcccaattgtaccgatctccttaatcgccgactcctactcctcaatgtcctctctcaggaacccagggaacatacagtatcaaaatccgagatctggacttgtgtctatcatcggctctcagggcgtatctcccaacttgagctccatctgtctccttggccagcagctggaggcgccaagtatttactctcagcagcccctgcagatgctgagcagaagacattagaatcagcaaaggactaaggaggctcagtcatagggcagaacgctagaacatatatggatcactgtaaaatgtttccaaaagatacacggagacggtgggcagacacagcccacaaaattcaaagcaccgcgcacatgtcaggaagcacaaagagacgaatacaacccaattctttgtttggggcagtaattatgtgtaaagtagccggggatttggaatcccagctctttcactagtcggctgtagcaaaccgcgaaaccgctagaccccgcctcctcctccccaaatgagaggctaagtcctccccacaaagcaaaacgcccccggccctagcctcccagcctttgtctgagcacgactccggggctgcggagagcaccgcgcgcgacagggtggccgcgggcggaactcgcgcttcccggctcgcccagctccccaagcccgggacagccacccgctcaccctctccccgctgggccggcacgcccccgccttcccaccgctgcagccgggttccggcactgcgcggccaagctcccacgtagcgctgcggcgggcagtcggggcccagtgcgcctgcgcagcggctggctagagcatggttcccagcgtcctcccggggagccgctccgccagcgcagacgcccccaccggtgcgcgccgggttggctgcgttcaggggctcccagtatccgatccctgcgagcatcatcagcctggctcctgcgggaggagatggagcctgcgttcttgggccccagactctgatgaagaacaaccatctttcctccgctgggaaaatgcacgtgaacgttagggtgagcctttgaaacccgtgacaaaagggagccatcggcatcacgttttttggtgaaacgacactggtgtaaaataatccatagcactttccctaaatattatgtacatgccagttatttattctcagcagacagttgaatggattccggtatattgttaaaagaataccacaacagttttctcttctagtattcaataaaagttctcatgtttattgcttaccttgtatttctgaaatgccagaaaatacacaaaaacaaaaaaattattgcctgtaatttcagcaagcagcggtaaccttgctaacagttggtgtacaacctttcctgcacacacacaacgtatttcatgcattgttatatattttccacaaaagcgattatactgtaatgctgttttattgctgagttttctccctccaacaaaatttgagtacatcactccaaatacatttctacatcaacagtttacaaaaacaacaaatgaggaaatagaatacaattatagtacttgctagctgttatgaaccgaatgtttggattccccaaaatttatcttgaagccctaacctccattgtatttggagagtatttagagataaggcctttatggaagtaattaaggttagaatatagtcctagtcagaaacgaacccaactcgaccttacttggggcttctagtctccacactgagaaaataaatttccggttttttgtttgtttgtttgtttgtttttttgagatggagtctcgcactgtccgcagggctggactgcagtggcgtgacctcggttcactgcaaccttcgcctcctggcttaaagcgattctcctgcctcagcctcccaagtggctaggattacaggcgcccgccacgacgcccagctaattttttgtatttttagtacagacggggttccactatgttggccaggctggtctcaaactcctgacctcggtgtctgcccgcctcggcctcccaaagtgctgggattacaggcatgagccactgcgcccggccagatatccgtggtttaagccacccagtcaatggtattttgttacagcagcccaagctgatgaatacactagcatataatagttacagaatatgaggctctgtcctaagtgcctttcatattttaacttattttg

SEQ ID NO: 2460 - DNA, 4001 bp, Homo sapiens
ccgcctcggagaggggcatcttgcttacgttgcccaagcaggactggaactcctaggatcaaggggtcctccccattcagcctccctagtaggcctagccatcacactttgcctgaattagacttttaaaaatcgagattaacctacccaaataactggtaatgaagccaatttttaaaagaaatacttaaaatctgacaaaaacaatgcaaggctacagcatctaacacagtaggtcttcaaaaacgtgtaccatgccaaactttctccctagatggagaccccatgctgcatagaaggttaagtcagggatcttttaggtagttacccatattcttctgttttaattgatgaattcaacatggttccaatgtaatttagtaaaatatttttacaggtcttatacaaatgacaatgtaaaatggaacagtcagataattttaaacctaatatacagaaataataattttaaaaatcactgtcagtacgagcccattataaacctgtactgtttacaatctgtgagattatgggtgatttctcctattattaaatatttattaagagccaacatggtacctttctataattcccaagttttctacaataagcatattttttcatgattataaaagttttgcaagtacctataagtcttataactttcacatacataacaggaaaacaagaataacctgtaatcacatttctcacaaaacataaatatctgacttacggtatcaaactgtaatcagtagcattttcaacattaatatcagaacaaatcattttatttctaaaatttagcatgtatcccatttccttcaggtatttattagggtagctggcacttaaagaggacttaaaatccttttgccaactattctctggatctctttaagtggaacatttttgtaccgaacactgaagcataaaaatatttcttctggcggggtgtggggggcagacctttgtaaaagacgtttttataactgtgagtgtttatctacaaaacttagcatcgcaaagatgcgatggggctttctccaaggcagaccacgcttagaggcaagatataatataaagaggcaggaatgagcaaccggcaggtgatgaaatttcacctcaaataagacgcaaaaggttgttctcgagcaagccagatccatgaatgacactccaggagtagcaggggctctcttggtcccgcactctctgcacccccaattctcaccctggccttcctctcctccccctttccccgccacaaccgggattctgagggactcggtatgggacgcgtggaagccaaagcttgtttgcaaacaggcgtcatctgcctccctccgggatgtacgtgcagggcccgggctaagaggctgcgctcggcccgggcccatgcaaacccgaaaggcggccgtgctcctgccggcccccagctccacacacccggccgcgccggaaccgaggccggagcgagggcttcccaacggcgcggggcctaatcgccccccacggccttcagcctcccgggggacgcggggagaaagggctgaggccccaggaccgcagggtgggggaggcgaccgcagtggcaggacgccccgtccgcccggcccgcggtctgccgccagggcccccacaggcggcgggaggccggcgagccccggaccacgccgcgccacactcacctcgagcagcggccgcctccgcttcagcatggccacgggggtcgtccctgagccgaaagcctcctccggagggcaccggcgcggccccaggcgccgccgcgaaacctcccactcctgtaggagctgcggtagccgcagctgcggctgctactgctgctaaggcccggcacccgcccagccgcatcggcgcccgggccgcggcagccacgcggatcccggaggagcgccgccgagccgggccgggggcgcaaggctgcggcgggacgaccgaggtgcggcaggcggggatcctcagcgaagcctccagcgtcgggtggccgctcctgccgccggcgccgctgggccacagcgccccctggaccccacgtccggctacggcgtcgggactgcggcggccgcgctgggcacgagccgcagggaacgctaaggagcgcggcctgggggcggcgagggccccgtgctccctgcgtagcccgcggcccgcggccggcccgggactccgcttcccgggaaccggaagcccctcagttcccaccaacccctggcgttccccgcccccgccagacccgagcaccttttcgttctctcccgaagatacgtgaacgttcttgtcactcggacccgcacctgagagcaggaatataagggaatctccgtttgactctcacggtttcgggggtggcagggagacccccttctaattcctttaatgcgtctggatgaaagaagagtgacccagaacaaacctttttttcaaacatacacactcgtctcccaaaacagacgaaggaattgtctttgaccttaacttgtttttttatctactgtgtagatcattaagaaattttctacagatatcaaccaaacccttaacacctaaaccaccacccccacaaaacaaaaatgaaaaaaaaatacatacatatatatatatgccaagccagagaagagaatagccaacgggttgtcctgaaattcataaacaacttaaaggtaagcaaagaatcacccatcttttactaacatcctctccctcccaacctcttctctcccacctttccacccctcatcccaggcaaatcctagtaaggctctgaaggaaggaaattattacacagtgggggctatggaatcattctgtttacagatgccccatatttgatcccagtcagcctctagggtgcaaacatcagaaccaaaaacaaacacgactgtcagaggggaagtagggaaagaaaattctccaaatcctctgatccctaaattttccaaatacacttttttaacagagtggtatactagaatgtgtagtgattttggtgtcagacacataccaacactaccagttccagttctgtcatgtatatatagctttatgaccctggggaagttatgtaacatttttgaacttcagttttctcctgcctgccttgctggttgttgaagattggagataaagagactggcccatagaagatacttaataaatgttagttacaatttttattggttccagttctttttcttaggctcaattttgtactcctctgtttttgtttctcattctctctctctctctctctctctctgtgtgtgtgtatgtgtgtgtgtatgtgtgtgtgtaactgtatttctgtcaaaagatagatgctccattcttcatcctccctagtctgggtgaaatttccctaaatttcactaatgggtttatgtaacacccctccatggaagaatagagcctcatacactggatcctatgacattctgttgcacagcagatagcagcatgcaaccagtattttttatgtataaaaaatgttataaggcaatctcaccttaccttaggttatggcctaatgatgataaataatagaaactacaaaaggtctccaggaatcattcatttaataattgagcagccaccatggagaagatgtcacctagtagctctcttaatgaaagctgttcctgcataatcctaagtgtgcctttgccacatactcctgagtcacaaaaaaatcactatgccctttctataacaagagaaactggggctcaaagggaaaccatgattcatcctcgcagtgattctatgagttaggtcctatgctaccattttacatgtgaaatatatccaacctaaggaagagctggaagtagaccctgagattcccttcagtccccaacctgatgccccaacagtcctttcaacaatattaacaaaatgctgtaagggtcatttgttgctaaaaaatgtttagtcaagggaaaagggcccttcaactgattgagatcattagcgctgtaacc

SEQ ID NO: 2461 - DNA, 4001 bp, Homo sapiens
aagatcaactatctcattatactaaattataaaaggtaagggtaatttcagtccaggaaatgtaatacagagaatggataccaaacaaaataatgggccactacaacatgctttccctatatattgttgtgtgccaataaaagctgaggggagatcgagcacggtggctcatgcctgtaatcccagccctttgggaggtggaggcggcaagatgacttgagtccaggaactccagaccaccccgggcaacatctctacaaaaaaatcaaacaattagccaggcacagtgatccgcacctgtggtcctagcaactcagaaggctgaggtggaggtggaggggtcgtttgagcccacgagttcgaggctgccttgagctatgatgatgctactgtgctccagtctgggtggcagagtgagcccctgtctctaaatacaataaatattctatcctggccaagatggtgaaaccccgtctctactaaaaatactaaaattagctgggcgtggtggcacgtgcctgtaatcctagctactcgggatgctgaggcaggagaatcatttgaacatccctccctctgcgcgctgctggcagtgtcacagacacactcttccccttgcagactctccctcgtccctcctagtttcttgcagtgagccgagataacgccactgtactccagcctggtgacagagctagactctaaaattaaataaataaataaagattaaaaataaataaataaaagttcagatctctaaaccatggttatctcaggtaaattgttaactttcactttttattttaccattttaatatttaaactaaaataatgttgattttatgaaaaacgagaaatatatttcatttaatttcatttatttatttattttgagattgagtttcactcttgtcgcccaggctggagtgcagtggcacaatctcagctcactgcaacctccgcctactgggttcaaatgattctcctgcctcagcctcccaagtagctgggactacaggtgcgcgccaccacacccggctaatttttctatttttagtagagacgggttttcgccacgttggtcaggctggtctcgaactcctgaccccaggtgatccgcccgcctcggcctcccaaagtgctgggattacaggcatgagacaccacgccgggcccgataagttttttgtttgtttgtttgttttttcaagcagaaacaatatatgcactttaaggagaaacaagagtgcaagttcttggaaggactgcaaaatcctatggttaggcatgattacataaatgtcatgaggaagttgggtgtctaaatccttttaaaggcttattccaaagataaaggaggccaagtctgggcccaaggatcccaaggaagctgcagggagggcacaagagcccaagccttcctccaggccctaaagggattgggtcccatgataacgttacagaaaacttccttgacgcaccaagaccctcctcaaagccacagtccgccatcgggccaagttacgagactcagcagggaccacaaagacgagactggcgcggggaccgaagcaatcaagagtctcagggtcgaagccaaggctactccagggctggccgggtatgggggtcaggttggaccctgtctaggctcacctgccgctgtgctaggaaggtctcccaaagatacactgtccaggaaaagagcagcacggccccgaagatacgcttctcggccggcatctcccacaaagcgtccagcgatgcccacatccccatggccacccggttccgccggctccttcagcgtgcaccggtgccacaccgacactcgtcccttcagagcgtccccgcggtgtcacagcaatatccgttctttccgagggcccctacgccgatacccgcccccatccctccctctgcgcgctgctggcagtgtcacagacacactcttccccttgcagactctccctagtccctcctagtttctacaggaaaagccccagccccaccttcctcacttccggcccaaagagggcggggacccaaacgccgagttccgggcccggctgagctgtgttgcatcaacattcttcccccacgtcttgacgctgggttccggcctagggttctggctttcctcctgggctagtgaacgcggcgaagtcctcctctttctaatctccagagccgcagttccatcctctgggtcagcggcttaccctgactgggctgcggtatctgccttccttcccccaacaaggcgacaggtagtcggggctggggccggaactgactgagtgggccgcaactgactgagtgggccgcggctcccgcctgaggaggctaggaaggactgaacagcagccgacttcccaggctctaaaaatcgtgcctctgagttagagctacctcaaaagcaagaccaagcatgagaaatggagtcttttggccagtattggggtgttcggaattcaagcgtatgagagagtggacggtagcgttgagaattttcatttgaagatctcgtcttaaccaccccaagtgtagtcagaggcggcgttttccctgcgagagtgccctggaacaaagcaaggatagcgtgggttagacatacctgaaatgaaagcgtcttactttatctaggtacatatttgcgtcagtaaggcgcaacgccatttctctcttggaattcagaagtgaaatatggtgactgggacgcctgtacattgctttgacttaaaaattgaagtccattattctgaccgaaagttaatctgatgattaattggttaaacatactatcgttgctaattagcataattattatttacaataaagtgagctaaatagctacaactaaaatatatttaaattactgtgatattgtgatgctaaagatgtgttgaaattaatatcttgaatttctcaaccctgcctaaatgcctctgagagtaattagtataattaaaagtcactagagaaagtgaatgactctaataacaggataacaaattcttttcaagtcagatggtttccagttctttgctttcaacaaaattaatggtggcccatgaattgtcagctgatgaaggaacactatttggtttttggcatgcaactcggaaagaaaccaaacgattgattgacatgcttacaacaaaactactagcattctcacctatttatgtaaaaccatttctcagcacttgtatctgtgaaaacaacagaattgaaaatgaaccctgttaatctaccagtaggaactattcatccagataaatgaattaattggtgggtcagccccatctatctcactaagagatgtgttcccaatagaatttcaccttttataactgtgtgttatcaatatttgcaatcgtgtcattttgatccattatatactaaagatgattgtgatgattactcacttcagaagaattccagcgtagagccataaagttacacgaaattttttaaggtttactacatatgtcatatttttattgcgaagaagtgatcaagaaaaggttgttcaaacatcaaagtactatatttgaataacattttttgttagagtacaatctaaatatgttagagataataaaagaacaatgttgaagagctcattagtgtatgttttaatgcataatggtggttattcagttgttatgtagattctcttggatacattataaagagtgatttaacagttttatcttaaaatgtcagtatttacaatttgcaagaatttacatccattgcaactatttgaatttatgatggaaccagttagataccaacttaaatatataaggggtaaacactttttcaaaattttctctccctcaggccatcattgctatgccctcttcactcttgacttcagctgtctgtgagtccaaagcctcacaggagcttctaccacccaagctttgtggctaagggcacaggtttagagtcaagctgcttgattgccagccacggccgcaccatgtatt

SEQ ID NO: 2462 - DNA, 4001 bp, Homo sapiens
ttataaagctacagtaaattaagatagtgtggtatggacacaagcaaaaacaaaacagagtctggaagcagatatactcctatcccttatttcttcgcattataccacttctttatacattacactttgctaagatttattttattcggccgggcacggtggctcctgtctgcaatcccagcactttgagagggtggatcagctgaggtcggagttctagaccagcctggccaacatggtgaaaccctgtctctactaaacaaaaattagccaggtgtggtgtaatcccagctacttgggaggctgaggcaggagaatcacttgaactggaggtggaggttgcagtgagctgagatcgcgctactgcactccagtctgggagacaagagtgaaatgctgtctcaaaaaaaaaaaattattttattcaactgagttctgcaaggtcttttactagcctgatgggaaggctggaggcagaaggctatatgtttttcaaaccaaactaaaatgtccatggttaattctgcaggcaatgaagagccatcatttccgaagtgccttggtaccgggttacactgatgagtaggatgtcccaaccagtaagtatatacaaggtactgagaagaaatgaaaaaagaagacggtcagtcttctgggaggtgaaatttgagctgggttttaaagtgtctaccaaccaatgatggcggatattcctggtatagagacagcatgtacaaaaccacaaatagccgggcacagtggctcaagcctgtaatcccagcactttgagaggcccaagcaggtggattgcttcgattcaggagttcgagaccagcctaggcaacatgaagataacctgtctctacaaaaaatacaaaaattagctgggcgtagtggggagcacctgttgttccagctactctggaacctgaggtgggaggatcgcttaagctcggaaggctgaggctgcttgtgagccgtgatcgtgtcactgcactcagcctgggccaaagagcgagacccagtctccaaaaaaaaaaaaaaaaaaagaagcacaaatatatgggaactagaaggagtgggactgttgttgcagataaagtacaagtgcaagagtgctagtagaaggaactggaaagtttgaaaagtagacatgggtcatgtcaggaaggtccctgataccaaataccttaaaattaatcttgtaaatcagcagcgttcaaactgtgcttttggggttcagcaaacatttcatttttttttttgagacggggtctcgctctggagtgcagtggcacgatctcgactaaatgcaacctctgcctcccggttcaagcgattctcctgcctcagcctcctgagtagctgagattacaggcgcctgccaccaagcccagctaatttttgtacttttagtagagacggggttttgccatgttggccaggctggtctcgaacttctgacctcaagagatccgcccgcctgggcctcccaaagtgtcgggattacaggcttgaggcaccacgcccggccaggagtcaaacttttgaaaaatcactgctcaatgaaggagagatacaggtgtgatggggcttctgaaacggaggctgcggagcgagactaaagtctgaaggcccagttactacacaggagcaggaggcggcgagaatcgctggaagcggggagcactaacccccccagtctatgagggcaaggttaaaggaggcggcaaacacaatccacgtcagggcctggcccggagttcccgacccccatctggcggaatccgcactcaaagctccgtctctaaaaccccgacccggcgcgtcatcctccctccgaccgacagcagaaaccctgcccctttcgagtaaggcgcaggagtaaagaccgaaaccagagccgcatgaggaggcttactaatttctctcagggacgccccgcccaacgcttctgaaacaatcttcgaagcgaaacggccccgccgaccccgcccctctcccgtcgtgctctgcggttgagcatgcgcagggccgctggctcagggtggtcccagctccctgaattgggaagagcgactttgggatagaagaagtgggagagggggaggggaagagtccttacggcccgcataggatcttacccttgaagtcgtcgctggctggcagccaaagtaggacccttgactcagagctcaggcagggcagttagatttcctggatttgagagatggctttactacttattagctgtgtgctagtaagcgatttgacaacttctataaatctccatttcttcgaccttgaaatggggataattgtagtggctgcatcgtaggtttgtaaacattaggcaggcttctgcagaagctggactcaaaaaaaaaaaatatgacaggcaatgttagcaaagtgccagttgcagagtaaattcctagtaaaaggaaattatcctcagaggtagggagggagttcagacttctttcattagtacgttaaaattaaaatgaccccaggctgggtgtggtgggtcacacctataattccagcactttgggaggccgaggcgggtggactgcttgagttcaggaattcaagaccatcctgaccaacatggtgaaaccccgtctctattaaaaatacagaaattagccgggcatggaggcgggcgcctgtaatcccagctacttgggagtctgaggcaggagaatcgcttgaagccaggaggcagaggttgcagtgagctgagattgtaccactgcacttcagcctgagcgacagagagagactgcgtctcaaaaaaaaaaaaaaaaaaaaaaaaaaaaattaaaataaccccaaactgcatgtcaaaaataatggcatattttaaatgttttttgacaatactttcaacacctaaaaaagtataggacgaactaactgtgctattcctaaaggcataagaggattctaaaatatatatataaggttgaatgatgaacttattataatcatatttgacaattacttttaaaggagatattctcaaaaatctaaatttgaggcccttgtgaaggtgaggtccagaccaaaagggcctcctaatccttgctgctatggtccttaaatatcctttggaattagcctcaaatctaatataaaccctttggtaatttgaaatattatacgagtaactgaagttaatttctccaacatttattattaccttctaatattcataataatctgtttagactgttaggattagaaaggaccttactgaaatgatctctcctctaatgctcccttcctaccaaaggaaaagctgaaggcaagaggataaaggtaatttgccccaagttacacagcaactcagtgactgggattagattggaacccagaaatgagtcctggttcagtgggcatccaaaggcaagtgatgtcattgtaaatgccccgtgggttcaccttgcccgctacctaaacacagtccatttatcaagacggggaattgcaatagagaaagagtaattcacgcagagccagctgtgcgggagactgaaattttattattatttaaatcagtctcctcgagcatttgggaatcagagtttttaaggacaactggtgggtggggggaagccagtgagccagaagcgctgattggttaggtaggagatgaaataatgggaagttgaagctgtctgtcctcatgcgctgagttagttccctggtgggggccacaagatcagatgagcctgtttatctatctgggtggtaccagctgatccatcaagtgcagggtctgcaaaatatctcaagcactggtctcaggagcagtttagggagggtcagaatcttggcctccagctgcatgactcctaaaccataatttctaatcttgtggctaatttgttaatcttataaaggcagtctagtccccaggcaaggaggaggtttgttttgggaaagggctgttattgtctttgttttaaactataaactaaattcctcccaaa

SEQ ID NO: 2463 - DNA, 4001 bp, Homo sapiens
tttctttttttgacacggagtcttgctctgtcacccaggctggagtgcagtggtgtgatctcggctcactgcaagctctgcctcctgggttcacgccattctcctgcctcagcctcccaagtagctgggactacaggcgcctgccaccatgcccggctaattttttgtttttttactagagacggggtttcaccatgttagccaggatggtcttgatctcctgaccttgtgatctgcctgcctcggccttccaaagtgctaggattacaggcgtgagccaccgcacccagccaagatgtctatatttctatctatctatgtatctatctatctatatctatctatcttgattgacagataatgttttggctgctagaaatacttcatttctgatgatacatgattgggttaaacattgaaacaaaatcccctaatattctccccatcacatttaaatgttattaacagtttagtagtatgtgtccttctttatgaacatgctgaagttgagttatggtgaggattaaaagattaatctgtgtgaagcacccagcgtggtgcctggtacaggaggaactcacttgcttcctttcttcctttctagtgtcccagagccttctgtagtctaagaatccatgactagtgttagactaggctgatgtgaccatagaatccaaggtgtgtcctggcttttgggggtgctgacagacttaggcctggcaggactgccagagaacagtagttaggggctcaaggccatggcaggtgtccattggggaggagctgttcagcctagccaggctcatggcctttcctaccctgttccaggtgggcccagagcttgggactgcctcctgggttagcatactgtcctgtgagctctctgtgtgagctaggacaggagtttcaagcaccagggccagtctccttctgggcctctctcataggacagtcaggcatagggctgggccctaggaggtcccacaaaggctggctggttggctgacttctgggttaatgtggtgccacctcagctctgcctgaaactctgcctgatcttgctccagcctcagggatgtccaagcccctgccctcctttgtagatttctggacttagcaggagaaaagaaatgtgggagctgaggacacagcaggagaggaggggcgaaggaggcagcacagactgagagctacctctgcctgcctttgccctctgacttagttcagaggtcttccttcctccaggaattcctcctggaagccacctctctttcccctaggccaagttaatcaatccctcctctattcttgttaatagattttttccagccgggcgcggtggctcacgcctgtaatcccagcactttgggaggccgaggggggtcgatcaccagaggtcgggagttcgagaccagcctgaccaacatggagaaaccccgtctctactaaaaatagaaaattagctgggcatggtggtgcatgcctataatcccagctacttgggaggctgaggcaggagaactggggagacagaggttgcagtgagccgagattgcgctattgcattctagcctgggcaacaagagcgaaactctgtctcaaaataataataataataataataataataataataataataacaacaaatagtatttcccccatgtttgtctctctactagggtgtaaactttaaaggccaacatttatttcatccatctatatgtatctagtgctcagcactggctctggctcaatgatactcaatgacttgagactcagtgatctagaaaaggaaaggtggcaccctagagatgaattatataagtaagggtgagggcaagagagagaaacgaaatacctttttgtggctggactgggttttgtaatcagaacctctctgacagccaagttgttcactgtggaaggagctgcaaggaagaagtcaacttcctgtcttgaaaactgcaaagagaggctggagactcctataagaatgctgccgtggggattcaagtacgacacaaacctgagatcatgtaaccaccaaggtgcattgcaactctgaatacactagtctgaatacaagactagtcccagagatgcaaagactcagaagattatgtatctgttttgtcaaggttaaggttgctgggaggacactcaggataatgtcacaggctaatcagcctctactccttctatcccttgcatgcaaatacatattcacaacaatttaaataacaaaaaaactggctgggtatagtggctcatgcttataattccggtactttgggaggccaaggtgtgaggattgcttgaggccaggagttcaagaccagcctgggcaacatagtaggactctaaagtctctaaagtctttaagtctctaaaaaaaaaaaaaaaaaaaaaaagtcacataaaacttacataatcacctgcctgtatatacatgttgcaataaatttttttgggctgtcaaattatcttttattgaacatcttttttgtgcattttaactagtggaacattctgctgcaccattgttgatgtcatctatgatgtcatgagggcgggtgacaatcaacattgcagcccacagcctgggcaatccccaagatctctttaatggttctggccaaagactggtgccacacctgttgggcaatgttgattatctcatcaaaagtgacatttccactgtgtttaatatttttgtttctatctcttggaggttccttgagggcttaaaggatcagtgttactggtggcaggtatccgagttatgccagcagcaaatccgtacaggtctgcagcaacttcagtccttgcctcctcagaagaaagaattcaactgaggggcataaggcagaaggagagaccgagacaaggtttcagagcaggagtgaaactttcttaaaaagctttggaacagcaaggaaaggaagaaaagtgttataaagttttggtgctgcaaaagaaatagcactcgaatataaaaatttctttttaattctcagcaagtcaagggtgtgcccttacagatggaacaatggtgagcgcacacctggacaagggagcggaaggggttcttatccctgacacatgtggcccctgctgctgtgttgttcccctattggctagggttagactgcacaggctaaactaattccgattggctaatttaaagagaatgacagggtgagtgctttggtaggagtcagggcagagcaggtagcaggtaatcagtgcgggtggagcaggtgattggaatgcacggtggagcaggtgattggaatgagtcagggtggagcaggtaatcggaaaaggttgctttacaaggaagttaagtttaaaagtagaaggcaggggggtggcaccaaaatggccaaataggaacagctccagtctgtggctcccagagtgaacgacgcagaagatgggtgatttctgcatttctaactgaggtaccgggttcatctcagtggggcttgccagacaagtaggtgcagcccacggagcagggcagggcatcgactcacccgggaagcacaaggggtcggggaattccctttcctaacaaagggaagccatgaaagacgtcacctggaaaatcgggacactcccaccctgatactgcacttttccaacggccttagcaaatggcacaccaggagattatatcctgcacatggctcggagggtcacatttaaagcagtgtgtagagggaaatttatagcactaaatgcccacaagagaaagcaggagagatctaaaattgacaccctaacatcacaattaagagaactacagacacaagagcaaacacattcaaaacctagcagaaggcaagaaataactaagatcagagcagaaatgaaggagatagagacacaaaaaacccttcaaaaaatcaatgaatccaggagctggttttttgaaaagatcaactatcctaaatatatatgcacccaatacaggagcacccagattcataaag

SEQ ID NO: 2464 - DNA, 4001 bp, Homo sapiens
cttgctctatgactaattattgcattaggtgaatccaacatttcgtaaacttatcaatggtaaaaatttattgttcaaaacactacgatgaaatgcattaaaataacacgactgatgaacagaaagagggatagaggggtaaatatatgataaaacaagtggaatgcaattttttttttggagggggttttgagacagtgcctccctctgtcacctaggctagagtgcagtagcacgatctcggctcactgctaccaccgcctccctgctaccaccgcctcccaggttcaagcgattcccctgcctcagcctcccgaatagctgggattacaggcacccgccaccacgccgggttaattttttgtatttttagtagagacggggtttcaccatgttggccaggctggtctcgaactcctggcctcaagtgatcctgccgcctcggcctcccaaagtgctgggattacaggcgtgagccgctgtgcatgtccggaatgcaatgttaacagtaggatctaggcggttgggtgtatgactgctccccgtaagttttataatattgacggatagttcaaaatattttcctaataaattgttggaaaaaataatacttgacacttctttggtcatttacaatttaagcttttaaggagagaaacacagattaaagaaactcctctgtggcatcccacacaggcactatagttgggacaaacctggattcaaatcctacctcaaccttgcaactagctgtgtgatctaagtaaattacttaagccctcaacacctaaatttcctcatctgcaaataggttctaggaggagttactatgaagttaaattcttcacataaaggtcttagctcagtgccaggcacacagtaagcactcaaaacatcagctgtagcatcattacgagattactaattttacgctaagctgaaagggcattcttcataaagtagtaattttttgcccttttgctaattgatcgtttctgaaaccattcccaaaaggaagactcctaaaaggaaacttacttcttatcatgctaagcggggaggaagtaaaagaaaagtgagggatattgctcaatcgatagtacagtattgttcgccatctgaaaaaaaccactcagaattaaataaggaaagtttccagacaaactttaaaaggtattcaaacaactcctatgtagaattggcttcacctctgcaggttgattgggtacatccctgttatgagaaaacttgtcgtattcttccaagtccctaattgcgagtaagaggctaggctagaacatgacattcatagtagccaaaatctttctcctaaatcaggacatgccaacgatcccacttcttcacaggtaagaccaccaccccgactttggtctagataacggctatggggggaggggaaaggaggcaggaaaatgaattcgcgatggtgttactgaagaaccctccggttatttctcctgagacccctccacgacttattcccgccaccaccacccccacctgacctctccccagttaacttccagactctgatgtactaaagatgcactaaagatgcacttaagaatctgacacctcccctccctgggcctagatatcccaccccagtgctggggaacgtcggggggaggaaggcaaacaacggccccctcccctcccccccacccagcaccaaatctttgtcccacctgccgagggaccgctcgccagcgcgctccggacccaaggctgcctcagacctgcccgcaaccttgtcctaactgggcctcggcgacccctccacgaacctgagtatggcccattcccggccccgggccgcgccccgccccccgccgcccgagttctgcctcacctcacctaccctctttcgggggccggactccacctctctctccgccatgttgggccccgctcggaaccgctgcggctccccgcgcggtggcggcggtacctctcggccccccggcccccgcccacactgcaggcacggccgcctcgcggcagcttccccggacccggccgggccttgcgccgagagtggggagggggcggatgccgcgcgccgggccgcagcttctgagatcccacgggtccgcgcgtgggcgggagggcctgcccggggacggggtgggggccgggactcggggggttaatggcctccaaggggccccgtgagtaggattattttctctcagagaaattcctccgcctgcggtttcttaaagggatcaccaaatcagccccttgcgcgcgcccctgatgcgcaggcgcaccctaagtccctccttcctttcccaccaagcccccggtcctgagcgtgcgcggtaagtggccatgggtaggccaaatcctgcaagtctctttgctgccagcagctgctcccaccactcaactatggccgctcccttaaagggaccatgacgcagggatgaaggagaaatgaaagaaattactggaaagacaatctggagaattgggtgcaatgtcagtgaagggttccacatcaccatcttacacctgactacagtggtaccattgaagagggaaagtcatggtaagctgaagttctcagtggacctctgaacatgaagaatcccaaaccaatgagggaacaagacagtcatctcaaggaaaaccaactttcctccctttcgactgcctgttctgaagcacaaggcatagaatatcaagagccaactcctataacctcaccttaaaatcaaagcttttggtgattttgaagattgaaccaacaactggaaataatttcttcaatagtaatttatccttagaacatcaaaatggagaaggatcttagggaaccatttactccagtgctcccaatgataaaattgcagcctgatcatgggaaggaatttgtcccaatgtaactaatggctggtgtggagttggaatcaagattacagtctcagtcctccaggctgtcttcaggcgagagataaatttggtttaatttgatatccctagaagattaaaaattgaagtttcatggtatttggagaatatcataattctcttgtgaagatgtaatgatttgcagatgatgggtgtcctcattcacctctattgaaggagcttgacaatctgccttaaaggataagcatcttatttctaagcaggaaaccaggaagtagatttgggtctatcttgttccaaaactgggtcctaagctgaaaatcgctgaaaagaatgagggcttcattcattcctcttctgttcattctagttcccacaagctttgggtgcagaaaaaattaagtttataatgatagttcagggacagtggggagacatatagtaagaaatacaaagaagatgcctcctgaaggtcatttcccatgacaagacatattcaagtgggaatgataactcctgaagtcacaggataatgagatgtaacttctgttttctgttttatttagcacttggtagctattctgaaacagatgttttctaatctgtaatattttgctgaaaacttttggtgaaattgctggaagtttccatactggccttgcttatgcctttagcactgtctttaatttcactcctcggtaggagagaagaaagaaggacaaagaaatatgttcatttcagccagaattttaaaaacatgttccctttagttccatgtccaggacaagaaagaaaagaggagccaagaaaagataattccagggaatgtggctacataaaacttgtagtggtttccacctgttttattggcagtggaatactcccttctaataaaatctggtggtttaaaatgtggagctgctaagttgggagtgtaagtggggaacccactagtctattcacccagcttcacccttgcactctctctcctttcatgccccctcccatcattacagaaatgttgagtttctcagatcacagtttaaacttattagtttagtctaactccacattttcaagatgaagcctctgaggcttagaga

SEQ ID NO: 2465 - DNA, 4001 bp, Homo sapiens
tcctggatccccagagactagcacagaccacaaattcttaacagaataaaggaaagtactaccagatacaagagaattttttttaagtgacaagtatggaaaaatggtaaatatattactttccttccacacacaaaaaaatcatgtagttatagctttcattcaaagagcaaaaaaccagccaggaatggtggctcatgcctgtaatcccagaactttgggaggccaaggtgggtggattgcttgagctcaggagtttgagaccagcctgggaaacatggccaaaccccgtctctaccaaaaatacaaaaaaatagttgagcatgttggtgtgtgccctgtggtcccagctacacaggaggctgaggtgggaagatcacttgagcctgggaggtggaggctgcagtgagctaaggagatcgcaccactgcactacaccctcagcgacagcgagagcctgtctcagtttgggttattttaaacttacaaaccagaagccgtttaactaaaatttttcagttgaccagatggaaaagaaggaatttttttaaatttttaaatgaagatgaaatgcttacttgagcattgtctggttcttctttaattttgtccagaagctcctgctgtggtaccactgctttgccacattcaccatccaaaggttctttcattctaattttttacctcaaagagtgtctcaggctcaaacgaatagatttcttcttggtaatggatagttggacacctaaaatacatactcaggcttattcttttttcttcaggcttatctatatgaaagaaaaactttgtgttgagtgcatgaggcttcacggctcggcatttgaaaaacaactcttctggggccacaactaacttttttctttcttcctgctttctgttccttcagtagctacataagaaaacagttttggggcaacagctcccacttctctaatatctttaaagacacacaacacactctggttttttcctatgttgaaggttattgaagggaattagaccagcagaccaagacgtgggaggaagtaataaactctgagaagaacggactcaagaaatagtttctgaccccataagaatcagtacttagaggcccacgtcggcttttatttctcaaagaggggcacaacaacctcccggccctgacctataactcaaccttcactggaagcctccctaagggccccatttctcggcctaacgctagatgtgagctcaagatgccatccatcgcaggcgaacaacaggaacgcccttactgaaagtgagtcacctgcctctttcaaggtctccgtgtgaggggtggggggcatcaagcccctcagagccccgcttcacaatcgccttcctgtagaaaagaaactcaattggccattcagtaaattcccttcccctaaaagtcaaagaactaaacgggacgaattaaacctaaaacaaaaagctcttcaaagttgtctttatccgaatagtccgggatggaaacggacaactggttgaaaagcctgttccaaagaagaaatgagaacttttgcgcactcgccacaaaatatctacgggcgctcatccctcctctgagaaccgcacgctttccgaaattctccttcccaccaagaattcccactcccatcattgaggactaacgaggcaatgtggtctccgactgagagcggtggactagccagtgaatgtcaacgcgtccctaaggcgatatccgcagccgccccagccgcgtagcccacctggcaccgcccccgccgcaacgcctcgtcacgtggtgtggcctccgccccgccgtcccgcccactaccactgcggccgcacccaccttctgtcgcctccctgctaccggaggagcactggaataggaaccaagtcctctgcatctagacagggattattttctcttctggaattccgcctgatccatcccaacgcaacgaccggccaaccacgcctgcgcagccttggtctccgccctcttttcccgtcaggctccggacctgagctgagtagaacttcccagcattcctctttcctcaattatggttcacttcttaaagagaccgaggctcaatagtgaaaaggtggagatggcgttagaaggcgctgtaagtgctctatagcattcttttttttttttttttttttttttttttttttttttttttttggagacagagtatcactgtgttgcccaggctggggtgcagtggcacaatctcggctaactgcaacctccgcctcctgggttgaagcgattctcctgcctcagcctcccgagtagctgggcttacaggcacgtgccaccacacctagctaatctgtagcatcctttagtgcccatttcctgaaaggtggcctactgagagagcatgatattaaataatacttggcttgctgagcacttcacatgcaccatcccacttaatcctcaccatttaaccctaagaggtataattttttaatctcttgagatataaatgaaaaaacttgctcaaaattgagatttggtttttttaattcaacattgtttcacagatacgtgtatgatttgtgactgttcattcattttgactgctgtatagtattctattttatgaatatgatacaattttaatcatctactactgatggacatttgagttgtttccaatttgtggctattaggaataatgcttctgtgaacattcttgtcattggtgatgttaaaagacaaaattacaacaaatttaatttaaatatctcaattagctttatttgtgattctagaatctggcagcacttcattccataaaatagaacaagtgttccaatgagctgagcagaagaggtaggttttatagacagagaagggctggagaaagcagaagtaaagaacaaaaaacagattggttcatttcaaagtaactttccaaaaaataaataaataagttaatttccttgtaaagcagaaccaagaaacaaaacaatagagaaataactgattggttaacatcaggtaacttcagtttatctttttttggtaacgattaaagcagaagaaatttcattattatgctaattgaaactggcactcaggggaaattagactcttattatctctttttcctgacttttcagaacttcaaataacaacgtagtttccatttgatgacatggaacctcagtgtgagtgactccattttgatttttagtctggttcattgagacctactgcaggagcttagcccgaaacaatggcctacaagttttatttaacagtgatacatatgcacacatttctgttgggttcatacctaaaagtgaaattgcttgttatgtatatgtaaaatttaggtagataatctcaggcaattttagaaaatggtggtttcagtttatactcccttcagccatgtatgagagtttcagtttcccaacatccttgccaataattactgctgcatatctttttaattataaccattctgatgggggcatagtggtatctcactgtggttttaatttgcatttcccagattattaatgaggatgagcccattttcttgttccttgggtatctggatatcccccataagtgcctgttcaagtctcttgctcatttttgtattggattgacattttcttatgggcatatattttagatatgaatcctgctatggtttgaatgtatgtgtcccttcaaaattcatatattggaacttaaacattaaggcgatggtataagaagtggagcctttgggaggggttaggctatgaggactccatcctcatgaatgggattcatgcccttacaaaagagggcattcatgcccttcacaaagattcattccttttgcccttttaacccctcactgtatgataacaatgttcctcccagcaagaggacaacaacaaagtttcatcttggaattagagagtaattccaagacaacaaatctgccagtgccttgatcttggacttgccaacctccagaact

SEQ ID NO: 2466 - DNA, 4001 bp, Homo sapiens
gcgggcagatcacgagttcaggagatcgagaccatcctggctaacatggtgaaaccctgtctctactaaaaatacaaaaaaatcagtcgggcgctgtggcaggcgcctgtagtcccagctactcgggaggctgaggcaggagaatggtgtgaacccaggaggcggaggttgcagtgagcagagatagtgccactgcagtccagcctgggcgaaagagcgagactccatctcaaaaaaaaaaaaaaaaaaaaaaaaaaatacctgtgctagtttgaagaccatggaaactgtggtagagcagaaagtgctcttgatcccagagaaaaaagaagggtggcaacagtaagggggaacagccaggtctttccataatcctcccccagaagaccccattttctcaggccagttggcccccttacccatcatgagcagaatcaagaacaagttactgatctcttgcagcatcggtgggcccatgaccagcagcaacccagccagcagttccagaaagcccacagctatttggtagttcaggggatctggctggtagccaaataccttcagcgggaacacctcagcaaactgcacgaacagggcattctaggggtggcaaggaatgcctgttagcctcattgttcaacaaggatgagctccccagatgctccatggcatatctatgcctgtgccctcaacttcccagagaaaagaactactactctaggtcaggtccagggctgaggtcagcctgaagaggagagggctgccctgtggcgctgagctttggaatcaggaaacaggctccatgctccaagtggtacagagattgatcttctcactagacctctcaagagattacaacccagccccaaatcccaggaggagggggctgggcttggctccctagtgccaaggcctggggaattccacagtttccttctttgtgtctggcctggtttctcttaaggctgctgtacagggaatatttggaggtgaggcagagttaggtgggctcaaagtgactcttcttgtcaaggcaggccctcccctgagccaaatgacaacttcatccttactttcggggatactttttcctgttcccactcctcagctctacctcccctcctcagctctgctgggaagcagctctaagctgtctgtctctggggatttatccaggccttggagagagatgccagcagaggtctacaagtctggctcttttgagggactggggagattggtgaacaggatatgaaagctttcccatgagtctggaactagacagaaggctgaaagacgacttcagggcatccctctcaggcttccgagagaggcttccctctctgggttccgagttaggagtgtctagcttgtgtcctgcttcctgactagatgtgcaatctttagcagatatacttgcccttcagggcgggcttccttccctgcaaagccaggattactacaccccaaccccacgaacctcccaaaaactgaagcaaacggcgaaaagagggaagagagcgggaagtgagctcattttcccaccgcatcatcctcccccagggtccgggggggtgggagggacctcctaaggctctagatttgcctggggccaccaatattctgcaggaaggggaggttctgtccccttccgtctagggaagatccagagaactcgaggaactccccaggcaggacctgcgcctcagtcgaaagccaggcgctttcccccagctccagctgagcctcggaagcccgaaggcggcctgccgggccgggggcgaggagcggcagggcggagcacacgccgccgcgggcccgatcccctgccgcccgcccgcgccgctcaccatccgctccgaaactggagccgagatctcctccgagagcttggccaaccccacgagcgcgaagaagccgcccagcagtacacgcagcaccgaaagcaggagcgccatggccgcgctccccccaccgtgggttggccccgccgaaaacccgcccctgccgccggctcatttcctccctccccggggcagccggaagactctcgcctgagctaccgtcccccaccctccagggggtcgcgaggctgcagtactggggcagggcgcccccatcttacaggtggggacacttgaggaccactggctggtaactgactaaacaggcacctttggattcagggagtgtttcccagccaatacggagtgctggcagacacgggtgggtgtctgggtgcggttcagctaccatcaaaagaccccgggcttcgttcctgcctgtgccacactagctgtgggatctgagctgtcacccaccccaaagggcctcagtatctgcatctgtatatggggataactcagttctccagagtttgtaacaggcctagcacagtgcctgcacatgtaagagctcagaaagttatttgtaaattagtaaattaatttataaaattgtaataaatcaataaccattaattattaaataagtctctttgcctgagatatcttttccctctaatttatctcggctgacaatgaaatgtgaaaggtgtttgaaaattcagatacttgcatggatagagaggctttcactgaaccaagccctacagtccactcctggcccatttgctcttacctggaaatctgtctaaagctgggatgggcaaaccatgggccaaatttggccagatgtctgatttttttccatgcttctccccttcccccaagctaataatgtttgtttacattttttatgataaaaacattttttaaagaagcttgtgtgacataggaaaattatatgaaattcatatttcagtgttcatgaataagttttatttaaaaacagccacacttatctgcatattgtctatggctgcttttgcactgcaactgcagaattgagtagttgtgacagtatggcctgcaaagctgaaaatatttactatctggctctttatttaaaaagtttgctaagccctggtatattgggccagaaaggccccaagcaggggtctcaaatccccctgctgcttccatttatagttacccaagctgcttagatctatctttttccagctgggcacgttggctcacacttgtaatcccagcactttgggaggccgaggcaggtggatcacttgaggtcaggagatagagaccagcctgaccaatatggtgaaaccccgtctctactaaaaaaaatacaatagacgggcatggtggcacatgcctgtaaccccagctacttggaaggctgaggcaggagaattgtttgaacctaggaggcagaggttccagtgagccaagatcacgccattgcactccagcctgggcaacaagagcaaaactccatctcaaaaaaaagatctatcttttccacctactcacaaccttgcaggggtaagtagctggttggctagaagactgaaatgttccacttgcttctaaaggccaagctgtttcaacatccaggttgtgctgttacattataaactgggcttctcattacctgcagtctttgtcactagtccaaatttaatgaaataactaaattttctaccctagattataattatacataattatttataacaatcataattattaaattcctcaacaaaaagggaaaaattattaaaacatttaatcactgaaaacacaaatccacattaggaaattatcttttaggatacttatacaaaacttaacacaggattattgacttcactgttaagcaatgtgcatattgctactctttctccttcactaatttttctatccttggaattaaagatgtgactgcaagtcttagggcagggccagaacccaacagatttttttgttttgactcagtcaaagctgaaaaggcagcatcacataaataaacagttgaaaagggtaataaaaatttcattgccctttcatggagttctgggtaacttgtctttgcatttatccaaaactgagttacagacactgatttaaatagtgctt

SEQ ID NO: 2467 - DNA, 4001 bp, Homo sapiens
ttcttaattatattctaaaggcaaggaagccaccaaagaggagatagcaatgaaaacacagataccatccctgcccttgtggggcatacagcctaatgaaagaaataaataaatgatttcagtccatgtcctaagtgttaggataggggacatactcagtgctttgagagcactgaggaaggacacctaggccagtatgagaaggtactgcaacagcttcttgatctgttatgcagccgtcagtgtctaccttcctctgtatctgccacactgcagcccatcctctttccttaacacaaatgagagcatgtcagctcaaaaccattcatggtttcccaggagataaattccaaacccttgatctcatgtcactgtctagccctaacctttatcttcttggtttaaacttctactacctatcacaatgatgttccaacttttttttttttttttgagacacagtttcactcttgttgcccaagctggagtgcaatggagcgatctcggctcactgcaacctccgcctcccgggttcaaacgattctcctgcttcagcctcccgagtagctaggattacaggtgcacgccaccacatccggctaattttgactcaacctatagtaagaaatacatttttcctgtacacacacacatgtccacataaaacactaagacaaaagttttaagaaacaattcaggtaggattaacctgatactttctactcattctgtgctcttttttgttgttgttgttttctctaaatggtgattgtgacttattcataaactgctaaagggccctggcctgcagtttgaaaatcactgactgctccctccactactacgttctccactcggcccttagcaaactctgttcttttgccatttgccctagcagtcccggatgccgggaatgccctacccttcttcactactcctgtacacagcaggttctgactgccctctcaaaatgcagctcaaatgtttcttccacagggaaagctttccacatactgccccattcactatcgtctcactctcgttgcccaagctggagtgcagtggcgcgatctccgctcactgcgagctccgcctcccgggttcaagcgattcttctgcttcagcctcccgagtagctgggattacaggcgcccagcaccactcccgcctaatttttgtattttttagtagagacagggtttcaccatgttggccaggctggtctcgaactcctgacctcaggcgatccgcccgcctcggcctcccgaagtgctgggattacaggcgtgagccaccgcgcccggcctgtttctttactgatttgtctcccacattggaatgttagatctttgaaggaactgatctaccgagctgccccagtaactttagcacctaaaatagtgcataacacagagtacgccttcagaaaacatgagtgacgaataagtgggagatgagacagacgaggccacgggagtcttaggggcctgtcttaaagccgttttgaggtgtcccttgcagagtcaggggcaacggctaacgcaaggtacccaagccagacccgggaaagggagagagggagggagttatagcgcccaggtgccacgtttcagggcctaccagtaataagtgactgtgcaggccgcgcacacccgctcggctggggcttcgcacacctcacagcagagtctgcgccccttggggactgccagtgggtagatcacattcatggtgcagccagcagtgctggtctctaagacggttgcccagcaaggatacgctgaaccccggcgtcacgtgacgatcgcggggctgcgtacttgccagcatttcaagggcagagggcggcgggacgtgactcgactaacatctgggtgtattgctgaagttggaaaaggggaagaaagaaagaaaaagcagcacaaaacccacaagtcccacgggtcaaatggccgagaaacgactcccaaggagtccaagtccagaaaggcccgtacagtggccggtaagggtcaaacatggccagttcttcacccaggctaggaaacgaacgtgagggaacgtgaccctaccagatgcccacccagccggggatccccctcgttgcagtgtcactttcgctgggctctggggcagaacaactacgcatttccagacttggcgagatcgggacctagtgtcaaaagaagggtagtgaaccgcccactcagtacggcgcggcgcgtacaccaggtaggcgagaaggggcgtggcgcggcggccgcgaaacgtgcgcaggcgccggccgctgcgctgcagatggcggaaatggatccggtagccgagttcccccagcctcccggtgctgcgcgctgggctgaggttatggctcgcttcgcggccaggctgggcgcgcagggccggcgggtggtgttggttacgtcaggcggcaccaaggtcccactggaagcgcggccggtgcgcttcctggacaacttcagcagcgggcggcgcggtgcaacctcggccgaggccttcctagccgccggctacggggtcctgttcttgtatcgcgctcgctctgccttcccctatgcccaccgcttcccaccccagacttggctgtccgctctgcggccttcgggcccagccctttcgggcttgctgagcctggaggccgaggagaatgcacttccgggttttgctgaggctctgaggagctaccaggaggctgcggctgcaggcaccttcctggcagtagagttcaccactttggcggactatttgcatctgttgcaggctgcggcccaggcactcaatccgctaggtgcgtgccctaggagtaccccttttgcctggaagcacagcctttctttccagccacttatccccttacctcctgcttacccacggatctcagctggggaacccgagttgagaaggagctgatcctatatcgtacctcgccgatttgttaacaccttgtgtttctctttgcaggcccttctgcgatgttttacctggctgcggctgtgtcagatttctatgttcctgtctctgaaatgcctgaacacaagatccagtcatctgggggcccactgcaggtgatgggcgcttctcttccagagatctaatcccatataaccaatcttgggttaatttcctcttgatctggagatggcctttctgcatctgtattcgctaggcacaggggatacagagatgaataagacaccgccctccctcatggacctcacaatctagtgagggagctggacacagacataattacaatacagagtgataaatgctctagtggaggtatgtacaaagtgcagtcagatcatggggcgagtgaatcctgggggagtcgatgaagcttcttggaggagatgaattgaactgggttttaaaagatgagcagaaccgagcgcggtggctcacgcctgtaatcccagcactttgggaggccaaggagggcagatcgcctgaggtcaggagttcgagaccagcctggccaacatggtgaaaccccgtctctactaaaaaaatacaaaaattagccgggcgtggtggcaggcgcctgtaatcccagctactcgggaggctgaggcagaagaatcgcttgaaaccaggaggcggaggttgcagtgagctgagatctcgccattgcactccagcccgggcgacgagagcgatactccgtcgcaaaaaaaaaaaaaaacaccaaaaatcaaaacaaaatgagcagagggtgtacgaagtgggaaaggtcattccaggtggagtatggcagtaggaatttgaaagtgggcagtgggctgtgaaccgaagtgctttggtaaggctggagagctgactgaagagatggcttgctttgtagaagactttattttccttttttaaggagcttggactttttcttgtggagctaagggacacataagtaggagaatgagataaagtttttgtttgagaacaacattctggcatcagtatgaaagacgaagtagagaaggaga

SEQ ID NO: 2468 - DNA, 4001 bp, Homo sapiens
gtgtgggcacattaggtcatcctcaaacagttttgaacccaggacccagaaaagacaggagggtggctgaggacacaacaccacgtgaaggttccaaagggaaacctccatccaaagacgtttgtgagtgtgcctagggaagacaaaaggaggagaggtacaaagaattttttatagtggactagatcaggtgattattctctgttttcacaaggaatgttcagaaacagctcctcactgctcagtgaaaacatgataaacaattacattactgcatctggttcaaatgcacaataaagaacaaataattaataatgttgtaaattggagaggtgaagttggagtttgagagtatgaggaagaaactggaaatttagaattttactgcaagttctagaagttaggctggggaatacggtcatggatttgagaccctgcttgccttacatttgggaaatgcaggggaaaccagtacccttgtggaaataattaaataggaagaaattagactgaagttgtagcagggcaagctgcagacaaaacccctcagacaccgagttaaagaaggaagggcttcattctgccggaagctttggcaagactcacgtctccaaaaacccagctccccaagtgagcaattcctgtcccttttaagggcttacaactctaagggggtccacgtgagagggtcgtgatcgattgaccaagcagggggtacataactgggggctgcatgcaccggcaatcagaacggaacagaacaggacagggattttcacagtgcttttccatacaatgtctggaatctatagataacacaaccggtcaggtcaagggtcaatctgtaaccaggcccaggacgcggcgccgggctgtctgcctgtggatttcatttctgccttttagtttttacttcttctttctttggaggcagaaattgggcataagacaatatgaggggtggtctcctcccttaagtgatgatggtgccctgagttcctcaccaagaaaacctaaaggtacttcatgcctttcttgtaattaacttgaagggaaagaaaacttaaccccaaatcagcaatttacctctgattacataaccaggaaccatccacctaaataatccgaataacagaactacataattataaccaatcagttattaaattggggttgctttgggctgggcggggtaatcccagcacttcgggaggttgagaccagaagttcaagaccagcctgggcaacacagggagaccccccccccgccccacccgatcattaaaataaaaaataaataaatttggtttgtttccttacacactttacagaagcctttccatcaagaccgtccggtggcccacaaaccaaaaaccgtggctgggtgctcccctactcatgaatcgctgtttgctcaaactctgtaacgctttaattaaacctcagtttaatttttaacaggattaaggagggactggaaacgccagtggccacagctcctcgcaggcgcgagcccgcacaccgcgctgggcctctcccctgaggcgcctcgggtctcactgcaggatcccgaggagccgcggggctgcgggcgcgggccggggagggaagctgcttcgggcaggacggaagtcgcggtgcagagacgggaccggagcccggggtgccgctgcccgcccagctctgccgggcgccagaaaggaccgagggccgcgccgcgccgcgccagcagggacccgggtccgccctcgggagccgaccgctgggagcccggggcccggggccgccacagccccttcccttctccagacccccggcggcgcaactcaccatttcccagcttccggggtgtcccgacatcctccctgcgaatcccccagtacatgcaggtcacaggagggccccggctgcggcagagcctcctgaaccgccgagagtgaaggagaagcgcagggctactgaccgagacacgcacgtgcgggcacgagagacaaaggccgggcacacccggaagccgcctcgggttttctagcggagcgccggattaggcagtccccgccccggtgcccctgattgggtagggcctcaggccccgccccctcagactcttagtgacaggtgacagctcccgcgcgtgtctgaatgaggcagcgttctggctacagctcttctccaagagggtttcctctctgggttgggacccagccttgcctaggggacattcatttatatacacttaaccttgtatacaatgttacattcatttgtgaataatatatatgatatttaaaataggaaacaatataataataattcttttaaaatttcagacttattaaccttcatggcctctggtcttctgaggaagcagtctgaggagcccgagttttgaaaagggaagcaatcctccaaggctgcgatttccacagaaatcacatgtgagccacaggtgtcattttaaaatttctagtagcaacagaaacgaggaataaacaggtaaaattgattgcaatactttatttaactcaatatatacaaaatattataatttaaatatatgataaatataatattaatgaagtattttttgttgttctgttttttggtactaaatctttcaaagtcactctgcgttttaaacttccagcatgtaccgattcagaccagccacattctaggtgctaagtagacccctgtgggcaatgactgtcacactgaagtgcagttttgagggctctggttcccctgacctcagggagtgaagggcccgaacccctcttttctgctagaggtgagggaatgccctccttctgctaacatctctcctcaggcccaagggtggcagagacagtgcccagagagagaagtgggctgcaataaagaagtatctagagggagtctactatttcccacctgctcttgccaggggcccagcctcttctatagataagacagtgaaaaaaagatgaggggccccaggagaagaaaacccatgtcttcagatttgtccacagccttaacctcaggactttagatgtagagggaatacattaaagacaaacttctcattttgcaatttggctttggccctaatggtcaggctgtggttttctgtttcctcctgtggtgtggaatttaagtgtgtgagtttaagcacaaatcacatgcatgtctacgtgcacttctgtatggctcaacaccgtctaaccagaaatccaactttacataaagggaaaaggaaatcagtacatacagggtgccttgtgtttgcctggtaaattgcaatcaacatgtcattgaatcctggcatcctgtctgcactaggtgtacgtattacctattgcttcacagtaaaattccccaaaacgtattagattgagctggtccaccttctaggctgggctcaagtgagccattcttctggtctctgctgggccctttcaggcacgtgtggtcagctgctggttgactaggcaatgctgcttctgagggtgagctgcctgtcaactgtggcactttggttttcctccctatagtatctcatcctctagcaggctaacatggacttgttattatggagatgacagggttgtgaaataaaaagcagaagcattcaagagcttttgtgcctcggccccaaactggcacatggtcatattcacagctttctactgccagagcaaataaggccagtgagattcaaggtttgggaaacagattctgcctctcaatgaaagcagctataaaagcacatcacaaagggcataaatacaggaagggatgaagagttgctgccatttttgcaatcagtatcatgccttttcttgcagatgaggtttatataactttccaagacaaggaagttgtgcaaagcctcacagctactaagaggctgggctgggaccaggattaacttttcgtgactccaaagcccatgcacctctgcaagccacacgaatcaagcagcttctctaaacctttgaagtcctggaaagtaactc

SEQ ID NO: 2469 - DNA, 4001 bp, Homo sapiens
gctgctggcagttggtaaatatcttcttttctttgaaaactgcatggcatcatcataattactacttatctgaccttgtttgccacttgtactttggagaagaccaatggtctccacactattatttgatactatgccaagtgagccacttggttttccagacaaggatttctgtcctactatgtctggtaatggtgacacaaagttaaggtagtttttatctgtattctttctgcttcctttcttaaagatcaattttggcaccctcttctgcagttcatctattccagtgccaattatgcctccactggaagacacggtaggcatttctactgagtaactctgcatgtttatattatttgaaatttgcgattcatttgttttaccggtcttctgttccttattttcaatagctatgctttttgactttgtttttctccttgaagaacttgtatttccctgagacaacacagccagattacccatattggtatggtttgatgacccaggttctgcactagtggctcctttaactatgacttcaccacatgtgcgcctgtgcttcaacaatctatcagtccttgaaaaatactgttggcaagtgtcacacttatatggcttttctccactatgtgtcctcttgtgtctctccatatggtacttctgaataaacttcatgctgcactgatcacatccaaatggcttctctctactatgaattttctcatgtctctgtagtaggtatttctgaatgaaacccatactacactggctgcactggaaaggtctttctcctgtatgaatgaggacatgtctccgcaggtgataggagcttcggaaagcagcactacagtgatcacagatatgaggtttctgacttggggagaggatggcaccttctccatctccaaccaaagaaggtttggaagatgcacttggcttcctcttggctttgattccctgagattctggctttggcctttttgcctttttgacattagtgtcctgctttggctcctcagtgccatggtggtcatcagtcctgctactgctgctgagtaatacgtcacggtggtgctgggctggttgctgctggacatgctggtggagaatactgaggtcctggatgacgccgtgactccccccttcaccgcctcctaggcctggagacctctcttcagctccagcgaacagccccccatagtggtggtggtgatggtggtggtgggactgctgctcctcaggatccgcgggtttctcctgtttgatgctaaccaaagactgcaagaacccccaggaggtcctctgcgaggggaaggccgcggctgacgccgccggctccttcttgaaagtcatgtccggggctggcggaggggggggctcagcggccggggctgcggaggtagaggaggataacacgcattgcgggggaggggcggccgaccccgccggccgggtgaagctggtgaccgggggaagacggtggttgaacataaccataccctggggaaaggtgggttccatctctgccctcctgccgctgctgccgccgccgccgccgccgccactaccaccgccgccggagccgctaccaccgctactgccggtacctccgccgccactcaggaacccactgccgattttcataccccggaggaggcctggctgaagaaaggaggaggaagagggaagagggaggaaaggaggtggaaccgggccccgggccgggaccaccgcagcgctaaggaccccgccgcgccgccgcccagaccgcaacgcgcccagcactaattcccagcccagtcgcctccggcaccggcacgcatggtcctgcgactcttccccaggcctcgccctctccctcctggacccaccggcaatacttacgggtcccgccgccgccgcagccgccgtcgcctccagttaataaaaataacgccgtcctctccacaatggaattaaaagcctcccgtgtactgcgcagccgcggcgcagtgtctgctgggaactcctcgacccggccagaggggagggctaaggagccagggcgcctgcgccgcagcttccgcccggcctgcctgtcaatcactggggccgttgggcggaggcgggggagcaagggcaggggaggcggggatttggagccctgctaaaaaggggctttcgaggcgaacaggcgtgattggtgggctgcactgaaggagatgaaagtggttgagggtttctgggggaaagacgctcaggaggtggaacccaaggggcgggaagttacgggggactgtactacagcgtggcgtgggagatgcagagaaaggggctggaagagaaggtgagggaaactgaggattcaatgttagggctttcttcactctaggttttgcaatccaggtcttgaaataaaattcaaacctagaagtggatcattgagggcacttttgattctatcaagaagcattcaactccaaatgctcaacatttattaaaacaggtgcttatgttatccctttgaatttggaagcactaataatgggcgcatatcctttgcatttatgggaggagcctgctttgaaaccgcaattagtggtaccgttgcaacaaaaaaaaaaaaaagaaaaagaaaaaaacttgtcttactgccaaccttcctgaaggctactggaagaggaaaccgagcgtaatccaggtgcagcagtcctgtaaaacacgcccacacacatacttcattatcattacatcttatttaaatgcccccgtaccttagcctggctaatcagtctgtttgccacgttatgaatgcctggccctttatattgtttatgaaaaattaaccaccaggccattctaagagctctgctaggatcaactctttcctcgccagtacagaataccgagaaactcattgcaaatttagaaatttttcttgtaagggaaaattatgaagtaaaatcttaaaatcaaagttatatcaacaaaatcaaacaacaaatatttattcagtgtctaatgtacacaaggcactcgatttcatgttaagcatgcagaaatctaaaccagacactttcctagcaaaggatatttataaatgagaaattttaaataaaagaactagaactatgacaacagcttatttacatagtatgttttcttaatgaagttacatgtacatcacaatgtttctagctaaataacttctcataattaaataataaattctctgggaaatttcacaatcgaaaccatagggattatttactaatacttatggacctctctcagcctgccctaaaaattttacagacaatatttaatgagaattttgagataagaagaaattgctttttttctaatcccatgaaacaacatgtaagtattccaccacttaaactgacactttaatactgtcaagtatagttgtgatattgtgaaatatatatttggactttgaaccgttttgtggcatacaactgctaaaaatccttggaatctgcaaagtaataaatgtctttttgtatgctaatgaagcgactgatgatggctggcaacccctaggtagcttcaggatgggggctggtcaccggaaagaccaaggcaggattagagtttgggactttcagtcccaccccccgacctccggggaggagagagggattgaaggttaagttgatcttcaatggccaatgatttaatcaatcatgcctgtgtaatgaagccttcataaaaacctaaaaaaggacggggtttggagagcttcctgtaagcgaacccgtgaaggttccaggaggatggcgcacccggaaagggcgtggaagctccgcgccccttcccacagactttcccccatccatctcttcatctggtgttcatcgatagcctttgtaatgtccttaatagtaaaccggaaaacgtaagtgtttgcctgggttctatgagctgctctagcaaattaatcaagcccaaggaaggggtcatgggaaccccgatttacagctggtcagtcagaa

SEQ ID NO: 2470 - DNA, 4001 bp, Homo sapiens
tccaaatacagcagtggtatatttgggcagtgagacagggcgtatttcatcactaatattgtttagaatttctatcactgacactgtttagaattctggcatatggcaataacagaaagcagacatactacattttattattgtttttcaattctccatagaaatggattcccttattgccttgggtggggagtggaaagaactgtttctactgccccacctccactttgttagcctctgctataccttgggtgttggcattatcatcaaactacagcatgaaaatacaataatatattttttattttcactcccaactctggccacttcaaatattcatagttttttgttttgttgttggttttttgttttttttttttcagacgaagtttggctcttgttgcccaggctagagtgcaatggcacgatctcggctcactgcaaccttcgcctcccgggttcaagggattcttctgcctccgcctcccaaagtgctgagattacaggtgtgagccatcgtgcccagcccaaatattcatagtttaaaggtatctacatcaaaatgagttaaagtccaaccaaaacaaacaaaaccacgagagtgtgctactcttaagagctgaacttactatttcaaagtaactgaaaagtatctacaagagggctattccagtcccctttcacaaatctgtacctagatatgaaagctttaattctttgttgcatgaaatgttatgaaaaatcaaaagctcatcgagtaagacatatgctgagatcacacctcatttaaagatcatttttttggtggggttaaaagtttacagcctacttagtgaactggttttacttaagcatgcctggttactcaggattaaatccagtttaatcacataagtcctttcccatgtctccctaatgttgtcactacataccactttatcttgacaccaattccaagcaaggtttgaaaacaaaagtgaagaccaaattaatattactttgtgaccctgtaaaagtggtttaaagaattagtatctgagacaactgaaaagtattgctaaaatacagtttatttaatccgtaagtcaaacacttacaaggctgtgtacaggtctaaatgtgaaggacatttgatgcttgctgtgccaaaattctgattaacttaaatcctacctacacacgatccaaagaaaagtgctttggttcacataaatatttcaagttagggattaataagcaggtaatttttggtgataaacaccccagtttactaaccaggaaacatcttgctttccattttgcatagatatttatctatacatatcacttacagacaccctttcaactcatcttaaaccgggacaaacagaaacatcactgtgaacaagcctctgaaaattctatctggcaagaagtaacccgaggctgaggattaactaaacggacggtctgggtcgctgccctgtggggcgaatgcgagactaggtgggtgaggccgcactcgcccgtttgcccgagaccgggaagttggagacgtcggggcaatttccactaccaggggccaaggcgagtctggggctccagcccggaggctctcgcgctctaggcgcgtcctaccggacaccgagttctcttgtctccgccggcagcgggcgccgagcgggccgaatcggggcgcgtgggtccccaaagaggccgactccgggcgctgggcccggggcgggcgggcggcctccgggcccgcagaacaaagcccacacggccatcttgagacggtaaacagaccccctgcgtaggccaccccgcctcctgccagctgcgccgaccagccagaggcagcgcttaccgtcctcgaagtccatggcagaggctgagggccgtcggccttggcggcgctaggctgagctatggccggcggcgagcgtccgcgacccgcgattccacacgatcactccgcgcgaccgagagcggcgcgctaccagcccgggagccgcaggccacagcgaggctggggaggcggggccgaccggcgctaccagccccatcggcgcggcctgctattggctgacgcgggctggtgggcgggccctcgcgtggggggcgggaagcaggtccgctgtcacgctcggaggtgctgaccctctggagccgctgacggggaaggaaggtaaaaaaggagcgctaaagattggcgggggttgtgggaaagcaagccgagtgtacgggaagggccggctgcggcccgccatgtttgaacctggcaagagcgaaagaagccggttggaatgccttcttcctgcccaaactaataaaaccgcatgcctaccttttgcttagtattggctagggatgactaatcataacatttgtaagtacttacggggtttcctccatggagacacagaagtctgggacgtttctagaagcctgtggcaaatttgaaaagcaagatacaaaatagcgtatggagtctgattatcgctatgtcaataaattttcttaaaggacaaagcactgaaataaaatggaaataataattcttttaaaaaatttttaaattatttttatagagatgggggttttgccatgttgcccaagcaggtctccaactcctggactcaagcgatccccccacccccagccccgtctccgcctcccaaagtgttaggatcacaggcgtgagccaatgcgacccgcctggaaagaattctaaaacatggcctgcttggccaccgcccaggatctgcaagctgcgcgcccacaagtttcggcacccatttggactttcacaatcggagatggcagtggtgaaggcatcaacatcaaaagctaccaggccttggtattctcatccagtatatgcaagatactggcaacattatcatcaagcaatggcttggatgcaaagccaccacaatgcctacaggaaggcggtggaatcctgtttcagtcttccatggttcttccttcctgcgcttcttccccaaagctcttacgataaccaggctgcgtatcctcagtccttctatgaccatcatgtggcctagcaggactccccctgcagttcttcacatttcagagggtctgggcaacatccacatggcagcagtaggatccaggcatccacaagagaagaccaagccttatccaaggaggaagagatggagaccgagtcagatgcagaggtagcatgtgacctgagcaatatggaaatcaccgaagagctccgccagtactttgcagagacagagaggcacagagaagaactactgcggcggcaacagctggatgcggagcgcctgaacagctacgtgaacgctgaacacgacctgtactgcaacacccgccggtcggtagaggccccagctgagaggcctggtgagcggcgccaggccgaaatgaagcgtttgtactgggacagcgccgccaagatccaggccatggaggctaacgtgcagctgagctttgacaagcactgtgatccaaagcagcctaattactggccggtcatccccccgaagttctgagctcggggcacagggcacccagcctcttcctcttccttttggatacgcgctcttcatctctccttctgtacatttctcagggaaaggggactttgtactgaggtacaggcacgttcaccacagtcccagtgggcctgtcacggggtggatgtactgtgccagccacttggaggtcggcaggacatattctgttgccaacatgataaattttatcctgacataaaatgataattttgtatatattatactggttttttatgttgtcagtaacagttcaattcattaaagttcttgcctagaaaaaaaaaaaagaattctaaaacatgaacgatgattctttttgtgatgactttttatatacacatgattatgtgttcttctatatctccaaattcttgagcactttcataatgtaaaatatatatttggcctaaaacaagatttattatttattaatgattagtgtttgttaaa

SEQ ID NO: 2471 - DNA, 4001 bp, Homo sapiens
tagcgtgacttcaggcaagtcacttcctctctctggacctcagttcctccatctaaaaaccacctggcttggtaccctctggccaagacatgccatgttccacagccctgaacccctaaccccagctttcaacccccgactctggcttctgggagctcactctgtctagtggagccaggacacaaaccaggagtgagactagaagggtctcccctccaagaaatgctggggtaggggacacatgagaggctaggcccaacactgccccagtgccttggacagcaccagtcaccccagaccttgtgggcctggccttcagatccccctcggcagcctgcggagccagcaggccctgacctgtccagcaagatacttcaggaacttaaccgaagtccaaagtgcttctacctcccgggcgtagggcaggagtggcagaaaggaataagagcatactacaggggtgaggctcacaccgaggaggtctagcaaaccagactacctttcctgccccttccctcagacgggacccactgggccgcaggcctgcacccaaccaaaagttcatcatagggtggggtcggggaagacattaccaccagctgccacctctgggggcaggaggaccaccaggttggggagggggctctccaactgcaaagggccaagctcacttgcctcagggtccaagggtcaccccagggcttgggcgagattccagcctacacggggggtcctggccacccatgaaggagacaggcccactgccacacacacagctcccgaaggttccacactgctcgagggcagggtggtgggacagcaggattatttcctcatgccaggggtctttgctggaaatcctggacccattctgagcccctcttgccggccctctcccccagatctgaggatctagctccttacaatgccatgtttatagagccccttccaaataaatgtttcccagttcccccaaaactcccatcctcaaccctccacatccgcccccccacccccatcccgcgcagctctgaggaaaccggcagttaacttttcccaaaaatcctgcaaaggcagctggctgggggagaaatgggcctcgagatcctttcgcggcatttcaccgccttccaaaaaaaaaaaaaaagaaagaaagaaagaaagagaagcaaagcaaagcaaactttcggagttaactttaaattcccagccctcccccctcaaatcgcccggcagcttccctttttttttttctttaaagtgcaattgcattgtgtctcacctccccgaaaggctcgcggctctcgccaaagaaaaggaaaaaagccaacccttcgggtgccccctctgcttccagccgcctctcccacattctcagacagttttattaaaattttcagacaaaagaaaaacaaaaatggcagcctggcttatttttaaaacaggacagggacgccatattctgcagatctgcaaaaaaagggagaaatccggcactggctgctccaccgggccggctgcaaagtgcgcgaaccgcgccgtttgcaatccgtttatttgcattatgccccatgaatcattgtttaccggagaattgcagcagggtttgaatagcccggcttaagaaaacacacacacacgcgcgcgcacacacacacacgcacacacactcggagaccagccccagacacgccgcgggagacacttcctaccccgcgcgccccgctgccgccgccgccgccgccgctctgggccgggcccgaggcgcaggcggccccgggccctcggagcgccccggcccgcgctgacagcgcccgcgccccggcccggcccccgcccgcaactcggcgcaactttcccgcgggcaggcgcccgccgccgctgggcccgctccccgcgcgccccgggcccgcacggacctggctgtgctggcggcgcctccgggacgcggccgcagccccgcgcccggcggcccgagcagggccgggctggggctccggcacaggctccgggctcgggctccggctctggctcgctgcggagccgcgcgcaaaccttccgggtcgcctgctgttcacttctgggttctgcaagcgccgaggcggcggcggcggcggcggcgggaggctgggtctgcagcgccgcgcggcccccagtgcgctcggcgagcccccgcgccaggcgcccggctccgggggggccgcgtcgggcccccgcctctccggctgcgcagcccgtccggccccgggggctcccgcgagtgggcagcgccgggcgctggcgactgcgcgagaggggagggggccgggcggggggcgggggcgggccgcgcgctggggcccccactcgggccccggggcctcgtctcgcgctcgccgtcgccgccgccgccgccgccgccaccgcctggcaaagttgcgctgcgccccccgcccgcgccgcgccggaggcagagccacaaaggaactcctcgcccccctccgcccgcctgagccgcgcggggagggcaccggcgcccggccctaggacagccccttccccagcgcgggggctcccggggccccggcggccgtggccattgtcctgcccaggcccggcggccgcctcgccaccccactcctgggtgatggcaggctggggacttgggcctggcgggccacggccctgaccaggccgagcccgcgcggtgccaggctgcccctgggggtctccctcgaagacggccgcctggaggggacccccaggatggaccctcacccctgataacgacctgctcaaaatccaggccgattttttttttaagacgaggacataggggtggggagtagaagtttgcacaggcccagccacccctccctagccctaggccggatccccgacggatggggcggcccgaagctggcagtggctcctctcgcagagtctatcagaggtggcaccggctgtcccccggctccagacctcagagccatctgtgtgactcctcctcccgcctcaccctccccagccaatcagtcaccaagtcctcctgattcggcctcccgagctgtgtcagcttccaaacttacacttctacctgaggaggcagccggttccaggatcccttcaccggcttagatttctatggcatccaccaccccccgaccgctgggccaggatggatcagggctggccctgccctcagggagcgcacagtcccccgggaagggcacagagataaacaatcatctgccagcgtttgtcctccaggaagcatttccaaattcagtaaatattcatagaggacctagtaaacatcaaccactgtttttaatagctggttggctggagcacagctattaaaaaactggataatgcccctgccctcacgaagattctagtccagcacaggatggcaaacactgtgagcaactcgaagacagggcccatagggactgcttgttctcaatccccaagcacagtgcctggcacagagcaggggcacaagaaatctgtgtggcatgaattagttggaatgttaaagcatggcgggagagcacagaggaggccactctttcctggagaggtggagagggcttcagaaattggctctggggtgagcgaggtggggaagaaaggaaggccttccagtttccagaaatgacgataatcagaggaccaacccattgttgagaaattcaatgagataataaattaataaacgggagagaagagacaaattgtctgtgcagaagaattccaaataatttatgtagacaatcagggagggggagcatcactccctactctttaggagtaggctgcagatagtgacgtcctccccaagcgcacaatatggaaagggagaggaaaggagtaactttacagggagagagctgatgactgctactcagacaagtgatcaaggccaagatcaacagccacaaatcatgttgatatgtgcttgatactatgtgatgaaaatgacactttacctttgtggtcttcctcccaataaccca

SEQ ID NO: 2472 - DNA, 4001 bp, Homo sapiens
agcgaattactaatcccagggaatttcccacagggacttgcagagcagagaaacgccggacgaggtgggtaagcagagacaaggtctgagaagccacctccggcttacctgggacccagccatgagcagggtggctgccatctcgagcacaagggttcgcctccagggagagagagcaggaaaagcagctagcagacagcgctgaaggaggcgaaaagcagggcgtgaggcacggaaaacaggccctgcccactccccagggctggagttctggccccaaggcgggcagggagggccctggaccagggccgggtcactctcctccctgaccctcgagcgcgacccgccctctgcgtctccgccacagcggggtggaggcaatgccggaatctactaggacagccccctggctgggtccctcccgcgccgggggttagaccgctgctgtctcagggaggaggtgctcagctcagcccagggaacgcctccgctctgccatctcgaggccgggtcctttccggcagctgcctcagccaatcagcgagcgaagttcgtgaaccactctgccaatcagaggcggaacactatgcccgcctcccacagcctggccaagagcctctagtgcgcctgtgcctgcccccatggcctgccgggagttggagttccactcccgcgtacaaaagctagccagaggccaaaagccaaggagggaaaagaacaaaagggtgaaaaagtaagcgcgtcctcccagtcagggcggagtattctcgcttttttcttatggagactgcagcacgattaagctagaggctgccctgcttcgcctcacgtccctagaagcttctcttgagtcgggccttattatctgcgaagtcaggccaatttaggcgctggcctgtgttgagctgagctagaatgagcccctgcttgacagcacaggctggagagggaagcggcagccgcccactccccaggggagactcggaggccgcgctggaactttgagccccgcccacgcactacatctcccaacagcgcctgcggcggcgcggctctgtacgcaatacaactcccgagaggccccgcgccgccccgcgccggggcgactcgggagtgcggtcggcagtagagcctggcggtgtcttggcttcggcgctttaaccctgtaggggcgtgcgactgcgtccttctcaagggggcgcccctcgagcggcgggctgagtggcgtccagcggcggggaggcgaaaaccctgggggactcagaagcgggtggcggtgtagggcgtgtaaggaggagatagccaggcccctgcggggggggcgggccctccttagcgtcccagagggcttgtctgctacaggggctcccagcggcctcccgcaccgaagggaccctgggcgtctgaggccctgatccgggcgggccttcaggatgttagcagtccctgtccggttgaaggtaggaagccgaaaacccgagtgggggacgaacagacttacctcctgtcccgcaaaagatccactagatcgtcgtctccaaaacctgagagaccgcgaacgggttccagagccgcagcgttctctcagacctggcgttcaggaagattctagagagcacgggcaggtcccggaggtctcagacccgcaggtagatctcgaattcgtagacttgcaggcgaagcccagatatcgtaggctgatcctaaagactcagattcccgaggcctcagactcgcaggcagctcagaaaccacaggctcataggcagatccctgagaccacagaggctggccgagaaaccaccagcaactaagctgcattcagctggagttcctcggaacgggaggactcgcagctctccctttccccagccaggatgagggaattagacaatggaagtcgagcactggggaaagcaggcattctgcgtggggaagagctcccagctcgctgtagccttggagagggaagtgatggaaaaagaatatagcagcttattagggactcccaccctcttcaagttataaatatccccagaaccttggctacgtgcccggaagcctgttgtctctaactgtacaggagacttctctgcctgggctgggaaaggggcctttcttttgttttgcagatagatccacccactgaggaacttgaaaatttttttcaaacataactccaggccttgcttttattagtgagtgtcctgttcccagtgcccggttatttatgattaaattactgaagtgtctaaaaagaacagaaggacccaccccagccataatgcagactttcccattccttctctttccacccgcaactgtggggctaagaattcttaagatgtcacagaattataccatcctacctcatctaaagtcgatccgaggctggtccgatggtagtgggttaccagaacttaataacattaataactctaaagttagtatacaaccccccactgctaaatttggctataaaaataaaattgatctgagcaccatataaaatggaatcctggagggtcccctagaggcagtatccccagtggaaagagcgtgggcctcaaggtcagacaagcctggtttggaatccaggctgtgtatcctttggaaagtcattgaatccaggcccatttccttttctctaaaatgagggtcatcatacctaaggatgttgtgaggcgtgagtgagatgattaaagcgttccagagagtgcgctcttggatgatagccgttactttttattaaccctggctttggtggtaagggaaacttccagaaatgcttgtgggtatattggatagctcagaaaatctgggaaatcaaagtggctcaatagctgtgaggaactgtgggtgactttatcctcacatcgtgtttcttccagaaattcagacgcaacagaggttaggccagtttggtgggttccagtgagcggtgtgttgagcctagtagagcataggtacttggggttgccaaaaccccagcaagttgaggcttcacgctcagggaaacttctgggtcagaggttaataaccacgctccttggagcaaggaggaggggagcctttctgactagctgaagtaattgcaggtttctaactgggcctaaggtgagctgagggcttgagcccctcagcccagcgggggtcccttttcatcccttctctgacagattgctttgtaaactttcttaggccttccccccacccctttgccccagtgctttaagcccttctttgtcttcttgctgtttcttttattcctcaggcctgcggggcgggggcggggtggcgcccaggacgactccccgggctcagcttggctgcctgcctccttctgtaagtgctttttttttcttcacctgggaccctctagaggttggaaagagaagagaggctgggagcggatggaaagcatgactgcatctggagcccctggggggagtggggaagagggagtggaaggacagtggctgaggggcttcctgttgcagccttcagctggactcagggttggggtcactggaggaggaggtggcttcctgccccattgttctggactgcagtgtttcttgggaatacttactgtatgtggattttcagtaaccaacttggaaagctgtatttgttcccatgattcagcaaacaatgagtacctactgtgtgtagaagcagcaggacagcctgtcatcactgggaaagaggccagaagagccgtttggccagggtctccaatttaggctttcaacattatctctaaagaaggttatacattatgtcggctccactggctgatgggatcaaagaccctccttgtatatccttaaacctgtactctattaccaggccactgtgcctgtggagcactgtaagttcctaccttttaataaattttataattatcttgtgagcagcacaattgtcatagttttttgtatcagaaacattaatttgttaaacattttaaaacatgccttgatgtgtgtaatcctgtt

SEQ ID NO: 2473 - DNA, 4001 bp, Homo sapiens
cagctcaagaatatactctttattctagttacacccagaccaaagtacagcaaagagagaagacaggcttgcagaccatgaaaaaaaaatcagctgccctctctaatagaatttgtgatctatttcagcattcttctggaacagcatttgacacactacaaatctatcatcatcaacactgaaacatctctagatgagaatctactcagctaaggaacttgaggcaaagctagggctctgaagccaaaacaaacacaaaaaggtggctttcgccctcccatgaacctgggttagaatcccctcatcttttagcaccctagagtaaaagcactagttacggggcatttatattctggcaagcactattatgccagacctgtttggtcagtgatctgtacaaacaggctggagattggaaaatgactcagggcacaagaaatctgaacgtctaagacgtgcagaagcagtttttttctttttagacaatatgacctggatgttcccatattcaaagatctgcctgaggactcaagtcaagccaatatccaattaagtgctttaaaaaatcaaaccactaggctgtgttgaaagaactaagtcattttgacacgatctcaaaaacgtggaggcaaagaaaggtagaatccttacttacctagtgagacaacatttccataattctcctgcataacatcccggtaaaggtccctctgtgcagcgtccagaggtctccattcttcccgggtgagatacatggccatatcttcaaacgtcacaggtgcctgaaatcacacgatacttccctactattctgtatttaggacttcttgaaattagaaacatgattagaaatattcaggaggaaaaatatattaaatgtgacctatagagtccaaataagaaataaacaagcaaaaaagagatgtggtaaagaaggcagcaatttatgagctgattgctctggtcccatggccagctatccctgccccactcaggaactttatcctctggctgtgactttctcaggacatatctggcacttgcatcgctccatacctttactcataatgttcctcttttcctggaatattcttctcacactagagaaattctactactctttaaggtcccgctgcagtactaactgttcttcaatgccccctacccctctgcacggctccactccccttggatgccccagatagacttaatcacgccgacttcttgggagtgattcccacactacagcactttgttcctacagcaagtagagcacttactacgttgtgccacgcttaagtggatgcgcctttctccctacagattgtgaactgtgagctgtgagctagaaggtagcgcccatctcgtccatcttttatctccccagtatttaaaggcatacagcaggtgttcgatatatgtttgtttgtgactatactggcctggtactaggcccctggaggcagaatatcgaagccagcgaattactaatcccagggaatttcccacagggacttgcagagcagagaaacgccggacgaggtgggtaagcagagacaaggtctgagaagccacctccggcttacctgggacccagccatgagcagggtggctgccatctcgagcacaagggttcgcctccagggagagagagcaggaaaagcagctagcagacagcgctgaaggaggcgaaaagcagggcgtgaggcacggaaaacaggccctgcccactccccagggctggagttctggccccaaggcgggcagggagggccctggaccagggccgggtcactctcctccctgaccctcgagcgcgacccgccctctgcgtctccgccacagcggggtggaggcaatgccggaatctactaggacagccccctggctgggtccctcccgcgccgggggttagaccgctgctgtctcagggaggaggtgctcagctcagcccagggaacgcctccgctctgccatctcgaggccgggtcctttccggcagctgcctcagccaatcagcgagcgaagttcgtgaaccactctgccaatcagaggcggaacactatgcccgcctcccacagcctggccaagagcctctagtgcgcctgtgcctgcccccatggcctgccgggagttggagttccactcccgcgtacaaaagctagccagaggccaaaagccaaggagggaaaagaacaaaagggtgaaaaagtaagcgcgtcctcccagtcagggcggagtattctcgcttttttcttatggagactgcagcacgattaagctagaggctgccctgcttcgcctcacgtccctagaagcttctcttgagtcgggccttattatctgcgaagtcaggccaatttaggcgctggcctgtgttgagctgagctagaatgagcccctgcttgacagcacaggctggagagggaagcggcagccgcccactccccaggggagactcggaggccgcgctggaactttgagccccgcccacgcactacatctcccaacagcgcctgcggcggcgcggctctgtacgcaatacaactcccgagaggccccgcgccgccccgcgccggggcgactcgggagtgcggtcggcagtagagcctggcggtgtcttggcttcggcgctttaaccctgtaggggcgtgcgactgcgtccttctcaagggggcgcccctcgagcggcgggctgagtggcgtccagcggcggggaggcgaaaaccctgggggactcagaagcgggtggcggtgtagggcgtgtaaggaggagatagccaggcccctgcggggggggcgggccctccttagcgtcccagagggcttgtctgctacaggggctcccagcggcctcccgcaccgaagggaccctgggcgtctgaggccctgatccgggcgggccttcaggatgttagcagtccctgtccggttgaaggtaggaagccgaaaacccgagtgggggacgaacagacttacctcctgtcccgcaaaagatccactagatcgtcgtctccaaaacctgagagaccgcgaacgggttccagagccgcagcgttctctcagacctggcgttcaggaagattctagagagcacgggcaggtcccggaggtctcagacccgcaggtagatctcgaattcgtagacttgcaggcgaagcccagatatcgtaggctgatcctaaagactcagattcccgaggcctcagactcgcaggcagctcagaaaccacaggctcataggcagatccctgagaccacagaggctggccgagaaaccaccagcaactaagctgcattcagctggagttcctcggaacgggaggactcgcagctctccctttccccagccaggatgagggaattagacaatggaagtcgagcactggggaaagcaggcattctgcgtggggaagagctcccagctcgctgtagccttggagagggaagtgatggaaaaagaatatagcagcttattagggactcccaccctcttcaagttataaatatccccagaaccttggctacgtgcccggaagcctgttgtctctaactgtacaggagacttctctgcctgggctgggaaaggggcctttcttttgttttgcagatagatccacccactgaggaacttgaaaatttttttcaaacataactccaggccttgcttttattagtgagtgtcctgttcccagtgcccggttatttatgattaaattactgaagtgtctaaaaagaacagaaggacccaccccagccataatgcagactttcccattccttctctttccacccgcaactgtggggctaagaattcttaagatgtcacagaattataccatcctacctcatctaaagtcgatccgaggctggtccgatggtagtgggttaccagaacttaataacattaataactctaaagttagtatacaaccccccactgctaaatttggctataaaaataaaattgatctgagcaccatataaaatggaatcctgga

SEQ ID NO: 2474 - DNA, 4001 bp, Homo sapiens
gagtgttggtgtggctggtctttacacacaggatgaaacagacagaaagatgccctccccccatcagtaccattacgtgtggattcccgttaagtgggtgactggatgaacaagacaggaaatctgggagaaagtggtggcatttcaacgtgacactgctgttttgagcatcccaggaaaccaacagcgccacatgcagatgtaatcaagacgctctggtaccttgggtggctgggtcctcctggagagatccgagatgggcaggccaagcaggccactatcttgaagctccggagccgaagtcactgttcttgttattaagacctttacaaatggagctggaatgacaaagacatgcatcggatgagccttcaagcacatccaggaatggaaaatccacccttctggtggcagagggctgatggtgctgcgtgctggatggacaacccagccagaatcagctttgcccagcagagtctgcaatgggaggcaagggaaaacatcacatgagacagctacatgcagtctaccagggacaaataacactgcatctagaagtatcagtggtttcctatgagccttctgccaattctgccctgaccttcaacctcgcctccaccctattctctatccttgccctcttcaaaccacattgaaggcaactgcacactcgccaaagcccttcctcggccaggacagaaaagtgggtccgtcactgcacagctcagccctcaaagaacccctggacactgcagctgccacacccccaaggtgggactcaggggtccctacacctccccgctggtgtgcagacaactagccgacacttttgccacaactagggtggcaagagaccagcaaccagtatacctggtgtttatgattcccactttagaacgctgggcccgtgaaagggcacatggggacactcacagtccccttctctgccatcaggcctctgtgatccttaggaccggcagtgcctgccactcccccatctgcacgaggttgtccagcgtggccgcgtcttaacctccaacagctcacaaggtgggaagggggactcgggcctcactcccatttcacagaaagacaagtgatgccagaaaagctacggaacaactgagtggttccagaaacacccactgctctgaatctctttgctttccaaagtaacaacatacacagaaacccatatgggggccgtggcggcgtcgggctggacgcattacagcgctccccaccaccggatcgcttccagggcggctccggcatctggagcccggggtgggccccgcccgccctgctcggcggccccctgcggcgcccatcacacacctgcagcgcccaggactactcaggcccgcccccccgagcaccggcgcccacccgggctgccactcggatcgtctccaaccagacggccgcgtccgtctttgtcacggcggcacctggcgcgtcggaggctcggaggagatgcctgatgaatgaactaacgtgagtgaggcggaggagggccccgcaggggcggagcgagctcccagcctttcgcggaggagggaccgagctggatcggcagaaagggaaggagaaggtcgctgtgggccagggaagggggagcccgccctccgcgccctcggtctccctcacacgcgcgtctcccgtctcgccggctccgggctcctcacctcacagcctggagctccctcccggcgtccggccgaaaaccctcctgtggcggcggaagtccagggcagccgtcctcatcctcccagcccgcccggccgggcgtactcgctgaggcggggtctccgcaggcgcccggctcctttcccggcccgtccagaccgcgtctcccgatcatccggaaagccacggctcggctcgggggcaaatggaggcgcctgaaaaacaatggtgttgctttctcccccgcccgcaccttcctgagcgctgggctctgggctgggaggcggcgccgcggaggccgggcgcgggccgaggagggcggggcggggccggccgcgggagccggggtgcactcaccgccgcggcgcgtccctgttggcgggcggcgcaggcctggccgccgcgggagcccgccggacgccgaggaaaggaaaggccggagccctccggctccctcccctgggacacttcctgctccgctctaggactggggaggtctccgcatctcagtggttcgctcccccgccccccggccgaggtgtgcgctgggggtgacatccgacacccccggcccgccccgctccgcgcgcgcctgggcctggccgccgggccgggggctttgtgggtcagccacgtcgccgcgcccgggcttccccgcgggcccgccggtccggaaggtcggcccggggctcttttctccgctgttctccttctctggcgcccccaggacacgcggccagtggacgcccggaacggccgaccgggagtcgcggctggggatggaagctggaattgggggtgcgggatggagcggagagaggaggccccgcgcgccgtcggccgcctcatttcagactcccctgcgaccccccccccgccgccagccgaagcccgggccgcccagcccctcctgccgctgcgggacgccgaaggtagcgctcacatccgcgccttccgggcctggcgcccacgtgcggagtccccgggttaggaaaggccgcgcatccggaggccacgcagagcctcggggcttgcgcagaggggctgcggtgagtcctgaccctgagtgggggtcacggggctcgttgctcgctgaagtgaacacggttgcagctgtgcacagtggcggagggagaggatgagggactctgacccaaggttatgtggcagtgaggggcaagcagaaatgggggcctccggaccccaccccgagacagggctgctggccgctgcactatgctgaatatagcccaaattcttacatgggtcgtccccggggaatgctcatttttcaggctccagagcttgagagaaagtgcgaacccggtccctgagcaggtctgattcccatggccccttcgccatctgctctgcaccgaaattggattctcctacgcagaggagaaggtggagaagattctccgtcttccggagggtagctactgccggtagctccgatttccttcggatcccctttcaagggcaagcagaaggaaatcagtttctccaaagaaagtggcccggctgagtaagtgggaacaaggtggttggactgaggcacgggatcctttagctccgttgctcttctaatcccgtggccctgggcaccgccacttcctcctctgaactgctggaataatcacttctgactagcagagttactgggagccgctgtttgtcagtgttcacattctgactttagcaggagatggagcgagcgaaggagtgaagcccttgtttgtgaacagtgattgtttcccggatgacagccagatgccgggcagggccacgcagatcttagctggagcctacaggtacaagtgagagccaccccctttgacgtaactggactggcatttacagaactcatgtacagcccactctcaggaacaccagccaggaaccgtgacatggaggagaggaattgggaggaaccgaggggtcatcaaaggctggtagggcttaggtgctctagcaaacatcctagtctgtggggttccagagctctggtgctacagctcccaaccctttgattggcccaggaactggctgttgagtgggcatccgtgttcatagctctgccccttgcaaccctaaagcagataaaatgcaggaggcagaaattgctggcagacagcatccaattaatccccactacccaattcagtttcttcccctgacctgacacgtccctgcccagctgtgcctcccactgttcaccttttgaggcacaaaacgggctgtttatgctgctgctgcatttagctcaaaacagggcttcagagtcaaggttctggactcaggcacccgga

SEQ ID NO: 2475 - DNA, 4001 bp, Homo sapiens
tggcaggatggtaggcagtgggggaagggaccagatttaaaggtccagttgctccgccccctgccagacctgggcaggcaggcgcgggtgagcatcctctgagagcttgggtcttgcgtatgtggaaggtcagagacccctctaccctagtttccacttcttggtgtcatgaagaccactggtcttcacgtccgctcccaccctacaggccgccagggagaccagtgccgcccaccatgcgatttcgacgcttgacccctggttacttccgggtgttacaggtaagtacccctgatcaacggtttctggcacgactgaccccttcctccccctaccatagctgggttgacacccccaacagccaggctgtcacgttccctgccgcctgagcaggcaggcccagatgggcagtgaggcgaaagggattggggtggaatctccctggggcaggaccggcgtccatgtctccttcccctagctacatctactcagccctttcccactccccaccttcctggcagtctcaactgacccctgaggcacaccctctgtgcacctccagatgcaggtagctggtgagctgaaggcagagccccggagtctgctggcaggagttgtggctacagtgctagctgtcctcggcctgggtggctcctgctatgccgtctggaagatggtggggcagcggcgggtgccacgggccccgtaacgaagaagagagactctcacttggatgctgggggtaggtgactcgggaggggggtgcaatctcagaagccttcttttctggggatcagtctctgtcagaagcaggacagagtaatctgatcccactcccgccaccccacactgcatcaggcctccatctgggtgctccagttcagatgctaggacctcagagggaaggcagagatagaccaagtggggagtagacaccctaggcctggtgtacagaaagtagtagagaagcccttccagggcaggagtttgagacagcggcctggaagttagagttggaggcaagttctctttgtccagttcctttatttggggcagggcaccaagaagaggccctccgctccccaaacccagaggcaaaaggggttggcacgctccctcccagcctagtccttgcgtcactgtccatgggcaattcctctgccctgcatcttcaggccatgtcaggtagaggtatccatctcagggacctcagtggacacttccgtgggcactgccagccgcctggggggcacataggatcccatacccgctgccctctccgcctcttcctgactgtagggctcgacgctcagctgcttcagcctgggagaaagaaaaacaggagttgggagctgaccaggtgagagccctatctgctgagcacccatccatcaatcctctccttactccttcataccttttcttgtggtctttggatcggaagtgggtcttcaggttggtggaatcgatgaagtacctcctgtaggaatggaagtgagaaggagagtgaggaggtgatagtctcccaagtgcacctatctccctagccctagcttgtccctgacgccaggatccgggtctgagaaacgggaggcgggcggacccacgggtcccaagagagaagactctgcgctgcctggggcttcaacttcacatctcccggccggtaccgcggaccctcctccgccccaggccgggctcgtccgggactcacgcgcaggccagacagcggtgcagaccgccccctggcaggtcggggtcgaactcggcgtttgggtcgggctggggtcgtgcggatccctgaggccgcagctcgcggtgaatctcatccaagtccggccgccgccgcttcgccttcatctgccgggctagagagtgcgctcggtgcgcgcctgtccggcgggagcgacccatggccagaaacagcccggccggccaaggggccaggagcagggcagggagcacacgtgtgagcacttccgggccgatcagctacgtcaggccacgccggggggctaggcaggctcggccggaccgcctctgatgacgtcactctcggccagcggctcgagcgccgccaggcggccgtcgacgtcagtgaccgagctcaggacgggctcccagaagtgtgcccactgaagggcatggccccgcgggccctcgctggggaggcgcggggtggtgcgtgcgcctgggggtttcggggccgtcttgctgccctgctcttcctggcctggtccaaccagtatcagtgccaacctgtactcctgtcatcccttcctgtttcccagaccttggactccgcggtgggggtgggatgctttatctctggaaagcactgataaatgtctgtgtcatgaataaattagtaaatgactgagagtgaataagtttggaatcccagccccaccagggcttcccgagataatctccagtccctgaaaaagccctcacttctccgggctcccgttattcccttgagtctccatcctctctctgaccccaaccaaatccgtgaagggtgttcctccccagagagtgcagtcctcaggcatccagactccagagggatcagttcctctcacaagtactcatagaaggacctctccatctttgcctcctttctctaagccctgggctcccagaggtgggctggcagcaaaggcctaggtgttgcatgctcagagtggctagagggcctttccccattcacaggagcctggtgcctcccaggctggccagagccaactcagctggaaggggccagaggagcttagcaataattcaggggctccagctctttggagtctgttgccaggaaacaaggagacaggcacgtgtatccctggggagaggaatcagtttccagcccagacaaaggagtgaaatgtaagcccaaggtgcccactgggggcctgcggaccttcctgctccagttcattgaggctaagtagggacacagggtggagccctgctgaggacacaactagtatgactacagtcacaggggctccagtgtgggtcccagacctcaggattttgtgaatggaagaagattttcctggaggcatgctaagagatgaacaactcaagtactcctaggcccaggaagaaagcctctctagagacaaatgacttcattattcttggccaatatgggtcaagacaaggggctaaggtggcagaagcttgttccatcccccactccccgactcctttggatcaggttcacctcctgggcactgtgccagctggggaggctggtgcatctttaatgaagtcactggatccctcggacaggctcttggcctcaccaagttcctagagccagactcactggtatccactgagccaccaccttcctgtgcttgcgtgccaggccccttccccctgcagccatgaaccaggccttctggaaaacctacaagtccaaagtgctacagaccctgagtggggaatctgaagaagacctggcagaggaggtgggtgccatccatgcatggtgggtggagcatgtgcagaggggcagcaggaatgagcagtatgaagtggggcacaggataggcttggaggtgggggggccacatttgtgcagatgccacattcagggatggtaaaaaccatggtgcagcatcagaaagccaggacattcaagaaaactgaggaagaaaagacttagggaccatgggaggagtggccactgtctccaaagatctcgaggctgccacatggaagagattcttctaggaccagtgggcagtaggcacacgggcacacttagctggacacaactttctaatgggagcagaagtaggagtgatgtagtgagccccatgttactagaggtagggggagtggcgcctgtactagaaaggtcactgcagcagcatcagatcaaagccatacttagaccatgctttgttctgacattacaaaaaacaagcaaacaaacaacaacaacaaaaaacaggctgggccgggcacggtggctcatgcctgta

SEQ ID NO: 2476 - DNA, 4001 bp, Homo sapiens
aaatgaaagttaactaatgttgaaaaattcaaatttcagtttgaacacagagatctacacagtgatctaatgtgtttaaatatccctccaaccaaggaattctgttaattgccaacacaaaacattaggtgtttcaaaattttgtacttcatgagttaataccaacacaaagtatgatataattgcagtataactttaatttgttagaaattgtaagacttttaaaagcaatacataccactgcattaatactaatcaagctttatgcttcaccaattaaaatgtctaagctagattatagccttattataaaaacgaggtttttcttagcaagcctaccaaaatgcaatattactgccatcaagttccctagatacttacacatgcaactgaaggcaaacagccaggtttcctttctttgagaaactttagttgtctattttttgaaatgttttccttctcatgggaccaaaaaatgtttacaactaaagcaaactactgcagggagggaatacacaattaaaacaaatctaccatccagatgcaacaagcgtggaattaggactggacaggatagtcggcggtgttgtgatacttctgttgaaattattaacaagacaagaccatcattcgcccccaattatgtttatcccctcgttgagtttgatgatcacacaaaatctgaagtctaaatataaacgtttttatattcaaagtcaatattcaagaaaacttttccactaatgttgctaaaccatagatggatcccaacaagagttgtctgtagaagtctcgtaacaagtaacctttagctccaccacctaagtttccaatcactgagaagagtctgggacaactcatcttcaggttcacgggagaagtggagcacacctgctttcctctggcagagtaacttcccagggacacaaaggccagagaatcagacctggagaggcaaaaagctttagctggacacccaccaagcccctggcaacccaaacacttcgagcgatttacctcttgctgttacttcccaggcacctagccgcataagatcttgcaggacggggggaggggagggctatgcggtcctgtcccaagtaaggggaggggtgtagacagttaatgccagagccagcgtttctggccacaaccgagcagcctcaacgagaggggttggtgactgctctcggcccgccccgttactcagtgcattgcaatggcgaccgccaggctccccaagccgcctgatctcggccccttccccctactgctcactggctgctcggcttcatgtgactaaacaaaacccccaagtctagtgcccagctcagcccctttgtgtccgctaccggatcctccgacgccgcagcggaaagccccccccccatccccccgccgagtcccgccccgcggcggcggccgccgctcacctcaggctccgtggcccccagcgaccgccgcggccgccgcctccccgaacccggggcccgggctccttgtgtagcaccaactccgcctcctcggccgccgccgccatcttagcctgtgcggcaaaatgcgtccttttggatggctgggacccagcctagggcgtagctccccgggcccgagagccggaggccgggtcccccaagttcttccgccaccctcagtcccgccgctgccacagcccagaggcccgaaacccactcgggtcccagcgaatctgaccaaataacccctgaaactcacagtttggtgccgtgtgcgtcaaaccggggcgacgttgggagcacgcggcgtccccgcgtcacacgccgctctgtacgctactcggctccagcggcccccctccgctccccgcttttcgcctccagccccggttcccacggcgcaggcgcgctgctttcccgcctctgccgggctgcgggccgcgggggtggccagcgaggagctcccgggaagcttcgcgctggtggagcgtctgggccaattagacaaacgagggcagcggaaacagtgcaccactgttctcgggtgccagaaaccaaacaaggtcacctcccccagcgctgacctaatcactcccaaggaggttcccgccccaaagtaggcacgctccaaatatggtggtgcccaaactctgcaagacccaagcactaggcatgcctaggccctttaaggtggaacaggcccaggtttgagttccacgatcacgagcgtgcaaaaatctctgttattttcctcttgttgaggaaaacagcaatatttgccaatcacaactgtggagtaatggcagagggaaggttttaggatcttaagggggcagattgttgggagttgcttgatggccaggcaaagcatcaagtgtgacatctcagttacccggacagcctgccctgaaaggtggccgaggtttgctccagtttgactctctgaggatactctctccctgcattactgaaagtgtcgtggttctacgaattaaagttatataagaagcatgtgagatgctggttaacccttcagagaatcagtccctagagggttctggaaattttcatttttaacaagacttcaccacaggatcctggggcagagaaacactgagtgggctattcttttgtttttcgactgagccaacgagaaactgctaacatgtttaagattaaccaagagttcttgagaaatctactggtcccgccttaattatttggcttctctgaacctctgtttactcatttaaaaatttaaaaataaaaaagttttccttagttgtacagctgtcattactgtggccctccaaaccctcaagatgttattgacattcggaagaatataccataactgcatttatttgacaagaatgagaaacattctctttcctatggaatgatgccttcagcaacagcaaacgtagattccaaacaacaaatatttgactaaacacattaattgcttcattacttaatagctaacacttttgagtgcttactgtgtaccaggcattgttctaacttgctcgatttcattgtaacccaatgagacaaagaggagtaaggtgattttctcgaagtcatacagttctttgggctctttaaaatgcaaatctcctgtcttcatttacacaaatgtgtaaacaataaaatataaatacgtatatatttgcagtcaatgggggaggggtgctctttggatcatttcgtttgcagaatccattaaaattggacattctcagtttactattggacttactacaaaatattatgtactatggaaattcttacattatatcactgtaaaagcagttactaagaaaataactgtcattaatgtataccactgactaatgtgcagacaaatcacacaagcaaatagaatcattcagaactcagccatgatcaggaacttgtctcactaatgaagctgttttttacactagaactcagcaactgaattgtaatactgtggaagtcataatagcagtaaaagtaatcatagtaattataatagtagaagtagtaatagttgatgaaacgctgtacaaaatggatctcaaaagcttctatgaatggcagaaaatataatgacagaaagcttgaataaggtaatgcgaaaagaaaaaaaaatacacgtgagttctctgtctagccgcagacgtgggtctctgttctgcaggatggggtttgtaaaagttattaagaataaggcctactttaagagatatcaagtgaaatttagaagacgacgagagggtaaaactgattactatgctcagaaacacttggtgatacaggataaaaatgaatacaacatacccaaatacaggatgatagttcgtggaacaaacagagtatcatttgtcagattgcttatgcccgtacagagggggatatgatagtctgcacagcatatgtacacgaactgccaaaatatggtgtgaaggttgacctgacaaattatgctgcagcgtattgtactggcctgctgctggaccgcaggcttctcaataggtttga

SEQ ID NO: 2477 - DNA, 4001 bp, Homo sapiens
tacctgattttgtttcactgaaagtcactttaaaaaccaagttaaccacagaatatgaaagtttttttgtttttttgttttgagatgtagtcttgctgtgtcaccagactggagtgcagtgccacgatctcagctctctgcaacctctgccttccgggttcaagtgattctcctgcctcagcctcccgagtaggtgggactataggcaccaccacgcccaggaaatttttacatttttagtagagacggggtttcaccatgttagccaggatggtctcgatctcttgacctcgtgatctgctcgcctcagcctcccaaagtgctgggattacaggcgtgagccaccgtgccaggccaatatgaaagtttttaacttattgtcacagaagttctcatgaacctaacaatatttaattaacaagtattctcaataacattcccttgtttttttaaccattagttgtagatattcaccttctcatcccagcaatatgacaaatacaaacagcaatgggtagaggctgaaaggcaattttccattatgccactaacttaatcatctctggtcctcaatatattgtaaaagaggagggtaagagcagttgttctttgatattgcttccactgtaaaactttatgatccaggaatacatttgctaatgttaatgcatctcctattcattaatacaagactgttctgtattagaagctaaaaaaagagaaaatatatatctgaaaagaacaaggaaatgaaagttaactaatgttgaaaaattcaaatttcagtttgaacacagagatctacacagtgatctaatgtgtttaaatatccctccaaccaaggaattctgttaattgccaacacaaaacattaggtgtttcaaaattttgtacttcatgagttaataccaacacaaagtatgatataattgcagtataactttaatttgttagaaattgtaagacttttaaaagcaatacataccactgcattaatactaatcaagctttatgcttcaccaattaaaatgtctaagctagattatagccttattataaaaacgaggtttttcttagcaagcctaccaaaatgcaatattactgccatcaagttccctagatacttacacatgcaactgaaggcaaacagccaggtttcctttctttgagaaactttagttgtctattttttgaaatgttttccttctcatgggaccaaaaaatgtttacaactaaagcaaactactgcagggagggaatacacaattaaaacaaatctaccatccagatgcaacaagcgtggaattaggactggacaggatagtcggcggtgttgtgatacttctgttgaaattattaacaagacaagaccatcattcgcccccaattatgtttatcccctcgttgagtttgatgatcacacaaaatctgaagtctaaatataaacgtttttatattcaaagtcaatattcaagaaaacttttccactaatgttgctaaaccatagatggatcccaacaagagttgtctgtagaagtctcgtaacaagtaacctttagctccaccacctaagtttccaatcactgagaagagtctgggacaactcatcttcaggttcacgggagaagtggagcacacctgctttcctctggcagagtaacttcccagggacacaaaggccagagaatcagacctggagaggcaaaaagctttagctggacacccaccaagcccctggcaacccaaacacttcgagcgatttacctcttgctgttacttcccaggcacctagccgcataagatcttgcaggacggggggaggggagggctatgcggtcctgtcccaagtaaggggaggggtgtagacagttaatgccagagccagcgtttctggccacaaccgagcagcctcaacgagaggggttggtgactgctctcggcccgccccgttactcagtgcattgcaatggcgaccgccaggctccccaagccgcctgatctcggccccttccccctactgctcactggctgctcggcttcatgtgactaaacaaaacccccaagtctagtgcccagctcagcccctttgtgtccgctaccggatcctccgacgccgcagcggaaagccccccccccatccccccgccgagtcccgccccgcggcggcggccgccgctcacctcaggctccgtggcccccagcgaccgccgcggccgccgcctccccgaacccggggcccgggctccttgtgtagcaccaactccgcctcctcggccgccgccgccatcttagcctgtgcggcaaaatgcgtccttttggatggctgggacccagcctagggcgtagctccccgggcccgagagccggaggccgggtcccccaagttcttccgccaccctcagtcccgccgctgccacagcccagaggcccgaaacccactcgggtcccagcgaatctgaccaaataacccctgaaactcacagtttggtgccgtgtgcgtcaaaccggggcgacgttgggagcacgcggcgtccccgcgtcacacgccgctctgtacgctactcggctccagcggcccccctccgctccccgcttttcgcctccagccccggttcccacggcgcaggcgcgctgctttcccgcctctgccgggctgcgggccgcgggggtggccagcgaggagctcccgggaagcttcgcgctggtggagcgtctgggccaattagacaaacgagggcagcggaaacagtgcaccactgttctcgggtgccagaaaccaaacaaggtcacctcccccagcgctgacctaatcactcccaaggaggttcccgccccaaagtaggcacgctccaaatatggtggtgcccaaactctgcaagacccaagcactaggcatgcctaggccctttaaggtggaacaggcccaggtttgagttccacgatcacgagcgtgcaaaaatctctgttattttcctcttgttgaggaaaacagcaatatttgccaatcacaactgtggagtaatggcagagggaaggttttaggatcttaagggggcagattgttgggagttgcttgatggccaggcaaagcatcaagtgtgacatctcagttacccggacagcctgccctgaaaggtggccgaggtttgctccagtttgactctctgaggatactctctccctgcattactgaaagtgtcgtggttctacgaattaaagttatataagaagcatgtgagatgctggttaacccttcagagaatcagtccctagagggttctggaaattttcatttttaacaagacttcaccacaggatcctggggcagagaaacactgagtgggctattcttttgtttttcgactgagccaacgagaaactgctaacatgtttaagattaaccaagagttcttgagaaatctactggtcccgccttaattatttggcttctctgaacctctgtttactcatttaaaaatttaaaaataaaaaagttttccttagttgtacagctgtcattactgtggccctccaaaccctcaagatgttattgacattcggaagaatataccataactgcatttatttgacaagaatgagaaacattctctttcctatggaatgatgccttcagcaacagcaaacgtagattccaaacaacaaatatttgactaaacacattaattgcttcattacttaatagctaacacttttgagtgcttactgtgtaccaggcattgttctaacttgctcgatttcattgtaacccaatgagacaaagaggagtaaggtgattttctcgaagtcatacagttctttgggctctttaaaatgcaaatctcctgtcttcatttacacaaatgtgtaaacaataaaatataaatacgtatatatttgcagtcaatgggggaggggtgctctttggatcatttcgtttgcagaatccattaaaattggacattctcagtttactattggacttactacaaaatattatgtac

SEQ ID NO: 2478 - DNA, 4001 bp, Homo sapiens
aaaaattagctgggcatggtggcggagcttgcagtgagctgagatcgcgccactgcactccagcctgggtgacagagcgagactacatctcaaaaaaaaaaaaaaagatagatgctattattactatattattctttcaattttacagaccaggaaactgagctttattgaggttacttacctgcccaaggccacacagctcatagacagcagcagtggggtttctctctaattttaaggccattaagccccaaatggtcctgcctcccagctgtggccttcagactgaagcctgctctggggctgggctctgcccaagagcagctgcagcatcctggggtgaaaagccgtggctttctgcaggcatcaaagccccttgtgttttctgggccaaggaaccttggctacagggcctcactgctgggctcctccctgctttcattgacccagattgccctccgccaaagagagaggccagtggctgcccatcagagccaggacccatgttgcagaggccactgcctgtggtgctcaagagtattagtcactgagtatttaccttctgaaagctccttctctctacctctgcccacctttcactgccatctcagactggataaaaggagtgatctttgtatttggctggtacagttaaccctatccccatctcattaaactgttcttccctggtttctgcctgatcatgagcccagttaccctgtgtgtatgaagagggagcagtatggaggaatcctcactttctgctctggatacagaagccatggatggagggaggacacattgcagttgtgactggaattcagcatctcacgtctctttgtgccctaaagcccagggaccactcctcttctctcactgcttccctcacccatcacatggcagagggtagctggcatgccttttgacaggagcccagatctgacatattttcagcatagtggatcttagggagtgaatgtgtagttcatagaggggacataccactagccaacctcatagaacttgctcagaccagcaggcttgatccggggctgtaggtcccccagcagggacagcaaagggatgctggatttgtatgaaacacatgtcttaggtctctttccctctttacgacaacatactgcctgtttctgtggcactgttcacagatcactgactttacccgctccccaccccacctccagcacaaataccccattttccacagtctgtgtgtcattcttttcctctgggccacaggggagcctccttagggtggcacacagccctccactagctaaccaatctcctctccagagcccgtcaggagactctcttttcagatgaggtatccctcctccatctgaagccatatccccagtgaatatgtcctgctttcttcctcctgtcgctgccacacgcatgctctcgaccaccaggaagacctggaggcaggcaggggcacagggagggattttctggcaaagtctgcacaaatatacctggtctgaaagaggaacactgatgccatggtatggcgggcctctctgctccccagatgtgctagtccccagaggctgtcagagcagtcctttgctggaacttcctctgcacttgccagccaagagtggaccaaatgcagcctttgactccccaacctcatacatccatcaacactctgcagaagcctaccctaagggcttgttgcaaccccagcccatacccctcttctttccttcattctttccagattgtactgaagtccatcctaggcagccgcctcctactttcttctctgctcaccgccttcaggccttgctctccactcctggctcacacacagacggttgcttacctgggaaatgcagacagcagtgtggggcctctgccctggcttctgtgacacgtgggctctcagcaacaggaaccagttaggtacaaatcagcagagatggtgtctctgtctctcacgctttgtgtccagtccagcggctgcagagagagcctctggaggtggggccagtgtaatacactcaaccttcctgcctgcatccagagagcagcctgggaaatagagtggggctgccctctctcactgcctgaaccgatcctctggctccctctgctcctgcctcccctccctgccaaagccagccttcctccttccctcctctcagtcttcctgcaggtggccctatgcctcttgttcactttcactccttccttccacagagcagtccatccttcactttagccctggtatgcccatgggccacatgtcacttgtgagcttcctgggtagcatgctttttccctcctggaaggcagaacagagtatttggcctatatgcccacctccctattctagtacccaccttttgcaggactgtgagttgcagaactgtgaggggttgggattcccagaattctttgtagcagcccattcattggctcaaagatgcccacagccttttaactgggagtaggggtgcagggagatggttttctgtcttatgcatacagatgccaggcctgtctggggtctctttccactttcagcattgattcccatgcaggttcattttgaagagaaggattggcccaaggtagaagactcagtacattcagaatttttacccactcaagtctaatgtgcatttattaggatgaacattcagggcattaaaataggtgatggaagtgtggttcctgtgatgtcactaggtggtcacaaagtatactgattgacagcacggtctgggtctgggtttgaatcttactacttactagctgtgtgatcttgggcaagttatttaacctctgtgtgccttagtgtctcatctgcaaaacagggaccaggatactattgccatcatggaagtttggggagtattaaatgagataatgcatgtaaggagcttagttcggtgtttggaacatagcaagtacccaaaaacgttagctgctttcattgttattattgacgatttttaaaaattttaagttccgggatacatgtgcaggatatgcaggtttgttacataggtaaacatgtgccatgctggtttgctgcacctatcaacccttccttcacctaggtattaagcccggcatgcattagctatttttcctgatgctctctccaccccgcactcccccaactggccccaatatgtgttgttcccctccctgtgtccatgtgttctcactgttcagctcccatttataagtgagaacatgcggtgtttggttttctgttcctttgccagtttgctgaggataatgcctccagctccatccctgtccctgcaaaggatatgatcctgttcctttttatggctgcatggtattccatggtgtatatataccacattttctttatccagtctatcattgatgggcatttgggttgattccaagtctgctattgtgaatagtgcggcattgaacatatgcatgcatgtatctttataatagaattatttatattcctttgggtatattcccagtaatgggattgtggatcaaatggtatttctggttctaaatctttgaggaatcgctatactgtcttccacaatggttgaactaatttacattcccaccaacagcgtaaaaacgttgctatttcttcgcaacctcgccagcatctgttgtttcttgactttttgataatcgccattctgactggcatgagatggtatctcattgtggttttaatttgcatttctctaatgatcagtaatgttgagctcttttttcatgtatttgttggctgcatgtatgtcttcttttgagaagtgtctattcacattctttgcccactttttaatggggttgtttgtggggggtttcgtaaatttgcttaagttccttgtagattctggatattagacctttgtcagatggatagattgaaaacattttctcccattctataggttgtctgttcactctgatgatagtttcttttgctgtgcagaagctcattagtttaattc

SEQ ID NO: 2479 - DNA, 4001 bp, Homo sapiens
ctaggttacctcttaatttcacttcgtacatttctagtatctgccataataaagtcctacctgatgtgcataagtgagttaataatatcagtcctaagactacttattcttaaaaatgcctgctcacaaagttcaatctttgtttgtattagtaacttacattttgaaagggattccaccaacctaagtaataagaatgactcactgcatctaaatggtttatgcaatatagttgccaaaactttttctgctaaaggtctattattttgtgtcactgcagtggtgcttagggaaccagacaccaaaacacagtctgaacactaagtgtttaatgagtttccctggtagacaatattttatatgtgctgtcacttgttaattggggagttgagcccattccatgtgattacaccaagagagaataggcttattaaatttaattgagtagtaaataaaaccaataattgatatttaacaatttactaatacaatttttaaatttctattgcacaatgtcaaggcagaatggaataagaggaaatatggcacatgttttttaaaatgacattaatgtcaccacttccagatgctattcctgtgaaatcacataaattcccaaatcaggcttttttaggcaagaaaaactagtttttcatacctagtaaaaatgacaaatgtctaatgattttcagtcatctaaaaaaagagttatgtcttgcctaacatacttttaagattttcaaccaaaaatattcaggacagcacagtattagcagagagatgagcaagcagaccaagggctgaggacacaacaccctgtaaagttttcacagggggacatcaacctaaagacattttggtaatatgcacacttaggaaagatgaagagaggcacaaagatttttttacagtagagtgtcagatggtttattctccgctttcctctcatgtaaaatgtttgtaaacagaaaaatattttggccgagcgcggtggctcacgcctgtaatctcagcgctttaggaggccgagacgggcggatcacttaaggtcaggagttcgagaccaacctagccaacatggcgaaaccctgtctctaccaaaaatacaaaaattagctgggcgtggtggcgggcgcctgtaatcccaactactcgggaggctgaggcaggagaatcgcttgaacccgggagtcagaggttgcaatgagtgagactgcatcattgcactccagcctggcgacagggcgagattccgtctccaaaaaaaaaaaaaaaaaaaaaaaaaaagaatatggtttgcttcctcattaaccttatcaaagcctctcatttacgccccttctgtggaccccaaaccacaaaccatgactgcggtacctggtttatgaatcgccgtttgctcaaacacacggtttaacgttttaacaaagcctcggcttaattttaggggaagaaaggtgggactggaagccccatgaaccacagctcctcccatgctggaaccccgcacaccgagacaccgagtcggggctctcccgcatcaccctcccgtggtcaccacactacctggataggggaggcgaggggttcccgacagggctccggccggcggaagtggcgcccgcaggtacagacaggatgcaggggttccgctgcccgccccgcccggcccggccctgaacagaagaggactgagccccggctacgccacggcgactcggtccgcaggttccggagccgatggcgtggaggcccgagtcgcgccacagcaggtttcaaccagccctcttctccacttcgggaagccaggcgcagtccactcaccattcctcggcttcccgggtgtcctggcgtcagctagggatgtcccaatactcgcaggtcacagggtggcagaggctgctgcagagccacctgggcctcccagagccaagaactagcagcggagactaacaggaagagccggctccggcgaaggagagacaaagcaaccgccaggcagatcccggaagccgccctctcctttccggcggcgcgcctgattgaacggtccccaccccagcgcccctgattggatggggcttcaggccccgcccctcaggccctgagtgacaggagattgcgatctcacgtgaggctggatgaggtcagaatgaccgcttttggcctagcggtttgtaggcggtgcgtccttcctgcgctgggatccgaccatgcaagaaggacattcacatttaacctgtatacaagttatagctatttgtgccttttatatatatatatatatataaaattggaagcaatataatgacagttctgtaactgcccagggagttcaccttgcccgctacctagacagagccgatttctcaagacaggggaatagcaatagagaaagagtaattcacgcagtgtcctctgtgcgggagaccggagtttttttattttattttatttttttgaaacagaatcttgctctgtctcccaggctggagtgcaggcttggagttttatgattattcaaatcagtctccctgagcatttggggtaagagtatttagaacgtttattttgccaaggttggggatgcatatgcatgacacagcctcaggatgtccttgatgacatgtgcccaaggtggtcagagcacagcttggttttgttggagagaaatgctcggtgccgcaaagtgaaaccagcactcaagcgaaagttttctcagcaacgcaatttacttctgcagaagcgtgctgctcgcatcaatcacgatcgcaagagcacactgaacagaggaaagcaggggtttttattcctaacgcagtccctacctctggcatgggctggggtcagaccgcacgatctaaactgacccggttggctatttgtgaatattttcccaaataaggaagggggaagggggatgtgagttacaatggtgggacttgcggtttccaagggagaaatgggtgcagagcaggtaaccaagggaacagatgtgagttattgattagaactgacggaaggttgtttacagtaactaagggcaaggaggcatggagaacaagaaagttgagttcgaaaacaaaaaaacaagaaagttaacatgccaaaccttggaagagaaactgactgtatctgacagctttatacattttagggaaacaggagacatcaatcaacatatgtaagatgaacactggtttgatccgggacaacctgaagcaaaagcgggtcaactcgaagccaggagggggcttccaggtcacaggtaggtgagagacaaacggttgcattcttttgagtttctgattagcctttccaaaggaggcaataagatatgcattcatctcagtgagcaggggatgactctgaatagaatgggaggcaggtttgccctaagcagttcccagattgactttcccctttagcttagtgatctggggggctcaaaacattttcctttccaatttcccccttttcttttaaaaatattttggagaaagcattttagaagaaaatcagtctctggtcccaggttttgtccaatctctcatggagtagctgggattacaggcactggacaccacgcctgcctaattttttttttttttttttcgtagaaatggggtctccctcagttgcccaggctggtctctggtgcccaacgccgggctcccggtaatctctacaaataatccagtgaaggaatgccagagagtggaaagtggaggatgactgacaaaggacgcccgagtacgttttcacttcaagctctacaggtaagtagggcgctcggaaaattccagggtaacctccggaaactatgggtcaggctgagagtaagtttgctaattactgaagccttgtccggcagttactgcgccgcggaggggtaattgtgagtacccaaaatctcccatctttgttctatctggtaaaaaagtattctctttggttcccggaatatggaaccatgaatgtaaaagactgggacaaggtcg

SEQ ID NO: 2480 - DNA, 4001 bp, Homo sapiens
ccagactgggctaatttttgtatttttagtagagacagtgttttgccatactggcaaggctggtctcaaactcctgacctcaagtgatctgcctcccttggcctcccaaaatgctgggattacaggcgtgggccaccacgcccagccaactctcttcttacataattctgatgatggtgcttttctggttcttgcaccacctcactggggtgggtattccttgtcctttgagatagtttttctcctttcccaagtccgagaaaatccagagcgcaggaatcatttctagatttttcccttaataccagcatctgactggctgccaccaacgtgtctccaaggaatgatgaaaactggggttggaggaagaaaatcccaatgcaccagggatttgttttttaaacgaagagtatactaggagacgtctctcaactccagggcacccagatgctgcctggagaggctctacttccatattttaaactgtcctctgtgaggagatgacccaggagaaggtattcattagacactccaagagatctggctgctaaacagaggaccaagaaaagatataagggtggctgaggacatatcaccctctaaagtttccaaaagggaacttcaccccaaagatactctggtaagatgtgcacactcaaaaaagataaaattaggagatgcacaaagactttttttttctacaattaactgtcaggtgattattttctgctttccactcatgtgtaatgttcagaaatattttaagagtgaaaacaaatattttcagaacgactcactactctgaaaaaaataacacacttcatctgtatgaaatgtacaataaaagacaaatacttgataatgttgcatttgaatataggaaaagaattggaaatttagggttttactacaagccccagaagagttaggctgtgggaacagggtcgttgatgtgagatcctgttgccatacacttagaaatgtggagtgttatgtgaaaataattaaacacaggcactagggagactgaggtggggggatcgcttgagcccgagtccaagactccatcatacacatgtacatacacacatgaatgaataaacaaccaaccaaaacgtaactcatgcttgtcttgtaaattaataacttaaagggaaacaaaacagccttaaacaaccacgaacccaccaattaacctctggttacataaccaggagatatctggctgcacagtctatatggggtgactacataactgtacacgatcaattatttaattgggtttgcttcctcgggttccttacaaaaaaccctttccttccccaaaccacaaaccacgctggtggcttcctaactcacgactctctgctcaaataaactccttaatattttaacggcgcctcagttttctttctaacaggagaaaggaggatttggagacttcacagaccacagctcctcccacgcaggaaccccgaaccccaagtcgggactctcccctgaggaccctcccgtcggcaccgcacgatccgagggagatgcgggtctacagaggcagagctgcccagaaagggttccgggcctggccgaagcggcggggcagggacaagccaggcggcccggggtctggctgcgggtccagccccgcatcctgtgccactaaggccgcgaggcgccggcggaaactcgggtcggcaccgcggggaggtccgggttcgccacaaccgcttcctggcggttcccttttccccttcccgagacacctggccggcacactcaccatttcccagtctccggtgtctggggtcctccctaaggaccttccgggacctgcaggtcccagagcaacagaagctgccgcgggaccacttggacctcccagggataaggggaaggagcagcggagacgcaccgagctcgccacattcgcgctgcccaacacaaaagccgcgccaggtcccggaagctgctccctcctttcgcggcgcgcttgagagtacagtccccttcccagcgcccgattggacagggccttaggccccgccccttcagtcctgagtgacgggagatgcaatcagacacggcgctgagtgaggccaggttctttccctgcagtccttttctaaggcatggattctgccctgtgctgagacctggcgccccccgggggactttcccattcaagctcatacacaggattatgtccatttatgagtaatatttgtgatatttacaattggaaacactatgatgacaattattctaaaatttcagatttcacaaccttcctggcctctggtcttttgaggaggcagcctgaatttttttttttttcttgcttctagtgggattagaggcagcttgaattttgaaaagacaatgtcctctcaggtagcaacgccccatagaaataaaatgtgagccgcgtgtgttccagtagcaatagaaaagaaaacaacacgtgaaattgattacaatgatttatttaaccaaatatatccaaaaatattgtttcaatatatgatcgatgttaagctcgcgcctaattgaagagactacccaaacaggttaagtgtgagcagcaaggctagtttactcactcgggtgcgagcgggctgagtccgaaaagagggtcagcggagggtcgtgggattggagttagttttataggtgaggggtaagcagtggaaagttacagtcaggggccgtttattaccggcgggggaagaatgtcacaaagtacattgtcacaagagggaggggtcacagtgtcactaggctgattgatcagttagggtagtgcacgtcacaacggtaaaatgctgcaaggttggctaatcagctaagacagaaactagccgtttttcttcctttgtggttttcctgttgtcccagactttctggctccaggaccttctggatgtacacgtgtgggtcacagggatcacaatggcttgaccatggcgcagcctgctcagacggccttacaatcgatatattattaatgaaaaatcactctatatattaagcttccagcatgtttcaattcagcctgcacatttggatacacgtgtctggttttaccactttattttaaggttgttcgggaatgtctgcctgttcctttcatgtaactgttcattatttattgattactatttcttaatttcacttatctcagtgagagttgccaaatagtggttttctaattattttctctacaggtattagttctcattcttctattaaaaatggcgttttctcatgaactctctccattacattaaaacctaccctattaggaaaggaagaataaaagcttgattctccctttaatcaattgtcataacaatgacggcgtggcctcagcaaacaaaaaaaatgtgagtgacttttttctaaccttattttttgtgtatttaatgagattccatacactgcagtctgtatctattttttgagctcaaattatcccttttttttttttttttttttgagaccgagtctcactctgttgcccaggctggagtgcagtgtggcatgatctcggctcactgcaacctctgccccccggattcaagcgattctcgtgcctcagcctcctgagtagctgggattactggcacccaccacaacgcctgattaatttttgtatttttactagagacaggctttcaccatattggccaggctggtctggaactcctgacctcaggtgatccacccacctcggcctccgaaagtgctgggattacaggcgtgagccaccgcgcccggccaaattgtcccatcgtaagtgaggggctctatacattgcctcctttgtccttgtaccatatgttttgagagctttcttattttctggagcagacagaaactgtgtgcttccctttttctgttatatacgttgcaaaaagatgaccatttggcattttcctttttacttggcttatggcgtttcctaacactcacaatattctggttttatattgtatctttat

SEQ ID NO: 2481 - DNA, 4001 bp, Homo sapiens
tcacctgaggtcaggagttcgagaccagcctggccaatatggtgaaaccccgtctctactaaaaatacaaaaaagtagccaggcatggtggcacgcgcctgtagtattggctaactcgggaggctgaagcaggagaatcgcttgaacccgagaagcagaggttgcagtgagccgagatagtgccactgtactccagcctgggcgacagagtgagactccatctcaaaaaaataaattaaaaaaagctattattatagtgtttcatatggaaaggtcaaaatattgctaaatcttgccgggcatggtggctcacgtctgtaatcccagcactttgggaggccaaggcgggcggatcacttgaggtcaggagctcgagaccagcctggccaacacagtgaaaccctgtctctacgaaaaatacaaaaatcagccaggtgtggtggcgcccgtctgtagtctcagctactgggaagggtgaggtgggaggatcacttgaggccaggaggcggaggttgcagcgagccgagatcgcgccactgtactccagcctggacgacagagcaagactccgtctcaaaaaaaaaaaaaaaaaaaaaaaattgctaacactgagaattgcggttgcccggtgcttaggatttactctgcctaggacagtccttcttgttgttgttgtttgtttgttttttgagacagggtcttgctgtcacccagcttggaatgcagtgatttgatcactgtctcactgcagcctcgccctcctggactcaagcaaccctccagcctcagcctcctgcggagctgggactatgagcaggtgctaccacacccggctaattattattatcattattttttttgtagagacgagggttctcaccatgttgcccaggctggtcttgaactcccgagctcaagagagcctcccactttggcctcccaaagtgctaggataacaggcatgagccactgtgcccggccctgggcagttcttaagagcgactctgagtaaggggcttaactcctgtctccactccaggcatcctaaacggtctgcagccgttttcagtccttccccctcaacccctaagaatccctcacatgattagaacagcacagcatgggccttccatagctccacttgcgcgaactgtgggctccaagatgaaagaagggaagctggctactcatctggggacttggtgcctggtacttaagagcgaagcacaactattcgccgaatgcggaacacggcacctgaacaggtcgctttccgtggcccacagcagcgcagccaatcctggggcgcctcagtcggcgcgcgtcacaagttgctgggcaaactttctttgagcgagccccttcccaaccccgagcctaccctagccccttgcccgtggcgccagccgacttggagggcgagaccgggcaccaaaaacgtagtggggaacgtttaacgctgccagaacccggtggcggccgttgcccccttaagtcggctcagcctggcgacgtttgtcgtggtgacgccagccccgaaaaggtcacccgaggcggaccagcgaggacaggcggaggggaaggcctgggaggagcaggccgcgcggacgtgtccggccaatcgctcgccccgcagtatccccgcgtcactcgcagcccgggcggcgctcccgaccgccgcagacaccagtcgcccgaggcagatgggagaagactagccacagctgaggactgctgccccgagccacccttgccctcccctgcccttcagtcccctcaccggtcgccgactgcctcctcagacaccgcgcggttcccactcagccggctgccgacccccgcctcccggactgcgggactggggcgggggagcgaggaaggggctaacggcgcgcgcggcctccgagtggggggagcggggaggcgcccgagcgtccggcccctcgggatggggaggtcacgctcctgtccctctcgcccgcgtcggctagtggtcagtctggcgcgggcagtgtcaccggttgctgggaagactgggaggccagcgagcagcgtaccaaccactcagcctctccggccccagctggagccgggaagcaggcggggctaaaagagaaagcctgcggggggactccactcccgcctcccgcgcgggccaaggccccgccctctcttctggcttaaccaattcctgcctcccgctttgtctgttggcccacccctgggcctcgtcccgcccaatcagaggaaagggcgccgatccctgcgcgcgcctcagcccccagccgcggagtcccgggagctaggcggtccaccgtctagtcttccagcagctcttcccgcggccgctggcgggacacagacaggtgtacccttcggtgcttccggcgcggtagccggtgcccggcgcggacggggccgcggcagccatccccgtagttaagttagcgccttcttattaagtgaggccagactggatagctattatctctcaaccctcaccacaaccctgccaggggaaatatgagcatttatcctgtattttaggtaaggaccccacaagttaatgatacgcccaaagtcgcaatgccagggataggggttactcctggtcggcttgccagctgcctctccatgagcttcctggttgaactgcctgtccaaatgttgaccctaatgtcttctactaggaaatgctactagtattcctttccggaaatgcattttgggaacctggccatcctttagtgtgcctatatcatcagaacagacgcccagggatggccctcaaggtcctttactgctgtaatcttcctttggaggtcacttagtaccactcttctgagctctgctcagggggtcccctaattagtgtacttcgacctgccatgcttggcctggaaaactcttaccctcttctctgttttaatttgtaaaaccttagtcaaatgccatctccataaacctatgctagaatgcccctctctgtcctcagtcctggggacatatctatgctgcagcgcaacctcccgcatgttgatactgttgttatagtcagatgaatactgttcccccatagcttaagggacaggccttgtcctactcatgaacaattgatcccttgaagcatgagcagagggccagcacgccacagatgatcaatgagtgtttgctgacccgcatatgacaacacggattaaggaagacaaatctggtagcagcaggcaagaaagctgaaaagcaagacacaggatgcaggtctggagtgatcagggcctgaaccaggaagggataacattgagagagacatggaaaatgcgcttgaagtatatatatttttattgtaaagaatcatacacagataaggtagtattatatagagaatgattagttgaggatatttccagagtctttaagccagagaaatgtactaatttagacatttctggactcattgctcagtactgatgtcatgtttttaaggacactgacacacttggctaatcccagagacatgaagaggatggtgactagggtggtcacataattaaaggggctggggatatttaacctagaaagagaaacattttttgtgcacataatgactgtacacaaattctaacaaactttcatgtgaaagaggactggattagatgactttcttctgtgtagctttggagggaaaaactcaaacaatggggggaaagaacaggaagctggatttaggtttcctatgttatggaagtcatcacagtgggggatgataattgtaacaggaagatggagggtagtgaaagaaagttcaaggatgaagttatgtgtatatttgtcaattaaaaatatcacatccaaatggttttatttctctacacatctacatcaataaatgacaactcttaatgtggttctgtaaatactcaaaatgtttatggaaggtctactatatgccaggtagtattctagacgttggagataacagctgtgaacctaccagatgaatc

SEQ ID NO: 2482 - DNA, 4001 bp, Homo sapiens
ctgggcatggcagcacacacatttaagcctagccactcaggaggctgaggcagaaaaatcacttgagtccaggagttggaggcttcagtgagctatgacaatgtcactgcattccagcagcctggatgacagagcaagatcctcttaaaaacaacaagtcaggcgtggtggctcgcccctgtaatcccaacgctttgggagggagaggcgggtagatcacgaggtcaagagatcaagacaatcctggccaacatggtgaaaccccgtctctactataaatacaaaaattagccaggtgtagtggcgcacgcctgtagtcccagctacttgggatgctgaggcaggagaatcgcttgaacccaggaggcggaggctgcagtgagccgagatcacgccactgcactccagcctggcaacagagcgagactccaactcaaccaaaaaaaaaaaaaaaaaaaaaaaaaagccgggtagggaaaaaacaacaggccaggcgtggtggctcacgcctgtaatcccagcactttgggaggccaaggcgggggatcacgaggtcaggagttggagaccagcctgaccaacatggtgaaactaaaatacaaaatactaaaaatacaaaaattagccgggggtggtggcgcgggtctgtaatcccagctactcaggaggctgaggcaggagaatcgcttgaacccgggaggcagaggttgcagtgagccaagatcgcgccactgcactacagcctgggctacagagcgagactccttcttaaagaaaaaacaaaaacaaacaaaacaacaacagcaacaacaaagagtgccctccaatgttctgtgaaaaaatgattaattaaaatattgtgcctggagtacgcaataaaagacaaatagctgacagtgttgtgaactgaagaggtgatggtggtttttatgaattttggaaagaaactgaaaatttagtattttattgcaggccagagtcaggctgggagaacagaggagtggatttaagaccctgctttccatgttatttggaaaatgcaggggaaaagcagtctcttgtgcagtgttaaaataattagcaggcaattagactgaggtggctctagtgtcttgcgtttctacatgaaaaagaatattaatagctcaaatgcatttcttgttaatgactgccttaagtagaaacaaaatccaagttcaaccaatcacaaaactccaattaatcagtaattaaataaccaggaaatttccacctggacagtccaaataaggtgactgtaactgtcgtcaattattaaatttggcttgcttcctcatgcaccttacaaaaaagtttttccttcaagcacctcctccataaacccacaagccacacaccatagctgggcgctctcccattcatgaaactccctttcctcaaactcttcaaagctttaaaagtgactccatttttcacaggaaaaaggatggactgcacagctaagataagccccatggaacagctcttcccacgcatgtttcgcacaccgatttggcttctccccgatgaccctcccctctggacaaagcacacagtctgggggacccgcggggctgcggcttcatagccgcccagagaggccggggcggaagccgcggcgcagtgatgggaggagaatcccgcggcggcctggccccgcccctacccagaggtgacagatcccacaggtgccagccgggactccgggccgcggactctagtgctgacgccgggaggccggaccgccatcttggaacaccctcccgggaactctcaccgttttccggctttcggggtgtcctggcatcttagctatgtaactcccagtacctgcaggtcacagggaaaccagacactgcagcagcagagtcaccagggcctcccgcagctggggataaatagccgagaatacgggaccaaagctccagctggagcacaagacaaaggccccgccagatcccggaaaccccctccgcctctcaagctgcgctcctgattggacagttcccacgtcaatgtccctgattggacagggctccaggacccgcctcctttggttatgagtgacaggagatgaggtcagcaaaggggttgaatgagactattaacaaaatgggcaattttttttgtatccttccaaaattgttccatgtctttccatgcataccatctttaataaagggcgcactcttaagccaatctgcaatctctgttcctgagtgtctaaacaacgtcatcatcatcttctgttggagaaaaacctgaagatgagttttcctcccaaagcacagaacagtcagaagccgaggcgtgcttgggaatgctggcgggtggaaaggggaggcgcattccggtgcgcctgtggaactgtccttgcaagcaggacccaggtccagaacagctatgcaatgcatgtgtttctgaccaaagggggcctgctgtccacccgcctcttctgctgggcagggcagcgcatggttggggtatttacacccaggcaggtgtcccaggccagtcccctgtcaacccatcataataaaaaagtcagaatctattttcaaaagtatattcaaaagcatatgtttaggatacctacctgagagcatagactaaagttgccctgattatacattccaactagtaaccattacaagtgggttttaagaaaagaggcagttcctaaaattttcatcaaaaatttacattaaaatccagaagtcactgactggctatacattgttctttgtatcacaaattccagatgagacagctagttaggaacaacatacctttaaacaattgcccctgggaaagggtgtggagatgtgtctcaaatcccatactcaagtctctctgggccagaaaaatcttccgtacctcacagagcttcagctacttagagctattcttttcttatctccatagtcagtacacttggacccttaacaagaaataagttcaaacagaaaatttgccaagccacaggaataatggcctgtcagtgcccttcaggaagctgattgtcactttccttcaacaccctttccacagcttccccccaacacacacaccctggatcccgggagagaggggctgagacgcacccagacacacctcgctgcccctcctgcaaacatacacccacacacagacacacagacaaagacacagacacaggcagcttgaaggagagcaagagagagggatggagacatagaaacggagggagagaaagacagtgatagagaggcagagtgagtcaggattgagagagagagagagagagagaaggctacagaaagagcacgaggtggagggggaagaagaagagagaggatgagggacttacagagccatagagccttggagagggagtgttctgctccggtagacagggcccctttgagcaggacagggtagggtggagggtgcttgggctgggccagaacagggtggaagggctaacggagtgacccaacagagccctgagacgtattttttgttggattggttgctttggtggtgcgtttcataggacttttcctttgttggctcctccctgtcctcttggtgcggtgggccccgagatttgtagagtgcaaccgtccctctagcgagagctgtggcaccgagcatgcccacggggcagaggcctgggtctgtctcgtgtcctccggaatggagtttatacgaagttggtggcaatgggattccgagtgcacagggacggttttcctggtggctggagaaggcaatgtccttcccctggggaaagtagcccatgcgttctggagcggaggtcttggctggtgtcttgtggggcccgcttcccctgcccgccccttcccccggcttggacagtgccagcggcgctggatgagtgaattaaattccctgggcgtcccgggagagggaagacaccctggacggcagggaacccgcccctgagccttcgaggttggccccggcccggccctccccgc

SEQ ID NO: 2483 - DNA, 4001 bp, Homo sapiens
gtgttacatttgaagttgccacagataggaagtgggggcaggcaggcttgggggccctgcaaggtctgacaagggggcactatccactcagctttgcctacctgtggcaactctggaggacaacctgctgatgtggattgcagtgaactggggctactggaatttcaggatgtgtgtgtgaggggggcgggctgttatttctgttctcaaagtacccagatggctggacgggaggacagagtagggctcaaaggctgaacaggggagccttctgtggaggggagccaagctgagatgaagataggcattgatgatgacagggagacagtgatggtgacaggtagggacaggaacaggcagagacaagaacaggcaacatagaaggatatggaatgagacagaggacagagaaggcagctgatctcacagagatacagcaaacacgttttcctcctccaagtcccatctcagatctcctgaccctggaaagttctatcctctaatctagaggccccaagaggcaaaagataattcaagcacatggccaggtgaagtggctcacatctgtaatcccagcacttcaggagaccaaggcagacccatctcttgagcccaggagtttgagatcagcctgggcaacaaagcaagacctcatctctacaaaaaatacaaaacttagctgggcatggtgacttgcacctctggtcccagctactcaggaggctgaggcaggaggatcacttgagcccaggaatataaggctgcagtgaactaggatattgccactgcactctagcctgggtgacagagaaagaccctgtctctttaaaaaaaaaaaaaatagacatagcaaaatgggtgtaaggcatgactaggccaggtgtggtggctcacatctgtaatcccagcactttgggaggctgaggtgggccaactgcttgagcccaggagttcaagaccagcatgagcaacatggtgaaacaccatctctacaaaaaatacaaaaattagccaggcatggtagcgcatgcctgttgttccagctactcaggaggctgaggtgggaggatcacttgagccagggaggtcgagactgcagtgagctgagatcatgccactgcactccagcctgggtgacagagcgagaccctgtcttaaaaaaagttaataaataaggaaaagacatgtctagatacaaaaagggagacctcataggccagaaagtggctttttagcctgagcaatgtcattattcttgtgagcatgagaagaggcatcacccctgcggccttacacaaattctggtgtgcgtgagtctggcccagggtgcaaaagccccaaccagccatcaatctgcaccccagccacgccaccctggtgtcccagaatatacagggacatctcaggctgtgcaccatgggctggggcatgttcctggggtttctctgccagctcagcccctagggctgtgactcatcctccacataactgatcccaacatgtttgtgagcatctcaaggacagggtcctctgtctactcattttggttttccatgtagacatctgtcaggtttttttggacgcccagcctctgaaacttttcccctacatgagtcttgagggaggcaaaaggtacctcccattataaaagccgaaatggccaaatacttaattccaacctccctcaccagcacttcatgcaggcatacatggactaggtcgatcagatgtccccacccagaaggggtgacccgcacacctttggcttccatctgccagctctgccctctcctggcatcacactctgctcccaactctcagaacaccttgcacaacttctctgttagaaaaaaataaaaactacttcccctctatccgcacttcccaacctactctggtgatcatgggctttccttggcttgggtctctggtctgggtcaaggcatctgctcaggttcctcagttagaagaccatggtcctccctttgtgctacctccccagggcatgtgggacaaagtgacatcacatttaggcctgtgacatcacagggcatggaggctgacaagacagatgatctgggagacgagagcaaggaagggcttggcaggcagaggctgctccatgtgggaacctgagggagtctgtcttagcccacctcctgggacatttccttgccaagccgagtcttgtgagcatgagaagaggcataacccctgtggcctcacacaaattctggtgtgcgtgagtctggcccagggtacaaaagccccaagcagccattaatctccactgcagcccagtagactagcagatcagaagctagtgccactggctgagcgcagtggctcacgcctgtaatcccaggactttgggaggccgaggcgggcagatcacttgaggtcaggagttcaagaccagcctggccaacatggtgggaccccatctctacaaaaatacaaaaattagccaagtgtggtggcacgtgcctgtatttccagctacttgggagactgaggcaggagaattgcttgaacccgggaggcggaggttgcagtgagctgagatggctctgctacactccaggctgggcaacagagtgaggctccatctcaaaataaaataaaatacaataaaaaaagccactggtcctgaggtggcaggtctgtggaaactcctctctacaacaaaggctgtggtaccacatccggcttccagggcagtgaaggaaagaagggggttcaggggaggctgcagaatctgtgcagggctggtcctggggtgtgatatttggccatggtcctgtctacttccagcctcccttgatccatcctattctccaagccttgctctccagccttctcagacctcctgcgagcttttctaacatcttttaaacaaattccttctgcttaactcctcctgaaatggtttttgtagcttacaactgataattctgcattatacatgcccagaatagaagataaagtaacagggttccagctggaattgtccaaggaacagagtaaatagccacctttacaaacagctttcttgctgtgtctggcactgtgctaggggcttcataaactttatctcatttagtcttcacaataagcctgtgtggtggattttattattagcagctcatccagagtcacacaacaagtagccaagagctctttagtggtaaacctcagactctgccatctcttggccatgtcagcttcccccactacgacagccaccccctcatttctttctttcttgctctctcttcccacatgctgttcccagtccttcccccaactcctcagtggccccctcagtatccttcagcgtaatggaggggcttagttcaccaaaactctactccctaaaaggaagagccctctcagacccccaggccacaagcccgcctcccctgctgtcttgctgggaatcacagggaagtgaggggcaccgagtgaagtttcctcccctccaaggcacttccccacacacctttggcttccatctgccagctgtgctccctcctggcatcacactctgctcccagctctcagaacactttgcacaacctctctgttagaaaaaaataaaaaaggaaatggccttggagatttccaggtctccaatcctgaaagctccctggcttggctaggaaatgccccaggaggtgggctgaggacagactccctcaggttcccacgtggagaagcctctgcctgccaagcccttccttgctgtcatctcccagatcatctgtcttgtgtcatccatgccctgtgatgtcacaggcctaaatgtgatgtcactttgtcccacatgccctggggaggtagcacagagggaggaccatggtcttctaactgaggaacctgagcagatgccttgacccagaccagagacccaagccaaggaaagcccatgatcaccagagtgggtttgggaagtgcggacagagggggagtagggagctgactccaggtgcaaggggcac

SEQ ID NO: 2484 - DNA, 4001 bp, Homo sapiens
ctgctgctgtgaatgttatttctaatgttatctatgtgaaaactcattagaaaagattttcttcaaagaactgtgtcaggaaaaactttacttacaaggagaataattttgctttatcttcacagcaatgccaatactttttaactggctggttatccatttactatgatttccaggaagactgagtacacatttgcagctcaaatttgttccaaccatctgcaaaccctatgacttgaatatcaacttaccaatcttctaaatttccttttagacttgatcttttatttggtttacatttttcctgaccatacatttcctttttatcatatggatttttgggagatttaaacaactggatgaatagatggataccttacctggaagctgatcattttctgcagctcttacacagaaatctatgaaagtagaaatggggaagagaatagaaagacctgagataccaggactgcatgcaaagtagaaccctgctctatcagaccataagtacccacactgcagcctcagaaaatgccacctagtgggggagaatgacatttctagcaagacagaaaagtccatgttccataagcacagatctctacttgtgattgttaggaatatatggagcttagataaggatgttatatgtttctgtcctactgatctagcaccaagtggttcctcttgaaacagttattttttttcctcccagaaatttatcctgaagaaataatgaatgagttgactcacttaaaagcttggtctctgaagctccgtaagtctaaaaatgattccttcctgtgattctctggtttctactctgacgctgggataagagattgcaaattaggttgggctttcttgagaaggctggattcagggacccaggaacacttttttttattttttttttgttaagctggatccttcagtttaaactccaaatgtttctctctgtagaaactcgccatctcctatgagcttagaactgctggggctctagaaagggtataatgggcaaaccggggactcacatcttcatttacacagtctgcactggaagatctgcagatacaccaagagactctacaaaatgactacaaatcgaaatttactcagcattcattgctcaaacatttcaggagaataaacccaactctgttttatgcaggaatgctatactgtaaaaaaaaaaaaaaagaaatttggagaaaatgtatctgagtttgaatctcagttcttccacttactaagctgtgtgagtccaggcaagtaatttcacctttcagcttcagttaactcatatgcaaaatggtaatagcatttacttcaaatgattgctgagaatacccttctaatccatagcagtttctcaagaatgctttcttcctggatcccttgaaatagcttacagtttccactggatcccttgacacggcttaaaattgtcgcaggctccagtcgggccaactatgctcttggaaccaggaaaggtacagttagatgaacagactcctacatagtgaccttgacctacaagagcaggaatgcaaattgagcctctcccagtcccaccagagccctggacatctacccagtgccagtcggagcccaactcttgctttctctcagctactcgagttgaacaggacccacatatccaaacctgaagtcactgcgcttggagactaaagttttatcttcggtagggtaaacctagaagccagtccccgcctttctcttacgtcctccgagtccagcaaagccatacctgccaccctttcactgcctcgctcgcagctccggctccaagcctgggatcagtcacagcgtcgtccagagacaggggagcaacacccgcccgcacttcccgcggcgctgatttgaagattgaataccggctaccgtcctactacgcgtgtgcggaagtaactgtccacctagagttcctggactcctcccgggtgtaggccatccgtcggagaccacatttcccataaggccagtggagctcgtttccggaagacgtcagacgctgcttcctcttggggggtggtgcggagattcccgggttggtatctctattgctagcctgagagccacgctttttaagtcgttttcatttaaaaggatacacagcatttttaaatactggaaagtaaaatcggcggtatgctaaaaacaatttgctcttactcagcagggtttcttctagcaatgcaccaggttaagtcggagaggtgaagaggatccaacaaagaagactgagaaggaataatccatgaagtagatggaaaagtaggagagtttagatctgcaaaaccaagggaaggaagtgtttcaagaagggagtgacccattgtctcaaatgttgctcataggtcaagtaaaatgagaattaagaatgggccactgtagcaatggtcaccagtgatgttgaaacgccattttggcagtggtggaagtttgataaagtctgatgaaaatttgataggagttggagggaaggatgggaggagaggaaatggagaaagcaaatatacgcaatacttttaagaagttttgtttttaaggtgagcagaaaaataaggctatcatgggatagggattttgttaatcttttgttgttgcgtttttccacgttctaattttttttttttttttaattcaaagatggggctgagtgtggtggcttatgcctgtaatcctaacatttcaggaggccaaagtgggaggattggttgagcccaggagtctgaaactgcctaggcaacatagtgagaccctcatctctacaaaaaataaaaaactagcctggcatggcacccgcctgaagtcccaactacttgagaggctgagatgggaggatcgcttgagcccagacagtagagactgcagtgagccgtgatcccgccactgcactgcagcatgggcgacagagctagtctctgtctcaaaaaaataaaataaaaaagatggaagaaattatagtaagtttatgtactaattaaaaggatctaggctgggcgcagtggctcacgcctgtaatcccagcactttgggaagcttaggtgggcagatcacctgaggtcaggagttggagaccagcctggccaacgtggtgaaaccccgtctctactaaaaatacaaaaattagccgggcgtggtggcagacgcctgtaaacccagctacctgggaggctgaggcgggagaatcacttgaacccgggaggcagaggttgcagtgagccgagatcacaccactgcactccagcctgggcgacagagcgaggctctgtctcaaataaatgaattagttaataaaataaaacaaaagatccagtagaggcgggaaatacacaattcaggatagacaggctagttactcggaggaatgtccttgagaagagaagggatggaatccagtacacaatcacagggatcattctaagtaagagtatggataattcatctccattgaaataaaaggggaggcagagtttataagtacagatccaaacaggtggacaaatatggtggtaggagaaagaggatgccctgttctgagtgcttctattttcccagtgaaataggaagctgaaatgaagatagggggaaagtattttagacttgacagaaaagatgaataccgtattatgatgattttgaaacatgattttttcatattttaacatctgtgaaattgctgtcttacaagtgatggcattccatagtttaatcaggagcattgttttttattagtatataaaataataatacaacttataatcaatggcatctgagattcgataaagtatgatttatgaatgtgagcaagtgaatagattaaggaaatgtagtactattgcctggcaccattaagaactggcttgatattagtagccattatcgcttctcagccttttggctaagatcaagtgatattagtacccactgactttactagcattttctatgcaataaacacatctctctct

SEQ ID NO: 2485 - DNA, 4001 bp, Homo sapiens
cacccctccccatcttgctttcccgaggctaaaactcccaagatacatacacatttctccagcacagctgccacagtgggaaaaagccaggctccctcaaccctcacccatcatttctgctccaagctcctcaccccattccatcccctaactttaactcctcaccctttccattttcctgtggcaacagtagcccaggaagtttcacctagcctcaacctggccaagtgcaaaaaataaaattaaaaatcccacaagaattatgtggcactaatccaacaagcaggccagctcagagtttgtgggagacccaggtctgtcccctaccagtgtctccccatgagtgtttctgtatctacgaagaagcaactaaagagtctatccctatccattccctgcccaggttgcaggccatttcccagccagctctcccacctctctccagtcttcagactgtaactagagacagtcccagcaagtggcagctgggattgctgggaccaaggttggggtgggggcaaaaccaaagggggagtcctcccctcacccccaccctattcaattctgcagaatctgggtttaaacaaaaacccttgtctctataggcctggctcctaagcctggttccctcctgaccagaggcctgagctaccttccactcaggtactcagaaaagtggactgctacaacgaagaccagcggggactaggagaaaacacctgcgaactcacccgcccccacaccccgccagccacctccctcttgggtgccccagtgacttagaggtcatccgatggccacccacccagagcagacagtcgaccaagcaagccgccaagctcaagccaaggaggatcaggccttcctgcgactgctgagccctgtctctagggctcctatctcccccgccccctttccctctgtggttccccaaaagccaaagaggctgaacaggaagaggctgaacaggcccaggtcgagtgggggctccactgacctttgcccgggcccaaggcctgcagcgcagaggagggcgaggggctggcggcgattaggttgaggccaagctgggtagcagacggaattaagtccctgccatctgccgagggctggcgcggggagcaagtcctgggtttcgaggagggggcggggtgtacacatgagaaactacaagggaaactgaggcgcgcggcccttctctcactcgcaccggcgtgcgaagcgaaggccgggcctcagccaggccaggccctttgggagctgctgcgcagcacctggggacccaggactacacaggatagggtggggagctggaaagaggggaggagagaggggacggtctctgcgcgactctcagctctctagctggggtccgtcccaactcggacctcgtcccctcccctccgggcgcagcggagcctcctcccgccgcgcactcccggaggctcgctagagactggagactgatcggggggtgcgcagggggccgggggcgcaagcctgagtcttgcccgggcccggacgctgacccgcacccagtcggggtgcaggttctgctccggcctggcccaggtcccccgcccccatccccgggaacggacaccattttaggtcgcgacatcccgcagccttcaatctccgggccgcacttcgggtgcctctcgagccgggggcgccaggacctggggttctcgaccctcctgggggtttacccggctacggactgtgcttacaacaggccaggagtttcgcccatccgccccaatggatggaggcggtgtctgggccttcctagaagccgccccagggggcggcgcggagaagggggtagttgaccaagtgggggaggggcgggggtatttacccgccccccccaagggggcggagccaagggcgggtatttaccccaggcacgcttacttgttccgctcctggtgcgggccgagacccggcggtctctaccccgctccagccgctgcagccaccgccgccctccccgcggccgccgctacttcctgcttctctccggttcggcctccccactccctctcctccctccgcgctccaggtctgggctgcccgttttcgcactcgccattggcccttgcccccgtcgctcagccctgtgccccttccagccccgcactgggttggccctaaatactgccgctcggaactagccccgcacagtcctcttatgctcattgggcaaggggccgaggccctctgaagatacctctccccattggctgcgccggggtccgtctgccccatctacgagtctcgtaaacgattggcctccgccactgtcgcttagaaagaagccagcctgcttcccagcttgcctactggaagggggagcacccaggtgcgtctccgcccctcgctccctactggccgctcgaagcttgaagctgcagttcactttcgcgaatgtaaggaacccagcttctgtgtggtgggcactgagagcagaaccgcattgagtcggagtggagcacagaagtgtaggtccttttgcgctgtttcaagctaaacccgtgtcactgatgccgtacagaagttacagaatgggacgccaccccaaacattacgtcatccgctgaccatttccttgcggtcttcccaccgtctaaatcgccatataatctgatggatggggtcctcgcgcggttcagctcctgggcgacagcgtaacccgtcgctcctccctctgcgggagggcgtggacggggcacgggatttggagcatggaaggaatcgggacctaaaggttgggaagggctcgcggaccggaagcgggggaggtgacgtaggagtgctggcgtggccgggccatttccaaagaggcattaaaggagcaactgataggcgtcctaagtatgggctggggggggaaccgccagctccatttcccatttaagggctccccttttccccgcccccagcatggagtgggggtggggtcaaggtcgagttttcccgcgctttgttgccacgccccctggaggcgggggaaagggaggagtcgctcggaaaatgaatctccttgatgctctaatagcactcactggcagaattcgtatgcaagcccagtgtgccacctcgcgcacgcagccgctcgttaacggcgtgtttttattttttaattaatttttttgaggcagagcctcactctgctgcccaggcgggagcacagtggcgcgatcacggctgactgcagcctcaacctcccaggctccagtgatcctcccgcctcagcctcctgagtagctgggactacaagtgagcgccaaatcgccctgctaacttttttattttttgaagagacagggttttgccatgttgcccaggctggtctcaagcaatcctacagacgtgagccactactccctaccttggcgaagttttttattttttattttttgaaacggggcctcattctgtcgtccagactggagtgcagtggcgggatctcggctcacggcaacctccgtctcccaggctcaagcaattctcctgcctcagccttccgaccagctgggattacaggtgtgcgacactacccgcccggctaatttttgtttttttcttttttttttttttttgagacggagtctcgctgtgtcgcccaggctggagtgcagtggcgcgatctcggctcactgcaagctccgcctcccgggttcacgccattctcctgcctcagcctcccgagtagctgggactgcaggcgctctccacaatgcccggctaattttttgtgtttttagtagagacggggtttcaccgtgttagccaggatagtcttgatctcctgacctcgtgatccgcccgcctcggcctcccaaagtgctgggattacaggcatgagccaccgcggccggccatttttgtatttttagtagagacggggtttcaccgcattggccaggctggtctcgaactcctgacctcaaatcatccatccgccttggcctcccaaagtgctgggattacag

SEQ ID NO: 2486 - DNA, 4001 bp, Homo sapiens
tctgtcttcatgggacacaagtaaccatgaactgtctcacccacttttcctcagcaatctcctgattcctgcctactttctcctttatgcagtcacagaatcttgtgcttggcttatagtggtttgcaactactagtagaacatgtctgtttctattagtagtttataagcaacttgaggaaagggactgggtcatattagtaatctccttctgcagcataaagctgggtgctcaaatgtcttttgaatgtataagtgacaggatgtgatcttaattcacgccaccatcccatcccccaccccctgccctgctcccatctgacctacagctacagtatctctacgcaatgagctattcagcctccactcacttccgaaactgctattctgagaacctataatttaccaagttccagctctacccggggctggatgctaggtcaatgtaagagcaaaaggatttaggattatgattaccactcagtttgtgatacagtgtactgaaacagaccgtgaactccagaaattgtcatacaatgcagaaggttaagttcaggggacaggggcaggaactgtgccttagtcacctttgtacccactcctcagtgtctaacacagcacctggcacattattaacatttttttaaagctcgaatcaagtgctaagctgtggactaaggaccatatatgaatcatctaatttcacttcacatcatccttattttagagatgagaaagctgaggctcagagaaattaagtatcttgcccaagggcacacagcaagtaagtggcagaactggggcctatgcccatcacttcaaagtcagtgcttttaaccattatactattactgaaggaaaaaaggagagaagacgggaaggaaggaaataaaaacagtaccactgaagttcacatgatacagatgtatctccctgatgaaatcagggctgagaagtttcaaggaggagtaggtatttgacctaaggtttgcaggatgggtaagactgggacttgcagagataaagaggcaactacctactgagaagacagtgcagctgaagtacagaggcactttcatatcacactgcagagatctggggggaaaaggggtctattgggctttgtcttcctggtggctcagctgcacagagagaagcaacggtggaaggggctgagaagtggaggaggggccaggtctaagaagttaagagccaagaagatggggctagtgatcacagatgatgaaggtgaagcgcctaggttaaaggcaaggggccaagccatagtgcggtatggaggtccgaagttacaggtctttggggccaagtcaagggctgcagggaggaagaggagagaggagctatgaaagaccaagagcaaggtgctaacagggtaattgtacagggaagctagataacgggtcagagatacaggaggaccaaggaagtcagagggtcgcaggagacggtcagggaagaggaagcaaaggctgccagaagtgtcacaggccagggcccaagagctgagttgtgtgttgcggggcggggagaagccaatggcggaggtccaagggtacaagagctggtttcagagattgccggcgggcttggggccagagaggtgggagaggaggaggggctgatcctaaacgtatggtcagcggcaggaaggctgtatactcaaacccaacagaagggccggggaatgggttggggacagccacctggctgcgtgggccgggggccagggcgagggtcgcggcggagggaccacaaggccccttggcttcccactcggtccagggagcaaagcagcagcatccagatcctcggtgagagggaagtggccgtgtacagagtttcccgcgaagtcgtgtccgcctccccccgcgacctcgggcccaacccggacccacctcgctcccgccgctcgatcagggacagcgccgcctctgtaggcgagggaaggagctggagccggagccggaacccaggaaggatccgccctactactccaggattggtttcttgggataattctttatttccattggctaccatgactgccacaacgcaagcgacctggcaggaccaccaataagctttgaccgctggcgtggcatgctgggagttgtagtcctaaggaagcgcgtagactcagagaaaacttgcgaagtttaggatggagctgaagagactgggttccgtcctacggtgggatttctttccgtgctcgcgcgttcagccccaagtctcagggccactcgtctgggaagttgtagaatctgtatagccaacctacacaacctccaagggggcaagtactcaaatttccttctttactttgagttggtaatccttgaccgtcctgtagacgtccaacgaagcctagagtctggcacctcactcaaggtttataacttaaaatcaaaggagggtagagctggaagggagtttaaagataaaataacccaatctccttatcggagaagctaaaagtaccctgttcaaggatcaacctccaggtcttccagcccccctgagcagggattttcccgggttccgcgtgcatccctaattaagcctgacacgtgttcgtcaatccagacacaacaagatcaccaaagtatccaggactaggtcttttttttcaggttttattttttaaaataataaaaggctaatgaaatacgtaaactacaggcttctcgtatctgcacaatgtttcagtgcaaagaacaaggagcattgccttcagagctagataaaccaagtataaaactctggctctaccacctagccatttggagtaccaactccctcccccataaaatccctggcagaattactgtgaggatattatatatacatacatatattctcatgcatgtgtatgtgtatacatatatacatatatatgtatgtatgttttatatagttgtaaggttataatacatacatatattgaggttatttcttgatgacattaatattcaaatcagtagactgatatgtatgtacatatatacatgtataatacacatacatgtgtatatacatatactaatgtatacatgtgtatatacatgcatacatgtgtgaatatgtattatacatacatatgtatatatgtgtatacatatacacgtgcatacatgctaaatacatatacatatatatacacctatgtagtacagatatgtatatacacatacatgtatacatgtgtatatgtgtatgtatgcatatgtgtgtgtatattatatgtatattcatgtatgtatgtgtatatgtatgcatgtattctgcctccacaagctgacaatgtgagttagttttaagattgggatattcaggaatgcatgtttggaactgaatatggttgagtgaaatatgtgtgccttatgaacactatttgtttataaattgataaaataaaatactagagagcagactcaggaataaaactatggctttagtatgaacggtggctaaaccttgccttgggggactcaaagctctttggaaaccaatctcttaccttccccacaactcctcattcacaatgaaaataacagcataccaaaacacaaataccaaacttttattttaaaactgtacaaaagcaaacaaaaaattccactgagtcactgtgatagttaatcttatgtatccacttaactgggtcacaagatgcccagctatttggtcaaacattattctgagtgttcctgtgagggtgtttctcaatgacattaacattcaaatcagtagactgagtaatgcagactgtcctcccaaatgtgggcgggccttgctgaatcagttgaaggcctgaatagaacaaaagagctaactctgccctaagagaattcttcctgcctaatagcctttggacaggaccatcagctttttccttgccttcggacttgaattaaacatcatctcttccttggcgtcaagcctgctgccatcagactggaactaaaccatcagctctc

SEQ ID NO: 2487 - DNA, 4001 bp, Homo sapiens
aagatagagtttttccattgaaaaaggatcatttttagagaacagggttctgagctacagaaaatgggaaacgtttttcctcccttttctccataactctgcttttttccagcctacctgcaagctcctgcccactcgtggcctcggaacaccaacttctccgagtagtatgtggaagggaggctggcttgggtgcctctgaaggtgtagggctcaaagagggtccccaggagaaggtatggcctgctgagcactcccacacaagccccccatcttggccgccaggcccccgaagcccgggcaccaggctgcactctcggctgtgggcatgagacaagagcaccagatactgcagaccttttggaggcaaaggctcaggacctggaggggtgggggaagcagtcaggctgaactgggaagtctcctcctcttaccctggagagccatacccagggagccctgttccctcaaaccccagggcaacctcagccccagtccaatttatcattcttcagaacctagacacactagatcctgagacattgctcccttccccacccagaggttgcctccatcaaactaccctgtgctccccaactcaccccacccttcccaaacttactcagggctccctttgaaaggagggtgtttctgggtcaccctgtggtccctcttccctctggctctcaccccctgccatcccctacctacctgcacagaggacacagcctgaagaagtgtacctgccagcaggagaagaggcaggtcaggactcaggtggccagccaccctcagccctgggcactcacacatgtaaggggccagccctaagggccgctattcgctgagaccatgaggaggggagcaggaccctcggaggccacaagtcacacaggccgtcctggtaaagtgagaaacctgagggtggaaaagagcagcaggacaggccctggagaggaggctaggggctgctgcctgggtaccctcccccaagcccttctcccggcccctaaccggtccaacaggaacttggcgagctgcgagtgcagggagaagcccagccgctccttgaggaggcaccactgctccatgtggccgcccaggcggatgcggcacttgctgcggcgcgcgtccagctgccgccgcttctcccgccgcctgcaggacacgtccaccgccggggaggaagccatgtgcaccagaggctggagggtggaagggacgtcttcagcgccctgccgatctcgggggtcggggacccggctccacctgccgttagggcctcagtttcctcatcagtgaactggggcaagactaaactatttcaatagcagtggcaggtgtggagccaaaccccgtccttctatgatacagggtgttgaagctcagcgctaccatgtgagtgtcgtcgggtgggaggcaggcagacagaagcagtcagaacaaaggcctgcgccctccagtccactgaagtggagctgtggggaaggggcgagagactttcacgggaaatttcaactgggctgggggcggtccacacatttcatcttgaatagggcagcggcctttactggtttctaggggaaggaaaggtcgtgtcctggcgtgcagctgggggcgctcttcatagttgggtcgagtggcggtgaggccgtggtcagaggtctggagggcgccccccatccaccccgtcttgggcacccccacttaatgctgacagtgagtggagcggactaatcccaatggcagttcccaggctgcccagagcccccgtcgcgacccacccccaccccggccttacctgtgcgcccccacgcgccctcacccccactgcgcctgcgcctgcgcctcccgggcctagcgagcaggcccggagctgctggaagacaggggcccacctcgcgcgcgcagcgtttctcttttaagaagaaacggtgcctctcggcgtcggctgctgtagcccggaactgaggcccgcgccccagagggaggggcgagtcggaggccgacgccgtgcgcctgcgcactgggtgccccgcgcaacgcccgccgggaatcgtggttgcccgactcaagtcgcccgcgcgtgtcgcggagccccgcggcagttgtggttgggtggcttctgtggtgagcgtctgcgcttggtgaccaaaggtttgagggaaagtggaagagacagggtcaggcctcctgtgctccaaccccagcccacccggcctgtatggggacgttgcctcttcacttgttcccgttttgtattcaccttcgatttccccctcacagttgccacccgcaaacatgatgcagaatcagtcactttgaaagacccacagagggtccagctagagccctctgtggaccgcagagtcccaccagctacagcccacttctattaccatcagaattcctcctaaaagttgcctgcattctctgtgtacgctcacttcccatcctcttctcttcaaatggctctgatggagctttcctccccacccagccactgcagtggcgcttcacaaggtcacttgagacggtcatattgctacatagcagctgtcagttccgtccgcctctctgccctagaaagagcgcgactatgtagctctcgtcctcctcatctttatggctccctctacattttgggccccagttttacttctgtgacttcatatgctccaggttttccaccctcctcactggctccttctatcctttttttggatccattccctctgttctgccaaaagatgaagtgtgccctggctcaggccttgaaccagatcttctctcgtctgcatatgttctcctgggtgatctaattagttccatggctttaaatacactgatggctcctagcctagccctctttcaactccagtcatatatcttactgcccgcttgacttacatgtgttaactgagctaacacgtgtaaagaatgtaggacagtgcctggcatgtagagagcgctgacacatgatagctgatattttctccaacataaatatggcaaacatataacaataacgcctgtaccctcccccatgccagtaaactatgtcatcatccacccacttgttcagaaaaaagggaatcagccttgattctttgccttttatgatacctaaaccatatacatcagcaaatcttgttggtcctgtctccaaaaatttatcttaaatccaatcacttctgaccctctcaactgctaaaaccctactccaagccactggtattaattttctgtaattgttgtaacaaattgtgttgtgtgttgttttcagccacaaacttgctccctttactcaaatttattttctcacagttctggaggccaaggcatcagcagggccacaggccattgtaagggctctaggggagaatcctttccttgcttcttctagcttctaatggtggccagcattctctgacttgtggccacgtcactccaatctctgtctctgaggtcacattgcctccttctgtgtcaaatctccctctgcttctctcttacaaggatgcttgtgaatgcatttagagtccatccttataatccaaataatctctccatctcagtatcctaagacaatttcttctgtaaagtatttgccatataaagtaatcggctgcacacggtggctcacgcctgtaatcccagcactttgggaggccaaggcgggtggatcacttgaggtcaggagtttgagatgtgcctgcccaacatggtgaaaccctgtctctactaaaaatacaaaaaaaattagctgggcatggtggcatgggcctataatcccagctactcgggaggctgaggcagaagaattgcttgaacccaggaggaggaggttgcagtgaaccgaaattgcaccactgcacaccagcccgagtgacagagcaagactccatctaaaataaaataaagtaatctccacaagttttggggattaggacacagatatcttttctgggactatttttaagcctaccataccactatca

SEQ ID NO: 2488 - DNA, 4001 bp, Homo sapiens
cttcttcccataggcaacctggttttctatgtgccttccagagatatgtcatacattcgcaagtacttacacatacacacacacacattcactttccccttatttgtatttttcaccaatgatagcataccatacactgtattttgttttgcttttcatgcccaacagtgtatttgatgatatatttgtcaagatagagtttttccattgaaaaaggatcatttttagagaacagggttctgagctacagaaaatgggaaacgtttttcctcccttttctccataactctgcttttttccagcctacctgcaagctcctgcccactcgtggcctcggaacaccaacttctccgagtagtatgtggaagggaggctggcttgggtgcctctgaaggtgtagggctcaaagagggtccccaggagaaggtatggcctgctgagcactcccacacaagccccccatcttggccgccaggcccccgaagcccgggcaccaggctgcactctcggctgtgggcatgagacaagagcaccagatactgcagaccttttggaggcaaaggctcaggacctggaggggtgggggaagcagtcaggctgaactgggaagtctcctcctcttaccctggagagccatacccagggagccctgttccctcaaaccccagggcaacctcagccccagtccaatttatcattcttcagaacctagacacactagatcctgagacattgctcccttccccacccagaggttgcctccatcaaactaccctgtgctccccaactcaccccacccttcccaaacttactcagggctccctttgaaaggagggtgtttctgggtcaccctgtggtccctcttccctctggctctcaccccctgccatcccctacctacctgcacagaggacacagcctgaagaagtgtacctgccagcaggagaagaggcaggtcaggactcaggtggccagccaccctcagccctgggcactcacacatgtaaggggccagccctaagggccgctattcgctgagaccatgaggaggggagcaggaccctcggaggccacaagtcacacaggccgtcctggtaaagtgagaaacctgagggtggaaaagagcagcaggacaggccctggagaggaggctaggggctgctgcctgggtaccctcccccaagcccttctcccggcccctaaccggtccaacaggaacttggcgagctgcgagtgcagggagaagcccagccgctccttgaggaggcaccactgctccatgtggccgcccaggcggatgcggcacttgctgcggcgcgcgtccagctgccgccgcttctcccgccgcctgcaggacacgtccaccgccggggaggaagccatgtgcaccagaggctggagggtggaagggacgtcttcagcgccctgccgatctcgggggtcggggacccggctccacctgccgttagggcctcagtttcctcatcagtgaactggggcaagactaaactatttcaatagcagtggcaggtgtggagccaaaccccgtccttctatgatacagggtgttgaagctcagcgctaccatgtgagtgtcgtcgggtgggaggcaggcagacagaagcagtcagaacaaaggcctgcgccctccagtccactgaagtggagctgtggggaaggggcgagagactttcacgggaaatttcaactgggctgggggcggtccacacatttcatcttgaatagggcagcggcctttactggtttctaggggaaggaaaggtcgtgtcctggcgtgcagctgggggcgctcttcatagttgggtcgagtggcggtgaggccgtggtcagaggtctggagggcgccccccatccaccccgtcttgggcacccccacttaatgctgacagtgagtggagcggactaatcccaatggcagttcccaggctgcccagagcccccgtcgcgacccacccccaccccggccttacctgtgcgcccccacgcgccctcacccccactgcgcctgcgcctgcgcctcccgggcctagcgagcaggcccggagctgctggaagacaggggcccacctcgcgcgcgcagcgtttctcttttaagaagaaacggtgcctctcggcgtcggctgctgtagcccggaactgaggcccgcgccccagagggaggggcgagtcggaggccgacgccgtgcgcctgcgcactgggtgccccgcgcaacgcccgccgggaatcgtggttgcccgactcaagtcgcccgcgcgtgtcgcggagccccgcggcagttgtggttgggtggcttctgtggtgagcgtctgcgcttggtgaccaaaggtttgagggaaagtggaagagacagggtcaggcctcctgtgctccaaccccagcccacccggcctgtatggggacgttgcctcttcacttgttcccgttttgtattcaccttcgatttccccctcacagttgccacccgcaaacatgatgcagaatcagtcactttgaaagacccacagagggtccagctagagccctctgtggaccgcagagtcccaccagctacagcccacttctattaccatcagaattcctcctaaaagttgcctgcattctctgtgtacgctcacttcccatcctcttctcttcaaatggctctgatggagctttcctccccacccagccactgcagtggcgcttcacaaggtcacttgagacggtcatattgctacatagcagctgtcagttccgtccgcctctctgccctagaaagagcgcgactatgtagctctcgtcctcctcatctttatggctccctctacattttgggccccagttttacttctgtgacttcatatgctccaggttttccaccctcctcactggctccttctatcctttttttggatccattccctctgttctgccaaaagatgaagtgtgccctggctcaggccttgaaccagatcttctctcgtctgcatatgttctcctgggtgatctaattagttccatggctttaaatacactgatggctcctagcctagccctctttcaactccagtcatatatcttactgcccgcttgacttacatgtgttaactgagctaacacgtgtaaagaatgtaggacagtgcctggcatgtagagagcgctgacacatgatagctgatattttctccaacataaatatggcaaacatataacaataacgcctgtaccctcccccatgccagtaaactatgtcatcatccacccacttgttcagaaaaaagggaatcagccttgattctttgccttttatgatacctaaaccatatacatcagcaaatcttgttggtcctgtctccaaaaatttatcttaaatccaatcacttctgaccctctcaactgctaaaaccctactccaagccactggtattaattttctgtaattgttgtaacaaattgtgttgtgtgttgttttcagccacaaacttgctccctttactcaaatttattttctcacagttctggaggccaaggcatcagcagggccacaggccattgtaagggctctaggggagaatcctttccttgcttcttctagcttctaatggtggccagcattctctgacttgtggccacgtcactccaatctctgtctctgaggtcacattgcctccttctgtgtcaaatctccctctgcttctctcttacaaggatgcttgtgaatgcatttagagtccatccttataatccaaataatctctccatctcagtatcctaagacaatttcttctgtaaagtatttgccatataaagtaatcggctgcacacggtggctcacgcctgtaatcccagcactttgggaggccaaggcgggtggatcacttgaggtcaggagtttgagatgtgcctgcccaacatggtgaaaccctgtctctactaaaaatacaaaaaaaattagctgggcatggtggcatgggcctataatcccagctactcgggaggc

SEQ ID NO: 2489 - DNA, 4001 bp, Homo sapiens
acacgcctgtggtcccagctactcgggaggctgagacaggagtatcgcttgaacccgggaggcagaggttgctgtgagccaagattgcaccattgcactccagcctgggcgacagagcgagactctgtctcaaaaaaaaaagaaaaaaaaaaaaagcccattcattgcactgtgaaaaaaacaaaaaagaaccgttaaaatcttgcatctgtttgaaaagcaaataaaggacaaataagccgggcgcggtggttcatgcctgtaatcccagcactttgggaggctgaggcgggcggatcacgaggtcaggagttcgagggcagcctggccaacataatgaaaccccatctctactaaaaatacaaaaattagccgggcatggtggcgcctgcctgtattcccagctaccaggaggctgacgcaggagaatcgcttgaacctgggaggtggaggttgcagtgagcccagattgtgccactgcacttcagcttacctgccattgggcaacagagtgagacttcgtctcaaaaaaaataaataaataaaaagaacaaatagttgataatgttgtgtttggagagacaaagttagcatttgggaatgtagaaaagaaactggaaacaagatttccttcaggccctaaaacagttaggctgggggaacagagtcctggatttgaggtcctgcttgccatacatttgaaaaatgctgggaaaaccagttcccctgtggagtgttagaatacttaaatggcagacaattagactgagtggctttgatgtcctgggattctatctaaggaatcctagctaacttagatgaatttcttgtaaattgcaaacttggagaaaaacaaaacgtaggcttaaccaaccactaaatgctaataaatctcttattacataatcaggaaatttcatcctggacagtccaaataaggtgactgcataatggcaaccgatcaattattaaacgtggttgcttcctcgtgcaccttatgaagaccttcccttcaagtttagccccaaaccagggctaggggcttccagattcataaatcactgtttgctggaataaactccttaacatttcaaaggtgcttcagtttatttttttaagaggagaaaggagaccgggcgcggtggctcacgcctgtaatcccagcactttgggaggccgaggcgggcggatcacgaggtcaagagatcgacaccaacatggtgaaatctccgtttctaataaaaatacaaaaattagctgggcgtggtggtgggcgcctgtaattccagctactcgggaggctgaggcaggagaatcgcttgaacctgggaggcagaggttgcggtgagccgagatcgagccaccgaactccagcctggcgacagggcgagactccgtctcaaaaaaaaaaaaaaaaaaaaagaggagaaaggaacccacagaccacagctcctcccacccaggaacctttcacgggagtcgggactctcccgacaacccctccgtcatcacagcacaatccagggaagacgcggcgctgcgggcgcggggctgccccgggagggctctgggccgtgccgaagtcaccaggcagagaccggacagtcacccagcggccgggatcccgctgccggcccggcccccacctgcgcgggacgggactgagggccgagctgcgccagcgggactcggccgcacactccggagccgaccgccgggaggcccggggccgccagcgctggttccagccaattccaaccgattccaaccaccccctctcccttctcgggacaccctgctccgcacactcaccatttcccagcttttgggggtcccagcgtcctccctataaatctcgcaatacctgcaggccacagggcgatggagcctgcggcagtcacccgggactctccgagaggcagcagacgggaacccagcaccccgccggccgcaaggagacaaaggccccgccagatccccaaggccgccccttcctctctggctgcacgcctgattggacagttctcacgctagcgccgctgactggatggggctccaggccccaccccctcaggtcttgagtgacaggaggtgcgatcagacactgggccgaatgaaacaagagtgacaggtttttgggtgcagcccttttgaagcgacattcctcacggcacttcgacctggacccacctgcctgggggataatggcatttaaccttgtatataagattatatccattcataagttttacacacacacacacacacacacacacacacacatatatatttcacaaatagaaacaatgaatgataattattttaaagtttccgatttcataaccttccgggcctctggtcttttgaccaggcagcctgagctgtggaaagtgaggcaatcctctcaggcagcaatatgcaatataaataaaaggtgagccacgcgtgtcatttaaaattttctaggatctggcgggtcgtggtggcttacgcctgtgatcccagcacttggggaggctgaggagggaggatcacatgaggccaggagtttgagaccagcctggccagtatggcgaaaccccgtctctgctaaaagtatttttaaaaattagccaggagtggtggtggtcgcctgtaatcccagctactcaggagactgaggcaggagactcgcgtgagcctgggaagcggaggttacagtgagccgagatcatgcctttgcactccagcttgggtaataagaggaaaactccatctcaaaaacaaaaacaaaacaaaacaaaaaaatcggctgtgaagacatttcctcctgcagaaatttagccaaacagctgagtatgtcttgaagtcattctttggttcttaacagggcaaagctattttctaagacctaaaccctggactggccatggggcaaaccctcacaacacatatggaattcatgcacagttaatgcatctcttaccttgaaccagtggttgctactaattttgtttctgattcagcccagttctacaactgccctgctatgcacagggcactgtactagctgccctggccttggtgaacatcattgtggggagaggactttgctgggaaaaagttgcatccccccagattgaaaccattccactttccaaattggagtaaaactgaaaagacctaggggagcacccaaggttacaacatgaatgaatagctcagaatatttaaagtcatttgatggtatcatgggtgagtgtgtctcacttcaaacaaaataaaacactactgttattctgagattctaagttaggatttatgtaaaaatatataataatttttttgatacacaacacacatacaaaaaaatacaaagcattcatgtaaagctctgtgagttattacaaagcaaatacagttgtataaccaagaaatagaaccagcatcactcatatcccaacaattactatctgcctcccttatctacctccccagtggtaagtaagattattattattattattattattattattattattattattttaagacgaagtctcgctcttgtcccccaggctggagtgcaatggcgcgatcttgactcactgcaacctccacctcccggaatcgagcgattctgctgcctcagcctcccgagtagctgggattacaggcgcctgccaccacacccggctaatttttgtatttttagtagagacagggttttaccatataggccagcctggtctcgaactcctgacctcaggtgatgcacccgccttggcctcccaaagtgctgggattacaggcgtgagccactgtgccctgccgattttttttttctttttttgagacagagtctaaccctttcacccaggctgaagatgctctagcgatcctcctacctcagccaactgagtagttgggactacaggcacacaaccaccacaactggttcatttaaagatcttaagagctaacattgtacatcacttttgccttttcatacaagcgtt

SEQ ID NO: 2490 - DNA, 4001 bp, Homo sapiens
gcaggtgaaagaaaagaaaaaagaagtagaatcttagatacaaagaaaagcccatatggtactgacataggttcaagctccagacctcttactgacactgtagctatttttttctttctacataagcagacaagctccttcttgccttagtttatcatccttacaaccaacctttaccctttctccttcccttcacaggacactagtaattaggcaaaaaatgtagattctgaggaaattcaaagagttttggtgggggagggagaggaaatgtgatgcaactccatgagccttagtcatgctgctgatgtgaggtcactatttaccacttcaatccagccgcatcaatccagccggttcttctgtctgactagcatccatttacccctctatcccagtagttctgaaaagccatctatgtgttcctttgtgtaatgtaaagggcagcctgacttcatatttatgatcttgttcaataggatgccatcttattctctgttgggcatggctgaacttttgacatcaactttcccttaacaacaacccccacttccaacacacacacacacacacacacacacacacacacacacacacggccaatatgttctaactagaaatcatctaaattcacagagcctcttcccttcacttcattatcctcatggcctcatcctaaacaactcggttttttttctcgattccattctttatctcagttcaaatgcctcatctctcccaaagaagctaaggaagaaatgttttgtttcacctcgaaagccatttatatcaggctcagggctctctccatgtcctacagcatcattctttcgaccatgagccttgcatactcctgcctggccatataagtggcattcttaaaggttcatttggttcctcaaacgtattccacattaaataatatccacatgttggcttgttgagagaagaaggtaaacagttgggggcatcaacaaaaaatcaggtgaggggagaaaggagagatagtgagtgtggccccttaggcatgctgagttcagttacaacagtcacacttggactgtattcaaagttgcccactcatccaccacagctactcaaagacatttaactcgctagccattatccaaccgcatttaccagacgctcagtcttgagggaggagggtaacgcagtaggggatgcggagtattggtgtcatcctacaggttaaggacaaacatgcccactacaaggacagggatacatcaccaacttcaattcagcccagggttcatgtagtaaggggtgggtgattcactcctgtgggggaggcagggcgggggcggttgggggaggcggttaggaaaaaggaaaatcgtggaaagtcccagaggaagtggtagtcagttcccgatgcatggccataatgtacattggccataaggtacactcagcgcctctgtgtcgctgctccccctcaaccttttactcacccactcctcccaacacgcgcctcacccgtgcctccatgcacaatcctgagcctcggcatccccgcgaggtgcaggttccagctttgcccaccaccccaccacctacctacatggacacgtgtggttggaatgcctcccggggctagacggccacccctcttgggctgcgagctgctgcccatctctccacccacccgtccttattgtgtcatttgcccggtctgatggcagccccaaagccgctcatttgagtgggctagaatggagaagagaggaaaagggaggcacacatttcattcactaggacccaagatgacctgccgcctctctcctgcccttctcggagccccccaccctcccttagccccagtggggctggaggcacgaacagacaaggcaaggggagcgcagtccgtcaaggtccacagctgcacacaaagcccttcaccttctccttgccttccaagctcctccctgggcttggtttctccgagggtctctgatgcccccttcggtggtcggcgggacggtcctattccctcttgcatcgctgtctcctccctcaagtctcagcctcctcctccccgcccctcgccacatacccctgagggagctcagtcctggctttgggggcgcgagagcaccccataagcccggggccctgcgccccaggggagcggacaacggtccactttacgaggcacaacttcgcccagccgttccgccaccgcactcgaacacacaccccatccccgcagcggtcgggtctggtcccgatcagccccatccccgggaggcggttgagcccagccacagccacgctcctacctgcgaggcggctggcgcggcgaggagctagggcaccgagcgccccggcccgagccccgcaccgcagcgcgtctgcccttgtgcggcggcggcggctgcagcggccgctgggtggcccgctggctggctggttggctggctggctggctggctggctggctggctcgctggctggctgcccggctgactcctcactggggcttcctgtagggctggacaaaggacatttcctgggaggagcgggagaatgttcccagcatgcctcgatttgtagttcccggggacttcctgccaccgcagcagcgggcgccctggaggtagctcgggccaggctaggactccgggacaggaggaaaggcgctcgctgcttctctaagcgctgtggggaagggagcggccggcgggtcttgccccacgccccgccccgcggcgctcaaggagcccgctgtcccggagcacgcgagatcccagcgctgcactccgagctcgcggcaccggttgcgggcagccggtgggacgctgccgctgagctgtcccatggttcgggagggctctgcggtgggagaggccttttctttaaaaactgggaagtttgtggtgggttcgctttttaaaaattaatctaaaaacacaaaatctatcttttaaaatagattttctttttgtcttttacgccgttgacatcctgctgggggccgattaaagaacttgattgctcaccaggaattcaggttccttaagatcttggcgcttcatctttaaaaccatacagagctgattgtttccagatcccgacccggtgacattcctccctcattgttgaccttgtcccaaacatcttttcaagaaaagcaattaaattgagattgaaaataaattacgtaaattaaatattagacgtgaaaacctgtgtgctgctgaattaggaaagtgctggactttctgcgtatctttccttcattaacctttaggattcagcttcttggtcccataaaacagatgtgctggccactgtatattgagtgtgtgtatttcgggagtggaagggtgaggagaagaggacattggctacaagagaggaactctacttccagcctagcaagagtctatgatgccctgcacatgtttttgtctatttctgggaccacagactcaggacccttagaaaatcaaggaaggaccacatagagactaaatgactaaaagctatattctctcctggagcatgagcagaaagtaataaactgaactaggaaaggacaagttctaggatgctctagaatgtgtttgaaaagtaatcagatagaaaagtctctgggaggccgggcgcggtggctcacgcctgtaatcccagcactttgggaggccgaggcgggcgtactacgaggtcaggagatggagaccatcctggctaatacggtgaaaccccgtctctactaaaaaaaaaaacaccaaaaattagccgggcgtggtggcgggcacctgtagtcccagctactcgggaggctgaggcaggagactggaatgaacctgggaggcagaccttgcagtgagctgagatcatgtcagtgcactccagcctgggcaacaaagtgagactccgtctcaaaaaaaaaaaagaaagaaagaaagaaaagtctctgggcttggtggctcatgcctgtaatcacagcactttgggaggccgaagtgggaggg

SEQ ID NO: 2491 - DNA, 4001 bp, Homo sapiens
atgtatacctgcaggaatatcgcatacaacgtggacatctgtactttgcttcttctgtaccacaagtctcacacctacaaaagcccacatgtaacattaaattatcaaatattaattgtatttatttataaacttagaattcccaatcaatttataaactcagtgacaagtaactgataaaatatttgatagctgttgaacatcatttgaaaattcttctctatgaaaccttcccaaaacaactacatttccaatgttgttagtgatatgtaactcaggaaaatgtattaaaatttttaaaacccatctcgcttttgacttctttttctactataatcagggaatgagattattcactgatattttaacttgtgattcctggaaatgtggtaatgattgtatgtgtgtgtatccagaagtccaattcatgagctatgtttagatatttttaaagcacacaccagacaaagaatataaggccaagtgaaatttagagagtagtagtagcaccctttttcctgaactccacgcctaatctagaatgagcatcgaaataatctagaaatgccatgtaacccatcatctgtcctcaactgctcttctatgctcctgggatactgacaaccaaactacagttacttctatttagcccactgtgttctagacgggaatattctcaagaatctgactactcttatttcctttgtcacatgatccacacactaaggaaattcaatcaaaagcaataaatattcacagcacccatgaagaagcttgataattgaggtcaagtgtatttttgcctagttttaacttaatctactttgtcattgttagttttattagactttctcatctctattctctctcaaaggaataccgagtaaagagcatattaagtcaagccagatccagttccaactgatcttttggtccccagaatttccactttcctaacttgaccattacccattggacactactaatttcatgtattttcactgaatttgttgtgttgtcatgtacaacaccctccacttcccaacccacccccgcgaacgccgtctgactccagaaacccaaacttgtgctcatttttcattattccaccttctcctgatagtgtggtttccttcactctagacatgaggactccacagctttattcccctaaatggaatcccccatgccctaccttgacatggccagtttccgcttgcagcccaccgggtgatttatcggaggctcttctttcacctttgtatcatccacgatttctttcttcaggaaatccttctcttcttttacacactctccatgcatcaattcctcttttatgcattgaccaacaaacttctcctcctgttttatctccaagttatccttctcttccttcacttctgaccagtccattacctcttcctttaccttctcttcctttacctctggttcacccaccttcgcttcttttaccactaaactactatccgtctcctgcttcacctccaatacgcctgcgttctcatccttcacctcaggcctatcctccacctcctgttctacccactggccagccaacctgccttctgtacctggccagtctataatttcctgcttcactaccgttaggtccatcggtatttcctctggcctttgtccacttccttcctctccatcccctatctcctttatccctgtcagccctgtcccctcctctccgccgccgaactcctccgcccctgctaagtcccttactccctccctgccaggctctggacttagccgcaccccctcagctacgctgtggagacctcccccagacttcccttcattttcagcagcaaactccatcaactcacgatccttggcctctgctgccactctatccttcaatgtggctgctgcacaccaataggaggaattaccggtcggaatacctacggcggcccacgtgtggagccaagcagccacaaacccggaatagcctgcttgacgcgactgctcgaatcgccgtaaagctacgcttttgcgcctcgccccttcacgacttgtagagctctttacggctctgcggaggccctgccggattctctgggcgaacaagcgtaactgcgtgacttgcccgctggggttctcgtctccttcctggtttccaccaccctcttcccttagagaagcctcctgggccactccctgggccaccctccacgccctgctgggtgtaaagagtgtaggagaccggcagagggagagaagcgaaacccttacactctggaagtgggaaaacccaccctaatctgtgttaaccattaaatccaatcttgcatgaaaatggaggacacacctgatgttattaggcctttccaagctttagtttcttaaagctataaactagggaccatggtattattaatataaatctcccagtgtcattgcaaagattatatgagatcatgcatggaaatcaactagcagtgacggacacaaactcgatatataactgggaatcctgatgggcttcaaaccgcctggtttccaccacccccttcccttagggaagcctcctgggccacaccctaggccaccctccacgccctactgggtgtaaacagtggaggagaccggcagagggagagaagcgaaacccttacactctggaaatgggaaaacccacccttatctgtgttaaccattaaatccaatcttgtatgaaaaaggacacacctgatgttacacctttgcaagctttagtttcttgaagctataaactagggagcatggtattattaatataaatctcccagtgtcattgcgaagataatatgagatcatgcataggaatcaactgtcagtgacagacacaaactcagtgtataactgggaatcatgatgggtttcaagtaggaaagagggcattaatttttctttccattctttctaagtaacagcctgcgtcaggctattccccattcccagcattctgcaggattctctcagagaacatcataaatatattaggcgaaagtgcctaatgcccggtattgctgaataacattgcattgtatgaatgtggcacgttttttcatgcatgtaccagttggtgggcatttggcttgtttccagtttgggctattacgaataattctgcttccacattcatatgcaagtctttgtgtggacatgtttacatttcccgttaagtaaataactaggagtggaattgctgggccatataaatttatgttaatttttaaagaaatgcccaaactgttttccaaagtagctataccattttacattcctactggctgagggttcctatttctctacatcccggccaattcttagtattatcagttatttgattatagatgtgtaggggtacgtcattgagaatttacatttctttaatgactaatgatgttgaacatcttttcatctgccaactggccatttggatattttctttaatgaaatgtttattcagatcttttgcccatttttaattgacgtcttttattatcaaattgtagtagttcttcatatattatggatataggtttgtggtagacaagcaccagtatgttccccagtgattctccacccccacagtgttcagaccaatgtgtagactgctcctgcatcatcccaggattggtctgtgtcactgatagcatacagcagaagtaatacgttacctctaagattaggtttggagaaaggctgtggtttctgccttaggctcttgcttttttggtctccttcctagatcattcactctgggggaagcaagctgccaggttgtgagtaccaagaggcccatgtggtagtgggccgaagttactggctcttacaggctgaattgtgtcccctcaaattcgtgtgttaaatccgtaacacccagtaccttagactgtgagtatatttggagataggacctttaaaggtgatttcgttaaaatgagaccattaaggtcggccctaatccaatctgactgata

SEQ ID NO: 2492 - DNA, 4001 bp, Homo sapiens
tattagtgctgcccatcctggctatgtattgggaaggaaggcaggtgagaagagtgaatttatagtttgagtctgttctgactttgaggacgggctctcagtcaggcgagactttctaaagttgagtaggcatcatacttcctgctgtttccttagggaaatgctcagatacccctccagcttgtgggatggaagacctgggtcctagtctcagtgcacatctagctctgtggaggtatttttccaagttcccttgctagcttcagttttatttcctatcattctccccatgggtgaaaagctcctggttctgggagagttctttgaatcccagctcagtcattcaccagtgataggcccttgggaaaacttcctggcaagagataggttgtattttttttttttttttttttgagacagggtttcgctcttgttgcccaggctgtagtgcaagggcacgatctcagctcaccacaacctcagcctcccaggttcaagcgattctcctgcctcagcctcccgagtagctgggattacaggcatgtaccaccacacccggctgattgtgtgtttttagtagagatggggtttctccatgttggtcaggctggactccaactcccgacctgatccacctgcctcagcctcccaaagtgctgtgattacaggtgtgagccactgtgcctggccagcagtagtatttgcagcactatgttagggttagggaaggtaacacctgaagtgcttacccacagtgccttggcattgaggagtctcaattggtagttatcctaaggattgcccatggaggtgagagttgggacatgatccttccttcattagtgtcaggtgtcactgcacagagcaggtcagagaggaccaagagtactttcacaccccacccccaccacccccacaagaccctgagagcttccagcctttacctagaagatccataggacacttgagcagcttcctctctgtaaccaccttgtgttcagccgcgcctgctccttcaactccaactggcatgatgtagtgggagtcctggagagacaggcccttgggggtcagcctggatggtagcatgaggcgcttcacacagtctccctggccattgggtcatactcacccactcagtgacatagcagctgctataggttgcctccaacaccacggagctgcctggaccttttcttatccaggtgccacagtcggagtcattctgcagctcgtgcagcagcccttggttgtctggaggggtggggaagaggtgagaaaacacagcggtcagtctccagtgccagaaaggatagtcagccttgccattagaccccaaggagcaactgtcaataagaggaacaagagggaaatcagattcagatcagatgtagttataacttagactatttcttttgcagaaagatgcaacagggctcagaaggtgaaagtatcaatacgggaagatagggagacatcttaggtagtagaggagacatatcattgcttggctaagcaaggcaagtcatcaaacttaccccaagctattagtacaggaggagacgttgcctcctggttgaggtttacagcaaactggaagctccacggcccacagtggagcacactggaataatctggtgcctcaggcttatgctggccactcacagcaagagataatgaaacacacagcaaaacgcaccgcagcagccacataatgctaccaggagttcctgccggctgcagactctccgcctcctctcccaagagccgagggtctgcctgcccagattcctttatatacagaagtcaggcttgttttcagctgcacatctttgtgacactcaggtgggatgccttcagaaaggggaattcctctagcctcatttgctttggggcacagtctgcagctgcctcacattaaataccacaatccaggcagacttcagagcccaagaaaaatgtagtaacttttagctaacagaaaggaaggaaagaaagcttcctcagggttgctcaacatagcatttgtcccaccagtttattgaacttattgacttcagaagacctccctctagaattttgcacatttgggtgtgaaactaccatctatgaactatggggtctgggtacgttacaaactctctgaatcttggttttctcatctgtaaaatgggaatgctatctcctggcagtggtgtgcttgaggattaagcaagagattctatgtcaggtgcctggcacagtgcttggccaagcagtgagtgctcagtcaacattgtcgggtgagagttggggcccttgagaagccttgtcaccttctccatccattctagaaaagtttctgtacgattagagcctgtcttgaaattctagaaaaaaatctaaacttatttcctgagaaaggttgattttgaaccctttcctggtccttagagggaatcctaccacagcaatctttcaacaaattccaaagtggttcattgccataactgtcctacagtgtttccccacaggatctgggggaaatgtggattaggccatgaattcctcaaactggttctgcctcttacagctatttgacaattttatctttcggctgtgtttcaggcatatttcataaagatgtcagggtttcttgcttgctttctacatttttgttttccacataaactacaagttatatactttggtcactctttaagctagagtgtcagaccagattgtagagaaattctaagagatttggggataaatggatacattccccactggagaggcaagagcatggaaacttgtcttctgcagtctgccaccaatattcccaaattgtaccctgattgtatttagactgatatttttcggttgactaaaaattgtagtcaaagcactgagaatgtgtaactaggtatctctagttctcttcaactcatcacagaggacaaataagtatgtgtcttcctgggaaaattggtggcccttttaaccacatgatgaaaaatgacattgaaggaaagctggactctgccctcaaagacagatgtggcttccctgacaccgtctacctggattaggtgctcaccactgggttattacatgccatttactcacaggatttgccaggttggattgtaatgacctctttcttattcagtttgccactagaagcacgtgaggccagggacttttttatttgtcactgcatcctgcgtgccttggatgtatgtactcagtgttctctgagtaaagactgaatcaatgaatatgctttcattagtggccatgtcctagggctaacccccttgaaaatgtagtttccaaacctcaccggtacaaattcatttcctttatgatgagctcaaactcataacccttaggtatttttccttcaagtaaatatcatgtgattgcacatgtaagaaagaatctgaggatttgactcatgcaagatgtctcaggagttaaaaggccagtctcctgactagacttactaatattgctttatgctgagaccagctcagtcggggagaccctaacccagggatgctagaggaataaagacacacacacacacacaaatatagaggtgtagagtgggaaatcaggggtctcacagccttcagagctgagagcctcgaacagagatttacccacatatttactgacagcaagccagtgataagcattgtttctatagattatagattaactaaaagtcttccttatgggaaacaaagggatgggctgaaataaagggatgagctctggctagttatctgcagcaggagcatgtccttaaggcacagatcactcatgctatttgtggtttaagaacacttttaagcggttttccatcctgggtgggtctggggttccttgcccttattccggtagacccataaccttgcagcgtgggcatcatggccatcacgaccatcacgaacatgtcacagtgctgcagagattttgtttatggccagttttggggccagcttatggccaga

SEQ ID NO: 2493 - DNA, 4001 bp, Homo sapiens
cacaaccaccaaaaccaataatctcaacacatgtagtacagtaagactttatgcttatactcaacaaactcaaacctaaagaattactggttcactcacatgaccttagaagtgtacgtgtatattggtaaaagtatgttaaatgctctggataacatggaatgcttaaactttaaaaagctgatttttaaggcattatactagaatacaatacagatgtgaagtatgggatgacactaaagtgaaacactctaaataatatttaggttaagtttttcccctaaaaatattccttttaactccattaagcatggaaaatatactctgaaaatttatcctgcatttaaacatattgtacaaacaacattctattcatatatttgtaaatgagttgaaatgaactctcattgagagtcctacctctgggtgtgctgtcattaaagacactgacaaaagcacattattttacaggtaacaacaaagtcagaagttgttgttctaaatcttttgaacgttttcaataatgtcttaccactcagagcaatactatccataacatataactttggttctattcagtatcatttgttaggcttgaactactccttcaggtcatcttaatatcaaattactatcaatagccaccaattagaatttgctacacgtcactgtttacacaccctatccatgttatttcatgttttcattaaaaaaaaaattctattccttttttagcagttaaataagtaatagaattttaactaaacccaggtttatttcaaagtttttgctttttacaatcaaaacctatttgtggctaacttaggtacaacaaataaaaggcttttatgtgaacatgagttgtacattaaattattttccatgttatttccgaatagatacacctatttgtgcacccttcaaaaaaaatctgattaactatctagtcgagtactggctttggcaacaatgtcaaaaagcagagccactaacacacgtgcttctctgctgcaggcatcttaagggctgagtaggcaaaaacacaggcctcttccctccttttcggctctaaggaggcgaaaagcccaattcttgtggagaaatgatccacaaagaaaatgtcagaatttcccaaaccgaagagggtagagcttccggaaaaggggaaaatagtatggaggaaaagtttgagtaaaaatacaaaacaaggtgaactataagaggcaaaaggacgagtgcgagaaagcaatattttccgtgaacaagagtaaagttctgcagagaaaagtcacgtgggggagatccaacaccaagctggcctgactggagaggtttcctatcgctaaaacctggccggggcgggggaggggggtgggggcaaaaaggtaggccatctcgcactctaaaaagagaggctaccttgcggaggtaatgtcgaggaaacgctgaagacatatctagaacaaaggctcccggaaagacctctctcgtgaggagattgggagccttcttcccgccagggaactggcggttcgccgcctcaacccgtcttaaggcacagaaaatcataaaaaaggaaaatgccggacggacctcggaaagcttccactaacaaactccgtcccaattcaggacccttcttgaactcactttttgtcagggcaaatccagtccccgtcactgactcggaaattcttggtcgacatcttgaacgccaccagcacagccacccgcagctatgtcttcacaggaggaaaacgggccggggactttcggcaactcggggctgtccccacactgcctgactcgcgcctactactgtgtcagggtttgataatgagggaactagccaggaattcagcttgtacgttgttgtccagactaagatgcctgtgctactgtttgttagatggaaaagttaaaatacaaatatcttttctagaactaaactcacaggcgccataaggacaacccaggcaggaggccttcgtggcactagaagcctcggagagccccctacaggtgggaggacccaagagtaaagtacttccgcttccttaggtggagctggaaaggtggaggcggaagtgactgatcaattcaggggcgtggggttcgtttagggtaagaggcggctcgggctcttcaagtgtttagagaaattattttaataaggcataaaaattctgttatttcatacacatgggatgtcgtttggaaacctatttttatatatacataaataggtgtaacagataagtaagcaacttatacatgggaaccagctggtaattttaaaactgagacattgtcaacactgtttaaattaccagtgtcttttctgataccatcccattactttcttccacagataacactttcccatatttgggatttattcttttgctttttaaaaatttatgtacgttgttagtccaaactgcaccatttttgtaagcccccctgccattttgcagaccttagtcaaagtgaaacattccacggggttcgggcgtgagaaacaggctgcctcttatactctgctgggagaaagtaccacattccactggaacaagggccagagccgcctcgtcctgggaacaccttatcaacatgttcccaggaagcaggccatggccccccagaccactcccacccaggcctataaatcaccccagcctgtaagaagcaacgggcactggcattaagctggtctcccacctctgtaggtcttatgctggacataaatcctgtatttgttgttaagccaccctctctttctttaatccttgccttcccttcaaaacctaacatacatgtatgtttaattttatgagctgtgtaagcatagttgattctgtactctttttttgttcattatgcttctaaattaatcctaggtagttgcatgtagaagtgtataggtgtaattcttttatttgcactgatgtatactgatactattccgttttgtggttttgtgacagtttattccttctgtttctcaggcttggtattacaaacaacaccagtatgagcattcttatgcatagattctggtatataaatgcattaattttttttagaatacagcatatacagtcatgcctcacttaatgatagggatatgttctgagaaatgccactttcggcaattgtgctgttgtgtgaacatcatagaatgtgcttacacaggcctagcaggtatagcctactacacacctaggctatatggtatagcctattgctcctagactacaaacctgcatttagtacatcttattgtactaaatactgtaggcagttgtaacgcagtggtatttgtgtatctaaatataaaggtacagtaaaaatatggtattgtaatcttatgggaccacctttgtatatgtggttcatcattgactgaaatgtctttatgcaagtatgattatgtttaggagagaaattgttcaactactctctagttatgattgttgctttaaaatctgtattataacattttggtcatctaggagttagcaggtgttgattatattttcccttgcaagttggtcacatttttccagttcttttatactgtgtaattgtggattttatctaggacattttgaacattatgttgcatagactgagtcctgttaaaagcctttagggaatgttgatttttttttgttttagaaggcaatcgatccaatttggttcaggtcaaaagttcggtctcatcttctatgagtactggttccatgtcagctgggttttcaaaggctttgctgtgtcctatacctacaatactcagggattatttggggatgttagcagtagtttaaattgaaattcagttttgctatgctattttgtgtttgttctgcacgtgttcagtttaggtgtgaacacagaacttgtataggttcatacatagaattaggggatcctcttctctagctctctcctcttacattcttctccttttgtctcgcaaggtcctctcaccagaaata

SEQ ID NO: 2494 - DNA, 4001 bp, Homo sapiens
cttagattcagctaagtgatctcaaagctctcttccaatatccagaaagacctagaaagagtacagagcctcccaggtcatgagggataagtgctgactgccatcaaaatcaagatgtctttacaaacacagggaagctgaggggcatcttgactcctagggcagtaagtatgaacgtggtcatgaggagcccactcagtgaaaagggaagagaagatgctctccagttccacaggaaaggccaagactggtctgtgacctccaaagagaaaaaactgggaactcttaaaggctgtcaggcccatttggctgacagtccaagctatggcttaaagcagtctgacctgacctcacacataagggcttaagccagggagagcaaataggtttcatttaaagcagaaacttcaatcaactggaagtggctgcctagagtagtgtgctgagggctctgagtacagtgtgaatatgtgctgagaaccaaccaattagccatgactgccagggacacaggaaggggcactggcagcacacattccatgtatttgtcacccctggcttaaactcccattggcaatgaatcagcttcagcttccagcagatagccttgccaggcagaggaagactaaagctcctgccctggaaatccactggcaatagaagtcttcaaggctggtatagcaaagcttaccctgcatggtcttcattcacacatacatacatcaagtatttactgctttacatcaagtgtttactgctctagactgggcaatggggaaacagaggtgattgagacactgttcctgtcctggagatgttcacagtctaatggaagagacacacacttcacagataattatgatcaaatgtggtaataggagaagttatgggagctgagggttgggggtgacttaatttgcttaagggaattgagcaaagtaagagttgaaatttttttaagttaaagaagttctcttggcaaagaaggtgaagggcaaggagagaatattctaagctgagagaacagcatatataatgatggaaaaccaaatggcctacccaggaaacgaggaaaaccttgacagccctggagtgtgaggtgcatgaagattaggctgcaaaaggagtttatgaaggacaaggtgtttggactttacaggtgctgggtgccaatgaaagttttcaagcagaaggcataatcagatttgtaggtgaaacagatcacactaggtgcaatgtgtgtgttcatgctgggaaactgaaaaggcttctgcgaaaaccctacaagaaagaggccgactgaaaagatattaaagaaattaaagatcggaagatccttggacgtggaagaatgcaagaggaatcagtgggtaagtaggtaggtaggtaggtaaatgggatgatcgtgccactgacttccataagacataaggaaagaagtgcaggtttggggcagaacacaatagccagtcccatccactgggttccagaggtaacaatcattagggaggtaacaaattagatatgcttgttctagatgggaaggtagagattgaaacactatttttaaggtcgggcttcaagctcaggccctcttcacttcttgccagggccccagaccctctatcctttcctctgtggtctccagacctttctatgactctcccacctccaaaacctccctcaaccccctcaccttcagacccttctaaggccctcctcattcccagggccctctatcgcctcctcatccccgacccctgtatgacccttcccatctccggcctctacatcctttgaccgtccctcaccctccacccccacatataagcttctttctcccctctcaccttccccagccccctgtgtcaccaccacctcctaagtctccagcccagagcctgcgtctcagctgcccccgccccgccacccggactcacccaccgagacacccacttcacaacagggcggaagtgctcccgggctcgtgcggggaatgctgggacgcggagtccgagcggcgccaccctgggaatggaacgtctgagaccacaattcccagaaggaaccgcgcgagcgccgggggcggccccctccgtttgctgcctttcagacgtcttcagccaatagatatgtcatcttctaacggaccctggcactggaacaaatcggaacgggcgcgacacatgggggcgggacctgttgcgatcctggccttttccataggcttccggataacagcaccgcccaatgggagggcactcgagcagaagggggcccagttctactgaggggtcgaagtgagagcctcagaccctgaaagatcaaagcagacacaataagaaataagaagagagaatgactagaggtgaccagcccgataggcaggagagaactggacagttgtagctttaatttccagcttacagctaagctgtgtgactttggaagaattctgaacctcgttctcttcaaccataaaatgagggtagtaatggcatccatgtcacagagttttgtgaactttcaatgagataatacacctaaaacgattagctcagggcctggctcctaataatgcacagcgattgttagctattattatgtaaatcagttagtacagagcttggcacttcctaggtgttggaagaatgttaatcattattacaaaataatcctcatataaatgcgggtgctctgtaccactgtgaatactttggggcatgaacaatctaatgtggtgttgagaatgggggctttgtagtcagacatggatccaaatcccaactcaactacttcgcagctgtgtggccttgaacaaattactgccatctattttgtctttggaattttcatctataaaatgcaagtaatgtaagagaacttacatcacagggtgttatgaaggttaaatgagactatttaggtaaaagtctctgaagtcaagctgcttgtgtctgaaagttcttactttcaaatgaaggatgcaggtcataccacccgcgttgtgaaaccttgggcaaattacttagcttctttatgcctgcattttcccagctgtaaaatgggaatgataatacttgcctcttcctgagacagttgttgagaggaataaatgggagaaggtatgtaaagagcgtgacacatgtctgacacacagaaagtgtttaataatcattagctagtccaggcacggaggctcatgcctgtaatcccagccctctgggaggctgagacggaaggatcgctttagtccaggagtttgagaccagcctgggcagcgaagtgagacctcgtctctattttaaaaaatagaaaatacaataatatacataatcattagctattattattattaccaatggttatgcggcttagggaaaattgacaatacctagcatctggtaagagctcaatgcatgttggctagtgttaaaataggagaattcttagctttaacgacccagtttaaattccttctctgtgaaacatgttccaacttatttgtagtaataactcatgtgattttactcagtaaacataataacaacccgtaaatactccttggtgttgaagtctcacagtagccctatgagattggtattgtttgctccactttacaaagagggaatgagacttagagaaacgaagtgacctactcaagatcacagagccaataagaaccagggctgcgatttgtcaccccctaggcatgtgactccaaaggtcctacactgcatgaggaagagaccatatgtggaagtaggagggtttgagatggggagggacagtgcaacagtgtggggtgccaagggagccggaaacatttgagagagtgtcaggatctgaagctggagaggcagctttgcagggtcaggtaaggacgtgtccacttcagcatcatctgccctaagaggaagaagggaggcgagtgtgcagagagaggagaggacatcattaggacacaagagggcgcgcctcgccctcaatacagcctcgaa

SEQ ID NO: 2495 - DNA, 4001 bp, Homo sapiens
tactttatatgaaacagcacgattcaaagaaaaacatttttcaaatgttttctccaggttttacctggagagctagatgtctggggtttgtgtctttctgtgcttgtttaattctaaaaacaacctcccttcaactcctttcaaaaatcagtattttcttcaattaatacgagcatatagtgtacaataaaacgcataaagatatgtacttccagaatgccataataatccaaatagaaaaaaattcgtgttttaattttccacatagcaaagtcaatgttaatcatttttttatccttctccttaaccattccacaaatcagaagcactgtatttatatatttaataagattaacaaactgactagaagctccggaggagtaaaggaagaaatcatttgtataatatatttttccataacaaaaagataaaagcaaataggacttgttaaatgagaagcttttgaaaaacccagcgtgaccagcttttgatttaccccagtctgacaaggaagagagaccccacccccactccagattgtatggctttttttttttttttccttgggtgggggtgtggaggagaagctgtcacatttccatcttcggttattgttagtccgcagcctagattcccaagcatcaccggtccaggggaaaaatcctaacgcagacaattaaaactgtctgaaacatgcagtattttgttggggcttttttcccagtgttaatttcatcgagactcaatcggctagggctatagattgcctctgacagtctgtccctcaaacgctccctctaaaaccgcttgttccagatttactaacaatcctctcctctccaaacttaaattaggacaacacatttctgaaattattacatccaaaaagtcatacctccccattctctttgccttggtgtggggaatagaaagagtgaagaagagagatctattcactcttcaaacaaaaagaaattggggtagagggtcagtggaggaaagagcagtggtggacctgagtgaaaggttgaaaaaagtttttgtgacttgttcgtccttcggcaggggtacaggagttgggcagaaggccggggtctcggccccagggctcgggccgagaagaggcacccgcggaagaggaggctgaggacccgagaacgcctggacgagcacataccgacttgcagcacgttctccacggagccgctgtccagcagacggatgccccggcggaacgggagcccctcgccaccgcagccggccgcgccggcccctgcgcccagcccgggggatgccccagccgcgacgcccccgggggcggagccggccggagcggcggccccggggggtggctgcggcccctcctcggccggcgaagcccccgcggcgccgccagcagcgccggcgccggggccgccccggtactggaagctggagtacatgcagatctcccgctcattccgcgggaaggaccagtagacgatgcggcgctgcacgggctccgggatccgctcgaagcgctcctccacccgttcgtatgcccacttttccgccaccgtcttggcggcgcagtccagtaaggaatccggctgcaggtgggggcgggccccgaggaccaggcagctgctgccgacgccccctgcccctccgccggctgccccaggcgaaccgcgagggtgatgagcctgcgggctgggccacgaacactgccgcttagccggagagaccggtgacggcgagagcagctcctctcgctcacctccgtccgccattgctggggactgactgactgactgaggcggcggcggctgctcgggctgcggcggagaccctggccacggccacgcgccccgcgcaagcgcccagcggtggcgccgaggggggcggggcgagagaacccgcgagccagccggcccgagtggggaaccgcggccgggcccgggagcgcgccgcgagggcagacgcgggcggcctgcagggtagcgtgaggcggcgcgcggtgtcctggccgccgcggacgcgaagacaggcgggagcgagcgcgggcccgcggcgcgctccaggcgcaaacagcctagaacgcgagccgagcgctctcgcggatccggcgaccgcggaggggagaggagcgccggacgctctcgcacgcccgcccgcccgcccgcgcacctccaacccacctgccgccggccagacaggaatggactgtgtgactgaatgaaatggcggggccataagccatccaaggagccgcctccgtgaagttataggctcgcggggtacaaggagaaaaaaacaatccagctccaacggtactgatgtgacaggaggttgtcacagcagagcggaagatctggcagaaagacgctgggaaagaagacactaggggaaaacatcagaaagttcggatgatgaaaactcacctcacgccacaacaatgtaggataaagccggcggtcaccccaccccagagtgggacaaagtcgcaccaccccttgacaatggggcatcaagatcttatcgccacgggggttgcatcctggtggggtcttttggagggtttagcaccttgcatcctagaatacaaaacacttttgcgtgttttttggtagaattctctgatcccctacctccaatctgaattaggtctttcatgttttcctcacttggctcagtcttctacacctttacatagttgtatttttatatatttgtttaatgtctgactgtcaactccatgagagtgagaatcatgtctatttccttcactataatttatcctctgcctggcacatagtgggtgctcaagaatggcagcttcatcactaactccataaacaacacgcaattgtaagttactgtttcttgctcgatcaagaaagctcagattatttcagaatttgctgacaaactaatctctacaactttaaaacgttccaagaactgtattaaaagagtttctatagttgagtttgcccttcaaagtaagagagatttagagtgtaggataaaataagagtaagaagagagtaaatgattggagacaggctggagccacagtttggttttgctgtaatctcagaattaaagagcacaggcagaattgggtgtgaatcacacttgctgtgtgtgatgctattcatgattctattaaatcatttgcaaaagggagctagtaataatgcttctacacataaatgttgtaagaattagaaataattcactttaaaaaaagtttttttagagacaggatctcactctgatgtccagcccggagtgcagtggggtgatcactgcaacctcaaactcttggactcaaactatccttccatctcagcctccagaataactaggacaacagatgcacagcaccacacccagctaattctaaatttttgtagaggggcggtctccctatgttgcccaggctggctggaattagaagtaattcaaattgtttgcttattcagtgtagtaggtactcaataagtatctgtttaggccagatgcagtggcgcatgcctgtaatcccaaggctttgggaggccaaagtggaggatcccttgaggccaggagttctagaccagcctgggcaacagagcagactggagaccccatctctacacaagaaataaaaaatagcagggattagtggcctacaccctgtagtcctagctaccctgaaggctgatgtaggaggattgattgagcccaggagttcaaggttacagtaagctatgatcatgccactgcactctagcccaggcaacagagcaagaccctctctaaaaaaacaaaaaaagaaagaaaaagaaatctgtttatattggtaaatggatttatatctgtaaataactataaatagattactgcaaaatagcataatccctactccaccttgaatctggtaccacatttacaggcttccataacacacactattttctttcctataatttatcagagttttttgggagaacgaatattcctttaatgcctgt

SEQ ID NO: 2496 - DNA, 4001 bp, Homo sapiens
taaaatccttaacaaagaaaatgagatatacccagaactagacagagaaaatgggtgtgagtacttttgtaaagaaatcttgtttcgattccaagcaggaaaaaatgtgcttgagacgatgctagcacacacgtaaaaaatccaagttttccattaattacaaatccacaaattatataacttttctaaatgagttcaaaagattacaggctagatcactgcagggcacaaagtcttccaacaaggcgttaatatgtaaagcacaaccttaatcagaacatttccttctctccataaattttgggtcgagccttcaccactcaatccctcgagttccccaagggtggcccttggcgggttttttccaaagtggggccagaggtctgaacacctgaggtgaaattcaagttcacgagcaagtcaactaaatttcagagctcccaacttccctacatcggtaaaatggagcctagcaaagcctacaaaagactaggggttaccagactgctttagaaaggcgacacttggccgggcacggtggctgacgcctgtaatcccagcactctgggaggccgaggcgggtagatcacgaggtctggagttcgaaaccatcctggccaacatggtgaaaccccgtctctactaaaaatacaaaaaatgagtcgggcatggtggcacgcgcctgtagtcccacctactcgggaggctgaggcagaagaatcgcttgaaccccggaggcggaggttgcagtgggcccagatcgcgccactgcactccagcctggtgacagagcgagactccgtctcaaaaaaaaaaaaaaaaagaaagaaagaaaagaaaggcgacacttaacacacagcaggcgctaaacacacattctttgggtttgcattttgtccagagctaagagtaacaggcattcggcaaaggctggggacgggacggggacgggggcggacgcgcggaactgaaagaatctcagacttcgggttccagttcccccagccggactaagctactcgcccggccccgggcccaaaggcctcaggtggtaacggccaaagggtcaccgcctccgcggggcgctgcgtccacaacacgggtggggaaacggtcaaggtttgcggcgtttgggttcatgactgcaaaaacaccgtccactacgggccaagccgagtgccatgccctgcacctacgtctaagctcacagcagcccgcactggggcgaggaatcctgaggaggctcgccccggtctctgggactgggctctcgccgcgctgcctcagggcgcaagttccacgcgcttcgccgggcgcagaaaagcaccccccgctccgcggcgcccaggccgcctcccccgacaacgcacctccgcagcgacgcctgcgcctggaaggggctcggcatctagaccgcagccccgcgcgggccacactccccagcaagtgcctcggcagcgtcccaggagactcgccgcgctcgccggagctggacgtggcgccgaggtccgcgtcgccgcccgcaccccggtgctcacctgtaccacgcagcagcccagggcatccttctgagcgtcaggagggacgatgttccggggcgtgtggcccgggtgcaagaaatgaaccatggcaaccccggcggcggggcgtcaaaaagagagccggcgtcgagccggagcccggatcccgcgagaaccaagcgggcggctgccaggacgcgcccaccacgcctgcgaggcacacggagctagcgccgcgccctgccggcgagcttttgaaatgcccggcgaggcgacgcgcacgcgggggccggcccgccgcagaccccaccccccgggcggcctcctagccccatccgccctccgacacgccgctgccggggccaaccgttctcctcccgcctccccagcctccccagcctccccagaccaacctgccacgacccagccgctcacccactccttcccagccctgcacctcagggcttgagaggatattccccgaggaccggctgtgtaggtttggggaatactgtatatatatatacatgtacacacacacacacacacacacacacacacacacacacacatattcattatttctatatatgtatatattttttaaagctttcatacattaaaatatatatttcaaagactttgcccctgaaaatctggcaacagcacctctctaacggtcctctctgtttcaactccttagagtatctggataaatcaaatataaaacgaatacaaaatattggcaagtatctaccaaaaaatctatttagctttcttgttacttaaaaagtactcgagaagacccttataacctgctccaagaaagaaaccccgagagacccttctaactttctccaggaaagaaactccacaagttagtacacattagctaatttaagagaaagcaataccttggaaaaggaaagttctcaagagcatgagccttggagtttgaatcctgaattagaatgcccgctcagccatctagtgtttgagaacctggagcaagattcttgatgtctctgaagctcaacttcctcatcagtaaaatagaatgagaatgctttatctcacagacttaatgtaaggattaaataatgtatgtaaaacacatcacaatgctttttacatagtaagtccttgataagtggattggattcagatgttaaaattatttttaagtactttgcctaatgcttttctttcatttatttattcttttatttaatccacttactacaagaagaaaaaaaatcctgtgctgtaggtatcatccccatttttctcacagggaaactgaagaactgacaggttgaatagacaacacgttttttggccagctgatgagtggccaacctgggagtcaaaattgagttttcttactgcaagtccaatcaatatgctttttttttttttttttttttagacggagtctcgctctgttgcccaggctggagtgcagtgacgcgatctcagctcacagcaacctccgcctcctgggttcaagtgattctcctgcctcagcctcccaagcagctgggactccaggcgcgcgccaccacacccggctaatttttgtatttttagtagagacagcgtttcaccatgttggccaggatggtctagatctcctgacctggtgatccgcacgcctcggcgtctcaaaatgttgggattacaggcgtgagccaccgtgcccccgccaatatgcttttgttaacggtggagggtgttcatgttcttggtgtcttgaacaaagaattggacaaaacgcacaaacaaggaaggaatgaagggatttattgaaaatgaaagtacactccacaatgccacaatgtgggagtgggcccgagcactggggctcaaagaccccgttacagaatttttgggagtttaaataccctctacttggggtatgccctatgtaaatgacgaggatgaaggaaagttacagtcatttcctcggcttttgcccaatggagaggatatttcctattacagctgaagtgtgaatttcagcaattttaactttaatatagaacctggtaagttatgttctcataaggtttgactatttccagcatatctagaggtgtggccaactgcatatgtcccaggccttaccgagctagaaaacaggcaagttaaacaattttcaaaagccaaggaagcagtttatgaccttaaagcatttagcaaacctaatatttgaacataattttgaccacatgtttacattttgaagacatttgtattttatcaataatctttaaacccatctttatttcccaaagattacccaagtcacatgaactaaataaaaggcattatgtttttcacttttctgacaaaatattttatttaagctcttattattaaaccaattaatttaaaacgtaacacatgaggccaggcacggtggctcatgcctgtaatcccagcactatgggaggccgagatgggtggatcgcctgaagt

SEQ ID NO: 2497 - DNA, 4001 bp, Homo sapiens
acagcaagactccatttctacaaaaagttttacaaattagcggggcacggtagtccgtgcctgtggtaccagctacttgtgaggctgaggtgggaagatcacttgacctcaggagttcaaggttgcaaagagccatgattgtgccactgcattccagcctgggccacagagcaagatcgtctccaaacaacaattctcaaactcactctttctgtgtagtccactagttacctcaaatttcagtttaagtttatattagtcaggtgggaaatgagaccataaagtgaatcattcaagcacctagctggcctgggcacttggaataataagtaaggaacggttgctacctagaacttacattccacagggagaaacaggttagcatacaacaacagtgtgtgaaagtgaaggagacaaacacaggaaaatgacagactaaaaatgcaggagtgagttagggaaaattcatagattaaataattttatagtatattacttttctaaaaaactgctggagggaaaaaaagaaactgactaacctcctaggggaacataattatcaggacttagttttgccttattcctcccagagaccaaaatttagcttgttgcatatgatggagcaatgttttcaataaatgtacagcaaaccacttataacccaactcaatgaaaaaaccaactgaagcctcaacctattttcagacagaaagaaaatttgcaaatataaggttctcccaactaaaggcagacagggcaaaacaaatgaactctttagaaggtttaaagagactgtcacaacctgccaacctgattgtcagtcctcaaatgcccttggtctctgcctccaaatgaaaacaaatcatttgtttttagtaataatagccaagcttgtaaataagtatttttaaacttctccaactgcacctccacattaaaagatgctcaaaataaaaaaaattcaaaacattttttagctatttctgtcaaaagactagatctctcctgaggtcacagtatgcatgctggccctcacttcactgctctgtaacacaccaccacttcgattttgcaatgacactaggtgaataggcttccaggatctcttcaatgcctccaaaaacgaaaaggaagaagcaaacctataaatccctatctgcccgccctacagctcccgggaagcaacagtcctcaaattgttcctgcttagacccctgaagcccgtagaaggaaatggggacagctgcgacggcgaaccgagcgaggacatccgataagggaagaggaaacgtggatggaagaggacgaaggggagaaggaacacggagagaagggggcagtggagataaaatggtgaagaggggtgagaagagcaaggaagagcagcgaaaactagggaggaaaggggggaaagtaaaaatcacataagaggaaaaaaggcaaaatgatagaggagaaagaaaggaagggttagggttaaaggacaaggagtgggcgacaaagggaatgcgaaaaaggctgtcactgggggtgataaaaaggatgtcatcggggagaagggagattcagggggtgtcacctaaaggggttcaccgaagcaggtgaatggggaaggaggagctgaacaccgagggggcggtaacgagggagagaggtaaaggcagggagcccgaggggacaccagagacagggaggggcaagaccgcaggggccagcgcgacgggcgggggctagggtggcgggcggctgcggctagggcaggccttgctccctcaccatggctgcgccggcctggtcctcgggcatgcagcctccgtcctgggtgcggcggcgggccggaccggagcccgcccccaggctgagccggcgcggaggctccaggaggctccggcgagcggcggctccgggcttggcccaggcctcggcctctttccctcaagctaggagcgtagcagtagcagccgcagccgcagccgcagccgcagcccgaaccagagcgcagactccgcccccgcgaggacccgcccgggcgcgcgagcccgcgcctggacccgcctccgctctcaatgcgcagactcagacgagggggtcccgccccccccagcccgacctccagcttctccccctcccaggcccttaaaggagccacacacccccaaatcctagcatcccttcaaaatatgaaaagctttaaatattacatcatgacgagagattagagcatcgctcacttcggtcacctatagactcctctgtcattcaccatcattctctaagatttgggcttctggttcactgtcattcattactactattgtcataactcttggttatttcaaaattcgcttaattcttccaatcctctggcctctcagattcttctctagggatcattcttggctcagcctctcactctcatgctcatacgaataattgtaacttctctacaatctcaattttaatcctctaactcccattgcaaccttcttcctttctttctttctttctttctttcttttttttttttttttttgagatggagtttcgctcttgttgcccaggctggagtgcagtggtgcgatcttggctcactgcaacctccacctcccgggttcaagtgattctcctgccttagcctcccgagtagctgggattacaaacacccggcaccacacccggctaatttttgtatttttagtagagaagtggcttcaccatgttggccaggctggtctcgaactcctgacctcaggtgatccgcttgccttggccttccaaagtgctgggattacaggcgtgagccgctgcgcccggccacaaccttcttcctttctagctcactctgtctgataatactccaactccaaaaacttcaactccaagaccccaaatccattgatccaactaccttttcgctattcctccccacgctggccttatgtactcactttcttcctgaaacagcttagattctatcgtccgtcatgaaatggaatctaatagaatctaagctgtttggggaagaaagtgagtacatgaggtacatgaagtcgatttcttcagtattaccttcatttctctagtcgttctctgctttctttgtactgacagaactccagcaatggagtgggtggagaaaaagccaaaagtggttgactgactccccgtaaatttgagatcattattctcaagaggccataatgagtggctaccctaccacatttctccagtttcacacactctcccaccttgctacataactatttcaagtctcctgtctcttcaaacctccgacacttcctccctcatctcatttagctgatgattttgcttctaattcacaagaaaatcaaacaaaccaaaaagaacatctacaagttcccagcacccaccatgacttccaacgaacctgtaactctgctttgatgctctctctgccttcctttccttactacaagttaattatttgtcttttagctaacatcaaatcctcctcagttctcaagcatctgtgctaaaagacccagattttatccccaatcacaaaactaaatttctgtaaaatacaatcaaaattaattactagaaaaaattaaaatttaaaaacaagcatccaaaatgcaagcccagattttttaaacctgcttaaccattttaaagtgtacagttcaatggtattaaatacattcacattgttgtgcaaccatccccatcaagaagctccagaactttttattttttcttttatttatttatttatttatttattgagacaagttcttaccctgtcacccatcaggagtacagtggcacaatcacggctcactcagcctcaaactcctgggctgaagcgatcctcccacctcagcctcctaagcagctagaactacaggcacataccaccacgcctggctacctttttttttttttttttttgtagagacaaggtctcactgtgttgcccaggtttgtctcaaactcctaggctcaagtaatcctcc

SEQ ID NO: 2498 - DNA, 4001 bp, Homo sapiens
tgtactaactactaatgtctaccactctccaattgagatcactaagttgcatggtcaaactatcattttaatcacagtgataaacttttaaaacgtctgaaaaactcctatatagttaggttacagtttagaatatataatatataaagttaaatacataacacacattaaagataaaaatataaaactcaagtgataaaacattaatttatttaaatcttgttttacatgtactttctttctgtgcaaagctaccaagcacaataaatcaactttactgcaaaaataagttacttgtgatattttcacaagattatactaccaaaaaaatcagtacaaacaaaaaaaatctgcgtaagtatgcatacgtaagtcttgacaaacaggcatatatcactaaataaaaatttaatttagttaaaaaatgtttactgattgccaatattgtgttggtaccccattaaaacaacactttctccccttcatttaagaaacaaaaactaaaccaaaatatggaaatatctggaatgatacacagcaaccacaaaggctggttacagagatttaagactgaggaatggaactttgtggtaccgtgaaacaagcactgtgttactctatactatatacctctctgtattatgtataggaaaaaaaaacacttttgtagttttaaaaaacaaactatgaataaattaactagtcacctgattcgttttgtaattaactccccactccttatttagtactgcaactactaaataaaatccaaatactacttaagaatacgaaaaaacaaaggtatactgtaaattcacttctgagacattagggaattggagagaaatattaaattgatttcaaactcatttaagaaaaataaagctcaaactctgatgccaaaatttatgagtttgctctttactaaaaagttgacctgaggccgggcgcggtggctcacgcctgtacagtgctgaaatcccagcactttgagaggccaaggcaggtggatcacttgaggtcaggagtttgagaccagcctggccaacatggtgaaaccccgtctctactaaaaacacaaaaattagccgggcgtggtgaagcgcgactgtaatcccagctactcgatactcgagaggctgaggcaggagaatcgcttgaacccgggaggcggaggttgcaatgagccgagatcgccccactacactccagcctaggcgacaagagcgagactccgtctcaaaaaaaaaaaaaaaaaaatcacatgaaacagtctgttaccttaaatatataacctaaaacaaccatccctaaacttcaaagatggcaacctcagtaacacagtagtaattaaaaccctaccgataactgagttaataggcacgtacaaaatgatgaaaagcaggattttattctgaccacaggtgttgtcagagacataatgggccctccaaatactgccaaaagttactgaaaatacgaagtcagggtgatgagtaaatgacacccagagaaaatagatgggaggagttctgtttcaggagactggagtcaggtactgcagcagaaaacgcgacacaatagttaaccggtctggaatactttagaaaatggcaagaagggaaaaactgacaagaacatcttaaagtaagaggaacggtatccaatggaatcatcaggtctgcgcgagcacggctcccggacttccagtgagtgggacagggtggaactatcactgcgtggggagaaggacctggctgaggggtgcatatgcttttgcaggtggtggagcgcccgcagggggatggggagggcagtgttgcctcaatggggttactgtattcccttcaagactatgggaagctgatgcagcacgtatcccggcaccaagaggcactcgccccgggcccctccctaacgacttgccttgtagaaagagttgcaggtcccaggcccccggaacccaaggctccgccatccaggacaactgctctgccaacgaggtcccgcgagaatcgagagatctcgcgatacaaacccactcgcatctcgcgagcttccactagacccaacatggcggtacagaaaaaaatcagtatttcggaacttaaaaagcacttcactaacggagtagtgaacatttaaaacactgagacagtaggaagtctttccgctttatacgtctcctcctttccccttgtacagaaaagcagaaatcttaaaaacctccgattaccacgattatactacataaacagagcgcagtgcgctgccccaggcagcctccctgtcacgtggaaacattttcggcgtgcccgtcacgtgggccgctactgagcgagcgcgctcccgacgccctcccaaaagccctccccgccccccctttcgcccgcgcacacgtgcgcgcgcacccccgccccacgtgggggcttcgccgtcgcagccgtcgcagccgtcgcagtcgtcgcctccagcccaccccctcccggtacttggctccaaatccgggtcccaagccgatcgtttcccacccccattccctcccccttcattctccctcccccgtgtctggccctcaccacgtgtcccgagctcttgctcacctttcacgcggggtcggacgcaacgggccacttggggaggcgccgccgccgtggccgctctccgcccccgccacggcacttgctcgggtggccaccgctgcaggaagctcgatagcggcgccgcggcgcttccaggtgggtccccgcctcccgctcctgccacttcccgcagcaccagcggctccttccggtcccctcctttctcctcgttgggactggcgggcggcggcggcggcggcgaccgctgctgctgctgttgctgctgctgcaggcgcgctcactacaccgcctgctggtaaccgcggcccgtgcagcgcccgcgggtcgggcgccgccgaggccctccccggccagtccctgcccctgggcgaagtttggtcttccgagggcgggttgcagtccatcccttgcaaccgtccaacctggccctagcagaggaaaggcgtcctcgtagctccgccattggaaatcggcttcatcctgccctttgtggcctcctgagagatttgtaaaccccacctcccttagcactgtggtctcaagccaggagaacatccatacatgtatttatgatcgtgcttctgcctcgcctcgttcacctctggcttgtaccacagcacgcaggctcgaaccacttcgggcctttgtgcttgccgatttctctggcagaacatttcctccagattttttttaactcctcgatgttcgatgcatatttcaggtcccttctcagagggctgcccagaccactgtatccaaaaaaagtacacctgcaccattgctttaactcttcacctgcttttatttcttcataacagttacaacttccagaccttatttgtcagtatcctcaccaccagaaatgtaaaatttttaaaagcagggacttagtaaactgttttgctcattgctgtatccccagaattgtgtctggcacaaagcagtgctcagtaatatcaaaacagatctaccaactatattgagcatgtaggaaaataaagcccaacacacattaatgaagataaataacttcatcatttatgagctgtggaaaaacagctaaacctccttccgtggctataaagattatgttccaaaaatataaaatccagtggtagaagccgttaactggggctcttctttgacaattgtccagtgctgtttcattacttttgttttcctttgcaacactattttttttttcgggcaagtggatacgtgttgtgccttcttttatgttgctaataaaagttattaaatgttttaaatggtgttttgtattttagctttgagttcaactcaaagtaacatctacttcaagaaaaagggttacatgtttttaacacatcaagtatttattgaacatactagtgtttctgggtggcagtatgtcaaaaa

SEQ ID NO: 2499 - DNA, 4001 bp, Homo sapiens
ctctcccttcttccaacccctctcggtctataacacaacctacagcaggttggccccatccaatcagtctgaattgcttcatgccaaggaaattgctgcttttattaaaaataaaagcacactaggcaggcgaagggctgtgaaaagtatgagtctggcataattatgaaggtcgaggttaaggttaccaaaagagacatgcaaagatttcccgaaagcctgggggaatcaagatgtatatctacgtgagtatagacacacagatgaaacacagagggaatttatgcagcagatctaaataacatcctctctgatagcgaaaaaacaaaatcagagccactctcaagtaatttttcttttgattaaaaaaacaaaaaacaaaacctaaagcgagaaggaagaggggcctactagactgagttcaaaataaccacatttgttttatgtaatttctgttatctttgctataacctggggacctgattacagttgggtcaggaaacaaatctactagtgaaatccaccaagagccttggcccttggaaaaacacgttcacgttctccgaaaatcctctcttccttccaatgcctgctcatggaagtgggaaagttgggtaggagaaggagaaacccctctcttcttaaaagtccccccacccttcagccttcacatcaagattttaagttttaggaggatgacaagcccatcaccctgcctttggcataaagctttacactttcacacatacgttttcttgtgtgatcctcaaaatttggcttctcaatattaaaaaaataaaaataaaaggccactaacgtaaacaatttcggcaacctccccacacccccataagcccagtcactttcaaatctcaattttaaatctctcaaggacaatgactcacagggcaagtgaagggggaagggagggtcaactggtcaaagcccattcatacatgcaacaactagaaaccacagtattgccgcatcagcacaagattttaatttacggcgcattgagccccaccgtaccttccgccaacacctcgtccactgtgacctgctgtcgcccgatgccgaagactcttccgatgtagccactgcccaggcccgaggtgctgccccctcctccgctggagccggagcccaggccagagccgccctgctctcgccgggagtcgaaaaacttcttcatcttgcgaatagggagcagcaaagcaaaataccgatggtttctagattttttttttttttttttttttttaagaaaagagatccaaggatttcttctcagatttcacctcggagaggagccacccgaatccggccgtgggggtgggggctgagggaggatgcctataggaatatgcgtgtcaatcgcgcagcgggtcccctcctcctccagaaagcgattcgtgtaagtttaaacctgtgatgacagaggaagaaagagaggatgaatcagtaacacgcttaaaaattcaaccgctgagtcctagggggagcaaaagccatcatcctggggaaacgcttcatgtattttcccggcgagaaaaaccgtggggctgaaaacgcgaccccggccccagaacccgggacccccgagccgggagctcggagaaaggagggatccgagctgctccggcagcgccgaccctcccgggcactgcctcccgctcctcccgggtctccccgccgcccctcgaggcggcatcctggcagcacccacttgagacggctcggcggccggcgccctgctaccagccccgcgacattgtcacggccgccgggccggcctgcgacgcagagaagaggcggcgctgcagcgagagccggggccgcgctcggctcccgcccgcccgccagctgatcccgggagcgccgggcggagactgacccgccgcccctcccccgcgcgcgctcccgcccggctccatccacccaaccaggaagtgaaccgccgccggaagtgcccctcggggcggcgcggcgagggaccggggcctctcctgcaaccgccgttctgtcgccacggatgggaaggagtcgaccgcgagaagaggactgggggaagagggtctcagtgcagacagagttctggaaaagactgttgatatcacccgagccgcagggcaagctgggaaaggtagctcggcacagtccggctgctggactacaaatcccagcatactcctggaggagagggcgaggcggcagccgtgtggcctccacggcctcgaaggagatttgtggggtggcgcgtatgtggggactcggcaatttaaacacatcccgtgaagaaactgccaacaactaagttcccccccccccccccccgctgtatgttccacccttctggagccatcttatttgcggcctggcctcctggcacaagggattctggaggttgtggtttccgaacggatcgagactgacacctgaaggacgcggcttaaccgcttagcccctagcgggtcctgtgggtttcccgacgtctcctgggctgaaatggaagcgagaagtgatcgggaacattgtgctggcagttggatccggctgcaccgagcgccagccttgaaataagtaaaaccgatgcccttccgcccctaacctcaaaagctgcttttgcgtctcgatgttattgagagccggctctgcggtcagctctgagctaggcgctgtgagaacgctcagtaagacagtgtctcgtctggaaatgtacaggcgagattcaaaccgagaaactgccaaaggttgtgtgcagggcagatcctaggataccggagacccagcccgttggcttgacctcaaaactcgggggcttttcggcccatgctgtcccttaattcctcctcctttgctgacgctgtgggtgcgcatcaaagcctaaacttcactagctcccttgcacacaagaacactaaccctaacctgaccagttatttatttttcacttcaagattcttccattgatacttacgtttccctgataccgtccaagtgctgagggcggggatggactgtgtgatttgcatctgccaaatgcagaaaatttggaaggtcagttggtacacttttccgacctagatttcctgatggatgatgctgaagagtggcaagttgctgccaaaaacaaacaaaaaaacctaccatgatttattaatattatttttctaacccctgaatatgggttattgttcatctctgcccgctttccccactccctagtgcttgtctcagaatttttttttcagcgggtatttgagtagagaagggtgtcccagggaaaaaaatggttcttgctttctctaatctgaatattgagctgagctgtgactgggttaacagtagcgtttgttgttgctgctgctgcagcttgtttcaagtagtgccattgtaattaaactccgtgaagagatagcatcttttcttccggagagagtcagtgttgtcacctcagttcacgaattcatgtagccacctccagggtgaaatgcagcccctattccctcaaactaagcccacgaaggcatgttctctgcactttccttaaaaggccagatttttgtctgaggaagtttgaagcagatcttaaaatagatgagaaagctcatttggaattagactcattgacccccatttctctcagcacttatttgtcttgactgacttttttaaacaagctgtgctaggtcctaaaatcaatctgatgctatctcagtttttacctttctagacttctctggtaccagactagtccaggcttacacaaatctcaagtcttacttcagtgatacaaaaactcccaatatgcttaaggtagctaacatgcatttatttaacacccacgtgaatgctctgatcagaagctgagggaagaggtttaaaaaacaaaaaacatgactagattccttgccctccattccctcacagactaatagcaattataatgacaaatccacagtttttcatgctttacatatattaagtatataatgctc

SEQ ID NO: 2500 - DNA, 4001 bp, Homo sapiens
acccgcctcggcctcccaaagtgctgggattacaggcatgagccaccgtgcctggcaacagtttcttactaagaactagcacttgagaaagttatataaaatatgctcaaaaagatataattatctctcattttattttatttttttgagatggaatcttgctctgtcgcccaggccgaagcgcagtggcacaatctcagctcaatgcaacctctgcctcccaggttcaagtgattctccttcctcagcctccggagtagctgggattacaggcacatgccaccacacccagctaattttttttttatttttagtagagatgaggtttcaccatgtcggccaggctggtcttgaactcccgacctcaggtgatccacccgccttggccttccaaagtgctgtgattacaggcatgagccaccgcacctggccaattatctctaattttatactcactacttttattaacttttatcaaagataactttttttttttttttttttttggagacagactctcattctgttgcccaggctggagtgcaatggcgcagtcttggtccactgcaacctccgcctcccgggttcaagcaattctcctgcctcaacctcccgaggagctgggactacaggcgcccgctaccacgcccagctaatttttgtatttttagtagagacggggtttcaccatattggccaggctggtctggaactcccgaccttgtgatccgcctgcctgggcctcctaaagtgctgggattacaggcgtgagccaccatgcccagccaaatttttgtatttttagtagagactgggttttgccatgttggccaggctggtctcgaactcctgacctcaagtgatccacctgcctcagcctcctaaagtgctgggatttcaggagtgagccaccacgcccggccaaagataactttttaaaagaaaactaagaggttaatcaaggttaactggcaaagtagagggtgtctcgactgatgccagaagccaagcaatcatccattctgccacactttcccacctgtgggctcctccagcgcaaggccagcatcttgcccatctctgtgtcccccataacgttctgtccatggctgatgtttaatgcttacacgcccacctaaactgatttgaggtggatcgcctcaaagacctacctgagtgcaatgcaaaggtgacctcgctatcgtcggggccctccatgctgccgaccaccccttcctggggttctagaacccagccctcttcgttgccctcttcctcctcttcttcctcaaagtccacatcttccatctcctgggccaggtcatctgctttggggagagggttagaagatggggctcgggaggcggtaagaggtacggagagaagcatgaggaggcctgaggctggggcgggtcatgtggcgagaagggaaggtggagtcagacacaccggggtccgcgggggcgcgcgggacacaggacgggaggccacggctggccagagaccgtgcggtaagggagggccaaggggatgatgggaagggggtgtgtgaggggaagggccagaggaggcgtcagggaacccccaccccagccaggcctgagaactaagtgtgagggtgggagtgggggaggaggggaagagggatatcggtaggaatgaccagtcgggtgtggaggggagcggggaaaagcaggagtcagaggccaggggtgagcgtctcctgtcccatggcctgaggagcggcagttctcacctgggtccggcggaccgggatcaagttctaccacctcgataatctcttcatcaccatggaagcttagggtctccagtgggggggtgtcagcagcagccccgctttccgattcggactccatgcggcgcaagcggcggatccacttctctgggcccaaacgcctcccagagtcagctctgcgcgacgacgcggaactcgagcccctcctcccggcaggaagtaggcgtaggcgactccccagcaggaagagcgacggccgttcggccaatagctacgaaggttggctggccgcctcaccaatcacagagcggcattggaagatggggccggggcgtggcggagagaacccaaactccgccccacctgactccgcccccaactggagggaaacaagcgagcgcgcgcgcctccggggtctcctgggaagagtagttctcctgggtccgctctgcgggcttctgggagatgtagtttctggtctgtaggcaggacggaaggagcgggggaggccccttacgcaaactacaattcccggcggggagcgcggtgaagcgggggtgggatctgaacatggcggcggtggtagctgctacggcgctgaagggccggggggcgagaaatgcccgcgtcctccggggtaaggagagggaccccggggagggcaggactgcagaagatcccttttctttcacgtccagcccgacgatagcaggaggtcagggctcttggttcctccccacacttttctgcaagatcttagagtctgggggtgcagagatgctctttagaggtcacccagtgcatccccccgccttcgggttgctcgacacctccggggtcttgctgcaagagggagctcctaggaagcctgttggactcccgcgctccaggtgtttcacactcaccgcagtgcagaggaaagagccccgggcttctggaggtttgagttccagccccggataattagcagtttgaccttgggcaaagcagtttttctctcagggcttcagtttcctcttccgtacagtgcaagggatggagtagactatctttaaggtcccttccagtgctaacatttgcagtttcaaaaccttttcccggatttccttcatacgtcttatgtgagtcccactgcagtccttcccatgctgtcgtctgaggaagaacagcgaagcttttcgtcctggcaccagggtgatgagcccgcagtgacgtggaagtggcttccaaaggtgccacctcggtggcgattttcccatttccctttggattctccttggcacttcttacttcagactgcagtcactccccttccccagatctcagccgctcctcccaagcccttactgccccccacctccccgcttgctttcttctcatctcttcttactgaccttccttacctccatccacagggattctcgcaggagccacagctaacaaggcttctcataacaggacccgggccctgcaaagccacagctccccagagggcaaggaggaacctgaacccctatccccggagctggaatacattcccagaaagaggggcaagaaccccatgaaagctgtgggactggcctggtgagttttaaccacccctttgcccaccaacggggcgtggcttgtaggggagggcaggacttagaaacttctccaagtttcaggtggcgagctgaatccaaagttgtgggaacagaattgttgggttcgattggaatctcagaggggtggggcagtggaggtgggaaagtatgtggaattgagaagacagtgggtttactgtggagtaagctgagttgatctgattcagacttgggtccctggcctcatcctcccttttgggagcttggagtgagacccaagtttaagtaagtagttcgttgagatcatgtgagcttgtactagttgtatagtagtactcagaaggcgttatgaacattgtgattgggctctgactctgaccttaatacatattattgaccaatattaaagagaaaggaggaagaaatcaacatttttttctgcatgtgaggtgtgccagtactttgccatgtaatgttttagtgtttgagataagtattacatccccatttcacagaggaaggaactgagactgagctaggattctcacctagtctgtgactccatgctctttcccccataccaaagtgcctcccaagcagtggttacttagcttaagaggggaaaactgggagggtaccttggccaagtctcagagagg

SEQ ID NO: 2501 - DNA, 4001 bp, Homo sapiens
gaattcttcctaataaactgtcaactagctgtcagcaactacctacatttgctgtggaatttgcaggtctgtggcgttgacattatcaatgctatggatgcctcaaggctctcataaaaatacatggcttcagcaatacgcatgcagttatctcagtttaaaggtattttgctattattatttttgatggctatatagggaatgtgtttaaaagacatgactatttggccgggcgcagtggctcacgcctgtgatcctagcactttgagaggccgaggcgggcgaatcacgaggtcaggagaccgagaccatcccggctaacatggtgaaaccccgtctctactaacaatacaaaaaaaaaaaaaaaattagccaggcgtggtggcaagcgcctgtagtcccagctacttgggaggctgaggcaggagaatggcgtgaagccgggaggcggagcttgcagtgagccgagatggcgccactgcactccagcctgggcgacagagccagactccatctcaaaaaaaaaaaaaaaagacatgactatatgaaacatggcagcctggctagggtgaaattgcctaagggcttggttgctctgggagaagcacctgggtcagccaccttagaggatgagagagatggcagcagaaagaggaggtagttgtttatgcaaggattttggccagaatctactcagaggtggagaacttctcgttaaataatagaaagtttgtaaacaactatgtacgttctattttagaaaaagaaaaaaattggttaaacctaagtaatcctgtttgtttttttatttgtatagatttccgttagcacacagatgtatcctttgggactaaaataaaagaatttcaatagtataatttacaggctaaagcaatctttacctaacaggcaggccatctcgtctctaaatttgccttgaactacagaaatttgcgtcaattaactaccataagcaactgtttgcatttcttaccataattatcacagttacttcaggatctgcttacattaatggtctttagacagcatggttgctgctgttatttccactgcctattcccgggactttatatatgccaataaaagtcccaaattaaattacctacaaacagttttgcctaactgaataccactgaaagcaaacaaattttgcattatcttgtttaagcataaaaaatatttttattctctggaaacccaaaaaatagtaacaaaaaattagaggctgctatggtatgaatgagtatgttctcccgaaattcgtatgttgaactcctaacccccaagatgatggtattaggaggcttgtttataagctggtcagattatggtattttgctatagcagcctgcacagagcaagacagatacttacacactgtttgtggtgaaagaaaagtgttgacagccctccagctagatcatcctcataggcataaggtaaccaatccagacatgacacattagatctagttatgcaagctcagaactgaaaaagagattttcttgtgcaatgcttaaatatcattaaataatatcaaaaaataagtttcaactttactacacttggactatgccctttcctctgctcagtcaatagttgatttttctattccatgcttatatacactgataagcgaattatgtttagaaattgttttgattgtttattcagccaagttatctacctatttagaaataaacaaagacttactgtgcagccagactgcttggagataaggtctgtccatcatcctcattccacacatgcgttatattatcggagtcacctgaagtaataatttttatataggtaaacatttaacatgtttgcttaaagatttttttcctcagtgaaaaccatcccaggtcaaattaatgaggagaaaatgcagaaatctgcagaatcattctcaaaagaattgtataaaagacatctatgctcttttgttggaaatatttgtgatatttataggaaatagatgcctactgatcaaaataatcccgatggtcaagcatatgcatttctaacaagttctttgtctgtgcatcaagccactacattattttatcccaggacctgcatatgcagatgactgctaagtactataatgaagattgactaccacgtgatttgttaatcaaatgaagccaattttagtcttatgggtcactggattttttttttttttttgccttcagttgtctagaatgtagcctcaggaaacatctgccatcactaatctatattttctatctttcaaaaagcagccactaatctcaattgaatgcagctgtgaatgcaaattgactgatgttaacagaactgctctgagagttctcaaataatatgagggtgcatagtgtggaaggcagtcactaagtttggtctaatggagaccacatacgaagatctaattcaacaccatgagttacccccagaagttaaataggtccctaattcagcctgctgcataaggttgtatcataaaagagtaagtgtgcaacagcattcacataaaaattgaaaatgaaaatgctttaaatggcccctgcataaataaaaacatcataaatccaatactttaattcagctcctttagggaaatgatatcacttatttcccttctcttcagactctactcattccttataaataatccagtatgtctcaatgctgtcatttttaacattggcctaatcattttcaatgggatattttattaccagcttcaatagttcttgtattgtctctagttagtgcaacctaaagccttctaaaaaggtactagcacaaaactatgcaatcacccatttttttgctggtcctgattattaactttatttaaattagtatgtgtgtaaaaagactatcccagaattaaaaatctccttgtctgtcacctgtatcagtcatgtttaagtaacgtttgtacagcccctgctatctggcagagtggctgtctcaggtttttctgttcagcagagtagagtttttctgtgctctgttcacgatgcagctgaatattattgctctaataacagtaatgcatcagtgagttaaagggccaagaatgaatgggatgcccagaataaacaaacctaattaacaatagtaatacctattatgtattggcatctatatatagaataactatagattcaaaaacctgttgagatttatgcctttgcaatgtaaaggtatataaaactctttttctaagatcaaattttgctcactttgaactcctatgtgatgctcagcaagctaattggtatttgtaatactatgtggttatagagtttctctttttcgtcaagccattaaaataagtaactaatagaaaattaactttatattatcaatgacagacttgaccctgaagttaaataaagactcttccctttggtcactaaggactataaagtatattgagagaaatactatactaaacagtccttaatgaaatagaaaatgttacagacccttaaaaactgagattttacttcttttttatttgtaagattaggcatacttaaaattgtattcacaggccgggcacagtggctcatgcctgtaatcccagcattttgggaggtcgaggtgggcacatcacgaggtcaggagatcgagatcatcctggctaacacggtgacaccccgtctctactaaaaatataaaaaattagccgggcgtggtagcaggtgcctgtagtcccaggtacttgggaggctgaagcaggagaatggcgtgaacccgggaggtggagcttgcagtgagccgagatcatgccactgcactccaacctgggcgacggagtgagactccgtctcaaaaaataaaaataaaaataaaaaaataaatatatgtactgggatagacacagctaaaaaaattgtattcacagacacagaaatatggtgcatagataacctctttttatcagtaaggatttctatcctaaattacatcctaaaaat

SEQ ID NO: 2502 - DNA, 4001 bp, Homo sapiens
aaacaaacatcttcacctgagatttgggtgtttttttttcctataactttttttacacaaaatagagttgtaaaagaaacagacctcagcattcagattattgacaataacacgtacagattttagttcctctgtgtttttgtttttagctattgaatttttatcacttacaaacttgactgtacgtggatttcttccttttacccacagtatcttctcctgaatttcctttcattattaatctgcataaaatatgacacacattgcctcaaatccctcactaatctatttgctaagtgtgtcagtattataaagcactttgaaatacattagcacatttggtacttcccccaatgagttagatgtggcaggcttcatgccacatctaactaatcatgtcacgtctaactcatcatgccacatcatggtgggaaaaacagtgcttagagaaactgtcttaagctacttaagttacatgaggagcagtggcaggggccccaactcgcatgctctgaccacatgaccacatccacacacccaggatcctttccctgcttatgccacacagaatcaaccacatgataattatggggaggttttcttctgtgcttttttttttccagttaaaaaacaaataaaaacatgaatgagtttataattttatattcaaaccccacacccatgcaatcacatgccttagaattttaaaaccctacccacaaaattcacaagggtaaatgaacatctacttcctcctcttactacacacatcaaaacactcaagtaaagtgtcaggcaatccaagcaagcctggagcgagataaggtgcatagataaagtgctggtttctgtgtgatgcatattatttgcataatatttacattactcattcaaggctgggaattaccactttaaaataaagtatattgaatacctttttggatttccccgattttcaaacattcttctgaatatataacaactcccagaaaccaattcctttctcaatcatcctgggagccatctgatgaggatctaatagctaactttgtaattagaacgcaaacattaatgtaagagtacaaaaaagacgttgcaatgagcaagagaagatagattgtagtagtaaagctaagtgattcaataatattcttaaaacatagcacatatacatactcttgtttggtattcccagtaaatgatttttagatactaaaatttctcagtagcttttctatactaatagccttcaaactatttctgttctgtattttacctttcaaccaaactttctatggctttcagttttccagtatatttcttcccatttattgtacatttcaaataatacttttctttcctctatcccatttttaactacattaagaaaaattctgaaagccttttggcttgaaaccagaattcaacgttccagttcagccagtaatgagtcatgttcttttttttttgcccagggcatgtcctggtttactctttaatttactgaaatgaaaaggctgcttttgggggcatgttaagactcgctccattagctataagacagatagggggatgaattctaaatatcttacttcctgctttggaaaatgcctttaaactcttctgttttcacttctcattaagatcacattttaggattacctggcgtattgccccatgacccatactcccacacttttttttaactcaccggctgcctttttacacctagccaatttttccagaccaggatctgaagctgatgaaacagggaagccatccttcaaatgccccaaatgagagatttcctcttcttttctccactccacaaatgaagaactgatgccccgtccaacttgctgtatgtcagtgtatcagtacccctttcacggcatagcttccttgagggctggggtaagaaacccacagttcttctgtttctgctggatttttccctgtggttaatccttaaccaagaggcacttctcaatcaactcttcttccaaaagaaggacccagatcagtatctttgggtggcttatgcttattttaaaataatatccagttgctgcttgttgcacgaagtccagactcaagagagaatgagcatcattcagataatgcctcactgaaaaaaaaaaaaaagcagcagctgaacccacacctcctactctccatgaaattaattgcctatccacaccttagagaacatgtcacctgcactggatgcgtcacagggactagggggtgggacctttgcaaggccagtaggacttgtcctacattctcttgtcttctttcctgcacacagtgtctgctctagcagaggcagggcacagagagcatttcacagacactgggcccagtgactctttaatattaaagtgtcattaaaatgatttaagtcaataaggccagagcttagctgcaaagctctgagcctcagcccatcattagatatactagggaaagtgtccacctttaacctaaagttgaatgtttcgattttgggggaagaaactatgttggccaggtcccacctttcatcacaatgtactaggttaagcacagggcagaaaaggaaaggtaggctgtaggggacataaattacaaactggagtccctcaattcgtgagtggagattcacgtgtctattacagacaagccacattgtttcaggctcttatagtgaaaggggacacaggctgatccaagacatttctatttcctctttccatgatacattcctccctctctaagatcctgcctttcaaagttatccccaagttgacatcttcaatgaagcctttttggatatatcccataggatagattctcttgcctttgaatcattctttgttgccctctctcaaggaacttaaagtttttgcattatttttatttgtgtatgtcttatttttcctacaagattataaattatttgaggacatggactattttatatcacagtactttacatatcattagtgttcaatacttgctgctgaatgtaattgaataaactactggagccaaggctagtagggtgaagctcccctttgatcctcacacctaccctgactaatccagactttacttgcaaaatccgttaaagcattaagagttctcccttcgccaggtgcggtggctcatgcctgtaatcccagcaatttgggaggccgagacgggctgatcacttgaggtcaggagttcaagaccagcctcgcaaacatggtgaaaccccgtctctactaaaaacacaaaaattagccaggcatggtggtgggcacctgtaatcccagctatttgggaggctgaggagggagaatcgcttgaaaccgggaggcagaggttgcagtgagctgagatggcgccactgcactccagcctgggcaaaagagtgagattccatcccccctccaaaaaaaggaatctagcacaggtcctgcctcatagtaagtagtcaattaattctattaattgggtagcaatgtttgctaaggacttattgaatcatcctaggagtcctattatatagaaactgtcattattcccattttcagtgaaagaaagtgatatttagaagtgccataacttgctggatttcacctagttagcagtgaggacagtgggaacagcagagaaggaactcgaacctcgtttctgtactgttaatctctgtgctatgttttctccagtcccatgtattacacttcacaggaagagctgagaaacaaatgaacatcagggattttccctgtttctctaggcaggtctataaatcacttgtagagatttttttgtaagtacacgcatgaaaaattatggccaaaatgagttcacaaagagtagttgctccaggaattcaggagaaggaaggctgctcttttaggcttcttcatagagcctcacggcacttcccagcctggctcttgccagcttcatcagttgtctctccaccttcagccctccctcctgccatctgctagaatactttagat

SEQ ID NO: 2503 - DNA, 4001 bp, Homo sapiens
aaatgtaggtaggatacttttgttattatcagctcagcaaatgatttctttatctaaaagattattagagaaggaaagaaacatttaatatatgctaagaaacaaagaaaatagaaaggcattattttccagataagctcactgtcggttgatgctgtgtgtcaacactgtgggtgacccagtctgggaatagactaaaatgaggcccttccagccctgagggctatggctgatagggaagggaaataaatacacggtgatcccattggccacgtaagtcctttcttcagaggcaccgttgaggtagaggactaaagaattgcttaggaagaaaacagaatgtaacaccaaagttaactgccacagcgattctttgtctctaaatgtacagttctttcctcttttttttttttttttttttttttttttgagaggagtctcgctctgtcgcccaggccggactgcggactgcagtggcgcaatctcggctcactgcaagctccgcttcccgggttcacgccattctcctgcctcagcctcccgagtagctgggactacaggcgcccgccaccgcgcccggctaattttttgtatttttagtagagacggggtttcaccgtgttagccaggatggtctcgatctcttgacctcatgatccacccgcctcggcctcccaaagtgctgagattacaggcgtgagccaccgcgcccggccagttctttcctcttgaccaagcaaaacacaactccagtatttgatttctgcaatgaaacttgggcattttatggcaattgtagcatcttttaaaaccacaaaatgggcattttccccctaaatagcttcttaatccatttttaggagtcatcccctaatatttgtcaccattattcttggtactaggaaacaaaaattattcaaggggcttgcaatctagagtggggtggagtgtaaacagaagctcctagacagggaaatggaggcttcaaccagagacaatcacagtgttacagagcacagcagggggaaccaaggtgaggggggtgagcagtgaggggacgaggttgcccacagaaaagaacttctattaaacaacagctcataaataagttatcacttcaaatgtttaataaaaaccactactaactcctaatattaaaaagttttaggtataaccactataatttgtctctaacatctctaaaaagctattccccctcaaaatgttgacaaatactgtcttttattcccagtctgaagtgtgaataatatttgatctctgtgctcaagccattagcaatatgtgactcccactggcttgggtgacctaaaaactgaaattagatcctagaaacaaactttctcccctctaaacatgcatccacagctcatttttttttgcatctatatttttgaaaaccgggacaatgaagaaatgagtacggtgttggagaaaagataaagtcggtgtagttctgcattaaaccagctttcaagggtagaatttgtgatcattgaatctgtgattatcagagcaaacagaattgtgctttcacaaagccaagttaaaaaagaagcccactggtatttttactttgagcagattattcaatctattcggccatttgtaccacacacccatgtacaccactctctctctctctaagagattgatacatgaaatagcattgctataaagaagacagcaaccaagagtcatctgtattgtatacaatgttgtgaaatcattaatgcatcctgtaagtttctatccaagtattgtagcgttgtttacactggacaagagaccaatgtttaataaaccagaaacactccactccacaaagtaagagttaaagggaagagggaatggatttgcagagacaagtataagttacttacctgtgaatatgaatttgaggaagccagaggaaataatggactccactgtggagagttaaaaggtttcacaaccttttccaacctcggttttcatcattctaaagcactgaacagaattcaaactttttcaagaacattatctatttgcctaaggatcaatgtccctaagggcagcccaagcacagttcagtgacatacgagaaacatactcagagcaataaccccaaacacagagtgtgcttgggaaaccctctgagggtgtcaacaggccttggaaattgctgattcaccttggaacgagaggcaaattgagcagagtgggcccagcaagagccctggaattcaggctatcccaacccttattttttacaggcctgtagttgtgaaaagttacttaaaaacataacaagacaaaaaaaaaaaatacctttaaactttccccctcaatataaaagattgctcttggaaaatccctggttgcaggatccagatgctcctggcccagctatagagttttgtggagacaaataccctaaaagaacatttgaaacagccttgctcaaaagtctgagtgcacagacaactcttgcaccctggcatggacacaccagatgaagctctgtataagcaaagatgaacgattttctaaaggttcaaatgaacaggtcttgagtcaaataagcatgtggagctcctccaatatatttgtgctgcctcttcctctcccttcttgtgaatctttccatttttcctacaatgttcttattttttctcctttgcctgagcttacttttccctaaatgcctctcactccagccttcagcaatgaataataataggcaacattggtcaagacttggttgggtgcctggcccacttcaaaaatgttatttgtatcacctcatttgggcctctcaacagccctaggagttgggtgctatcatgtcatttctattttatagttggggaaactgaagcacagagaggttaaataatcctcctaaggtgtaacaactagtagatgtgaagccacatgccagtctgtgctaaccttcttccactctgtgctctgaaatgcaattgatgggccagtgcttcttaatttgcagaaattaaactgtaagatcaaattttctcaattttaggtttctctgtcataaattttttattaaaattcagcatccaccattttttctctattggaatttatgtataagatggtttatgacttagcccataaaacccaaaattataacatataattttatatgttattatatgttcaaatctcaaatatatcaaggtcagcaaagaaaagcaagatttctagatgtttcctctatgcaaactgaatgggttgacttctgagttgacgcaaatgtagtaatattggatttggcaccaattaggacccaggaaaaaaattttgcttcacacaaaaccaaaaaggcaacacagctatggggctgtagctttgattgggaaaagattcccaatagaattttgctacctttgctgtgctgaagttattgacagcagtcaaagggtaaaaatgccaagagaaatttgtcaactcaggactatagctgatctgctcacaggtccaagggtcctaagactttccttctggtgccatgaagatccaagggaagataaaagcatagagttttagagctagaaacaacattgtaaatattgatatatcatccaacaacttcatcttatagatgagaaaagtgaagacagagtggccatctgtccagggccctggagagttcagggtgtcttcctctgcaccctcatgctggccagacacatctgggcagtgtgagtactgagttgatcgtgcttaattcacttcagctataagcttgtcttctttatggttcacggtctgaaaataggtagggttgtggtccctacagtcacccaattaaaataccggctctttttgaatgtttatgtgccaaacactgttctcagttctgggattcaggaatgaataagacagacgagaatctctgcctcaggaatcttacattctgggggcagggagggggcagtatagagaggagacaaagaagtaacacatacaataca

SEQ ID NO: 2504 - DNA, 4001 bp, Homo sapiens
tttggaaaagaagcatttcattttgggggaaggaatgatgacagggaatgaaatgaagagactccaggattcagaaactgaggtggggtctggtgcagtggctcatgcctgtaatcccagcactttgggagtccgaggcaggtgggtcacctgaggtcaggagttcaagactagcctggccaacatggtgaaaccccatctccactaaaaatacaaaaattagccgggtacacacctgtaatcccagctacttgggaggctgaggcacgagaattgtttgaacccaggaggcagagggtgcagtgagctgagatcgcgccactacactccagcctgggtgacggagcaagattccgtcttaaaaacaaaaagaggccaggcgcagtggctcacgcctgtaatcctagcactttgggaggctgaggcaggcggatcacgaggtcaagagatcgagaccatcctggccaatgctgtgaaaccctgtctctactaaaaatacaaaacttagctgggtgtggtgtcatgcacctgtagtcccagctactcaggaggctgaggcaggagaatcgcttgaacccgggaggtggaggttgcagtgagctgagatcacgccactgcactccagcctggtgacagagcaagactccgtctccaaaaaaaaaaagaaactgaggtgtacctggctcctttccacatcttggtcctcttcatgaacctgcaatgtataggactggggacgaagtccaggggcccagagacccaggacaaacagccctccagagaccacataccgcagcacccacaggctaaactgaacctagaatgaaatataagtggagagagtatcattgaggataaaatttcattgtattactacttataatagggccggggactggtgtcatgaacacattcagcacttacaggcttaaaaaaaaaaaaaaaagcaaaaccacagtgactcagcaaagacacaccccaccagctggctatcagctcccggcaggactcagcccctcccttctccctttgcttagaggcatcctaaagcctggaagcagtgtgactggacatgcagtgctttctcccaagcccggccagcagaggcttcccccttcccacagagtccctcacctgctggcccaagtctgcccttgcccaccaccactgtgggctgttccaagacaccagggccaagttctcagctgcaaacgccacagtccagaggagcaggagaccagggctgtgcctgaacttgatccagatgcccattgccagacgctgccgtgcctggctccgctccacgacaagcagccacaggccacaggcgccggccagactctccagcacggaggccagaagtagatagcttggcagtggggccccccgggcagtgcccacccggccagccaggccggccaggggcagcgccgcctgaagtgtggccagaagcagctgcagcacgtagggagagatgcgagggccggccccccaagacagcgaatcagcaccagcgggccgctcccggcgtctgcagggaagagccagcaccaaggccagagtccccagagccatccgcgtcgagggcacgagcgtgaagaagaagcagggactcaggccatcctgcatccaggccggacccacgggcccttcggcctcgcagtagttgcccacagtcaccatggcaatgcgtggacgccggccgaggctgcgggcactgcgggaccggaggccgggactggtcactcggagaggggcgcggacatccgggtgccttggctcacgtagccgctgggcgccaagctgcgggggtcccgggaagggacgcacgtggaccaggcctcaccgcccactcccctagcgcacgcgccgccgccacgcactcacgcagggcacgtacgccgtctcagcacggccccgctggctctgggcccgggaccctcctgccaactgcaggcccacgggaatgctcggtgttggactcgcaccgcgctccacggctgtagccccgcccacagcccctacccacggctcccattggccaaatgtctccgaggggggagcggggggaatggtgcaggcaacgaatgcaaattagagaagcagagccggcttggtcacgtgcccagggcgggaaatctgacgaccaggccgagctggaaacctccacggaatcgtggctcggggctggaaacagacctcacggaatcctggctcggggcaggacacagacctccacggaactgtgggtcggaagctgcccttccgccagccgccttgctcagcgtatctgagcgacggcctaaacatactttcttctagaccccggcagagtccccatcccatttctcttgttcccaggattctagccgcgcgagacaacaagaagtctggtcaaactccctttttattaagggttatcaagctgtacacggtccctaccctgctccgctccgagttcgggcagcgcaattcaccactctcccaaagccggaccacagctgggtgaggggtgggacagagagtaggagcagtcccagcatgcagtgcagcagcccaaagcctcgggcgaggcatcgcccttcatcccccttcagggcacagcgagatgcgggccagagctcttttgctgggacgcacacagccaaggtcaccctccagcccggtctgtcccatgtgcaggtgatggggggtacgataagcagcaatgagggcccaggaagacctcagtctcctgggggcccatcctaaaagatggcaagggcagcaaagtatttccatcctgctcctacaatttagaaaccttcttttttagtgtcaaaatatagcgttgaggggagctggacgctagggtcttcaccctaacgcaaagcaaaagccgaacggaacgggagcaagcgaacagaacaggagcaagcagcacacacaggccagtgatgtgcaagaagcggagagaggtgagccggctgcagcactgggcgagaactgcgggtgaggtaagggccacagcctgacctgctcatctattgagggggctagggaaggttgcaggggttgagggtccaggcccaacctccccactccacagttggcacaggttctccctgcttggcagcttctatcgtgggcagccctctggggacttgcaggggtaggtgtaaaggtggcagtactggggctgggctgggggccagtttctagcaccacactctgagccaagggggtcctggggatgaggctagagtcccgtgtgccctcggttcctaggccccaaattcctctcctggggctgtggcaagcccagtgttggcacctcccttggccaggcacagacacacaaacaccacacacgtggggccagggaacactcagaggagccgtcccatggcaggcagacgggatggcagggcagcggtggcctccatcctgggccacaggaaccctgctcagccttgtctatacctgtggggagaaagggttggtaatggagatagtcttcagcttctggttgatacctgctagccccatagaaacctagaggtaaagggacaggaaaggttgattcctggggaggtaaggtaaggaaaaaccaagccctgcagagcagttgagaaaagaaggggtagtgtgttttggaagggagggtacagtatctctgtgtgggggtggggcatatcttccttcccctgaaaagctgttacctcaccctggaagttactatttctggcagtttttcctaggccccggggcccttaccttgtgcacctgagggggtagctcatcctccgagccctcttcgggcacgggctcagggtgccttgatgccgactgcccatcttctgcccaccctccaagaggcagccgagagaaatgagagggaaccctgggcactgtgccaggatctggagagacaagtaagagtaagcatactcatagaaggaacacaagaatgaggaacagggctggggggctgcttggggggtgagtctttgggcctgttc

SEQ ID NO: 2505 - DNA, 4001 bp, Homo sapiens
aaaaaagaaaaagagtctgggaaacatagcaagaacgctgtctctacaaaaaaagataaaaataaaaataaattagccggacatggtggtgtgcacctgtagtcccagctgaggtgggaggatcacttgagctcaggaggttaaggatgcagtgagccaagatcgcaccactgcactccagcctaagtgacagagtgagactctgtctcaaaaaagaaaaaaaaagaaaagaaaaacgaccagataagatctgataaggcccgatgttaatacatgaacttttaaatattattctccagtctttttttttttttttttgagacagggtcttgctctgttgcccaggctagagtgcagtggcactatctcagctcactgaagtcttaatctcctgggctcaagcaatcctcccacctcagcctcccaagtagctgggaccgcagacatgcaccaccatgcctggctaacttttgtatgtttttgtagagatggggtcccactatgttgcttaggttgctctcgaactcctgggctcaagcaatcctctcacctcagcctctcaagctgctgggattacagtcataagccactgtgaccagcctattctctattcttgattgtatgtccaaaatataccatcataaaaaagcaccactggaatcaaagataggggcttaatgggcatttttgtgcttatttaatccttttcctgtctctaggcagtgtacagataggggaaattgtgtttcctgagtacttttatatgccatggaactgtgggggctttttatattttgaaatatgaattcacgtacatgttaggcagaattttatactctttcaaggatctttctaaagatttcacattggtagcagttccattcacagtcagatatcaatagaattcattctaatatcaaacctgtggctttcttgttacaacttaatctgtttcttcaatgtggagtttaactcaagccaaatcctttttagaatcctccttcccaagcttacctgagcttcctaggatgcacatgatctgcccgctctccacgtacaaggagacatctttgaggatctgcctggtccactgctgccggcaagatgtgatgtcccaccagggcctcacgcggtggctttaaaggaaaccccaggaaggcaaaggcagcttggggccctggaaggggccacacccaggtccccagcattgatcctacctgtgccccaccccagtagtctccggacaggctcctaacgtgtttcagtctctgcgccctcctctgtagaacctggcagatagcgactgaggctgtctgccacgtagggagggggcctgtgctggagttgctctgaatgtcctgtccgtttggctgcgaggtggctgtccctgcattctttcaccaggtttcaagactccttgcattcgcagtacccccattcccatccacagagggcaggccgtagacactgggttggcagggcactgctgccactttgtttatgcccaggcccttccctgggcagggggaggggccattcactgtcgctccatgtttcccagcacagcccttctccctctcctctctccacccgatccactaaagagggagcccgaagtgcccagactggcacttaaagagtgaagaaaggcagcagaggggtgagcgccgggccccgcactcctgggggagcagcagcagcaagggctctgccttacctgacgctgtaggaggcatggaggatgcccaggctgtgaggctccggggcggtggcaggagccccctccagggagctctgggagcctctgtttacttggagacccatggaccctccgggggtcaaagatgagaggtcacccatggccaacaggcagcaaagctgggcaaattttctggtggccggaccctccccagagtggcttcagttggggagcccgtggcagactgccctgcctgctccacctgaccccggagtcccttgggacagcaggactgggacttggccacggagaccattatctgatgtacctttagccagcgcgtccttatcttgacagtgggcagaacacacacgtttgtaggtgggcttgccagcaaggaatgctgggagagacgggcccagggcaggaggccgaggtgtccctgctccaggaaacagagtgaagacactggccctggcaggcagcagctgggtctaagagagctgcagcccagggtcacagacctgtgggccccatggccgggaaggcggcagaggagagagggctgccgaaaggggccactccccaggatacctcggtgagtgagcaatgggaagtcggcccaggcctggtgggcgggtaggagaaatcaaacctttctctcttccctcaggagccttctgtcctagcaccacccggacatcaagcagtgtgaggacatggccgcaggactgtttcctgcatgtcaaagggcggaggggaacagattcagggtcccagaggcctctgaggtcacttcctgccctaagaaatgctcttttagggaaatgatgttcttttgtgtgatgtgggacaatttcactttttcttttttcttttcttctctttttttttttttttttttttttttttttttttttttttttgagacggagtctcgctctgttgcccaggctggagtgcagtggcgtgatctcggctcactgcaagctctgcctcctaggttcaagtgattctcctgcctcagcctcccaagtagctgagattacaggcacctgccaccacacctggcaaattttgtattttttagtagagacagtgtttcaccatgttggtcaggctcaaactcctgacctcaggttacccaccctcctcggcctcccaaagtgctgggattacaggcatgagccaccgtgcctggccagtttcgctttttccgaatgagactccatcatagaaatgtgctcacacatgccagggactccactggtgtctcctccatccatgtggctgtcaggttggtctcagtaatgaagtgatgggtgagacagggtgacagacggcttttgtgggaacatcagcatgtgtggctctaacaggcaatcgtaagttctgcgagaaagctggaaggagtagaagcagccaggtggcaggaggtggaggtatgtttccttcctcattttacctgagaagtgtttactcaagaaatagcctttgactgaattcgggatgtggcaggatttgaagcaggaggctaaactggaagacaagcgagaagcagatccccactcccaccacctcaccccatcctacctttccatctttgcctgttgtgggtaggagggaggagagaaagacaagcatgatcgaggattccacacccaatggggaaaacaacctggactggccttgagtttccaggacttgactcggccagacccaaggagcccaccatttctagtcagttctgcaaccaccacatctgaccagctctgctctctgaataccctgtggggcccaccacttcgggaaatgtttaaagcctgaatagaatagaaagtcagcgggactttgggaacacttcctgcctgggagggctgacgattcagccaccacagcttgagaggcaaagaaatgctaggaccacaccagaaatgcacgcaggccctgccatttctgcttcccttctgtccgatcctgtcactccaggtgctgagtgacggtctgcccgtaacacctgtgggtcttggaacaagaggatgagggtcacatttcctatgtctagatatataaaagtcatcagtcaagctataagaacagttaaataaaatagtttctatcctcttatcttgacatatcttcctcacaacctgaaaggccatgtgtaaattgagaaattctaaggcaacttggctagaatgcgctggtacgggggagccacttccagcccgagccacaacctgtcccccttttctggccccctcagctccatcccactccatggggccctcaacaccctgga

SEQ ID NO: 2506 - DNA, 4001 bp, Homo sapiens
atattctctgtgcaaatggccccaagtccatccccagggtctgtacacctcttcccaggcccaacctcctgaggacttttaggccagagaagtatatgtctgtgcagggcagggctgcaatgcaggtaggcaggagggtgaccatccagggtgttgagggccccatggagtgggatggagctgagggggccagaaaagggggacaggttgtggctcgggctggaagtggctcccccgtaccagcgcattctagccaagttgccttagaatttctcaatttacacatggcctttcaggttgtgaggaagatatgtcaagataagaggatagaaactattttatttaactgttcttatagcttgactgatgacttttatatatctagacataggaaatgtgaccctcatcctcttgttccaagacccacaggtgttacgggcagaccgtcactcagcacctggagtgacaggatcggacagaagggaagcagaaatggcagggcctgcgtgcatttctggtgtggtcctagcatttctttgcctctcaagctgtggtggctgaatcgtcagccctcccaggcaggaagtgttcccaaagtcccgctgactttctattctattcaggctttaaacatttcccgaagtggtgggccccacagggtattcagagagcagagctggtcagatgtggtggttgcagaactgactagaaatggtgggctccttgggtctggccgagtcaagtcctggaaactcaaggccagtccaggttgttttccccattgggtgtggaatcctcgatcatgcttgtctttctctcctccctcctacccacaacaggcaaagatggaaaggtaggatggggtgaggtggtgggagtggggatctgcttctcgcttgtcttccagtttagcctcctgcttcaaatcctgccacatcccgaattcagtcaaaggctatttcttgagtaaacacttctcaggtaaaatgaggaaggaaacatacctccacctcctgccacctggctgcttctactccttccagctttctcgcagaacttacgattgcctgttagagccacacatgctgatgttcccacaaaagccgtctgtcaccctgtctcacccatcacttcattactgagaccaacctgacagccacatggatggaggagacaccagtggagtccctggcatgtgtgagcacatttctatgatggagtctcattcggaaaaagcgaaactggccaggcacggtggctcatgcctgtaatcccagcactttgggaggccgaggagggtgggtaacctgaggtcaggagtttgagcctgaccaacatggtgaaacactgtctctactaaaaaatacaaaatttgccaggtgtggtggcaggtgcctgtaatctcagctacttgggaggctgaggcaggagaatcacttgaacctaggaggcagagcttgcagtgagccgagatcacgccactgcactccagcctgggcaacagagcgagactccgtctcaaaaaaaaaaaaaaaaaaaaaaaaaaaaaaaaaaaaaaaaagagaagaaaagaaaaaagaaaaagtgaaattgtcccacatcacacaaaagaacatcatttccctaaaagagcatttcttagggcaggaagtgacctcagaggcctctgggaccctgaatctgttcccctccgccctttgacatgcaggaaacagtcctgcggccatgtcctcacactgcttgatgtccgggtggtgctaggacagaaggctcctgagggaagagagaaaggtttgatttctcctacccgcccaccaggcctgggccgacttcccattgctcactcaccgaggtatcctggggagtggcccctttcggcagccctctctcctctgccgccttcccggccatggggcccacaggtctgtgaccctgggctgcagctctcttagacccagctgctgcctgccagggccagtgtcttcactctgtttcctggagcagggacacctcggcctcctgccctgggcccgtctctcccagcattccttgctggcaagcccacctacaaacgtgtgtgttctgcccactgtcaagataaggacgcgctggctaaaggtacatcagataatggtctccgtggccaagtcccagtcctgctgtcccaagggactccggggtcaggtggagcaggcagggcagtctgccacgggctccccaactgaagccactctggggagggtccggccaccagaaaatttgcccagctttgctgcctgttggccatgggtgacctctcatctttgacccccggagggtccatgggtctccaagtaaacagaggctcccagagctccctggagggggctcctgccaccgccccggagcctcacagcctgggcatcctccatgcctcctacagcgtcaggtaaggcagagcccttgctgctgctgctcccccaggagtgcggggcccggcgctcacccctctgctgcctttcttcactctttaagtgccagtctgggcacttcgggctccctctttagtggatcgggtggagagaggagagggagaagggctgtgctgggaaacatggagcgacagtgaatggcccctccccctgcccagggaagggcctgggcataaacaaagtggcagcagtgccctgccaacccagtgtctacggcctgccctctgtggatgggaatgggggtactgcgaatgcaaggagtcttgaaacctggtgaaagaatgcagggacagccacctcgcagccaaacggacaggacattcagagcaactccagcacaggccccctccctacgtggcagacagcctcagtcgctatctgccaggttctacagaggagggcgcagagactgaaacacgttaggagcctgtccggagactactggggtggggcacaggtaggatcaatgctggggacctgggtgtggccccttccagggccccaagctgcctttgccttcctggggtttcctttaaagccaccgcgtgaggccctggtgggacatcacatcttgccggcagcagtggaccaggcagatcctcaaagatgtctccttgtacgtggagagcgggcagatcatgtgcatcctaggaagctcaggtaagcttgggaaggaggattctaaaaaggatttggcttgagttaaactccacattgaagaaacagattaagttgtaacaagaaagccacaggtttgatattagaatgaattctattgatatctgactgtgaatggaactgctaccaatgtgaaatctttagaaagatccttgaaagagtataaaattctgcctaacatgtacgtgaattcatatttcaaaatataaaaagcccccacagttccatggcatataaaagtactcaggaaacacaatttcccctatctgtacactgcctagagacaggaaaaggattaaataagcacaaaaatgcccattaagcccctatctttgattccagtggtgcttttttatgatggtatattttggacatacaatcaagaatagagaataggctggtcacagtggcttatgactgtaatcccagcagcttgagaggctgaggtgagaggattgcttgagcccaggagttcgagagcaacctaagcaacatagtgggaccccatctctacaaaaacatacaaaagttagccaggcatggtggtgcatgtctgcggtcccagctacttgggaggctgaggtgggaggattgcttgagcccaggagattaagacttcagtgagctgagatagtgccactgcactctagcctgggcaacagagcaagaccctgtctcaaaaaaaaaaaaaaaaagactggagaataatatttaaaagttcatgtattaacatcgggccttatcagatcttatctggtcgtttttcttttctttttttttcttttttgagacagagtctcactctgtcacttaggctggagtgcagtggtgcgatcttggctcactgcatcc

SEQ ID NO: 2507 - DNA, 4001 bp, Homo sapiens
ggctgggatgacaggcttgcgtcaccacacccaactaatttttgtatttttagtagagataggggtttcaccatgttggccaggcgggtctcgaactcctgacatcaagtgattcgcccgcctcagcctcccaaaatgctgggattacaggcatgagccactgtgctcggctgagttactatcagtttattaattccttggtcaaacggcccagtagtgtggaacaagacttataaatttgttcacaggtttgatttatgtgggttaatttgattttaactcaagaaaatgtttcttgactccctcctgagaatgaattagtattacaatatggcactggttgctatgcttaaatcagtatagatccattacagtgctggccaatccaaacaccgtatctagagggcctccagaatggcacttttcctgcattttaaccagtattcgttagcttataaagggtttagtctataaagcagcaggggcccagatttctgtgcagctagttgcaagtaaaggaaagtgtttccttaggggcagttttgttctgaagtgaccttccaaatctgatgtataaagtgaggcctacagagtattgtgaggcttggagtttttaactgttttattaaggaagacttttttttttttttttgagacggagtttcactcttgttgctcaggctggagtgcaatggcacgaggctcattgcaacctccgcctcccaggttcaagtgattctcctgcctcaggctcccgagtagctgggattataggcatgtgccaccatgcctggctaatttttgtatttttagtagagatggggtttcttcatgttggtcaggctgctctcgaactcccgacctcaggcgatcctcccgcctctgcctcccaaagtgttgggattacaggcgtgagccaccacacccggccctaaggaagacatttagtaaacaatatatgctaatgtagaaagctctgaaaatatggaaaagtctaggtaacactaaagtctcctatagacctttttaaaggactcgaaccagtaggtgtcttgttagactcagctacctagaacagagtttaatgaagatgaagagatttggcttttcctggatatgtaaattatgtatatatctaaatttcagtgagaaaagtctccaaattcatcaaaatcaacctcttcaaactttctcatcacactcactatatggagagcctggaacataaaacggctgaatgagcaaggacagttggggtcatccatcagttctgagctaggccagttctgacctcagccagcccttaagggaagggaggtcctactaagctatttggggggtgggtggtattgggagttagccatgacccacagacctctggttccttccttcagtgcagctgaaagactcagctaaaccacctaaaaaggaacgcaaagtgtgcacatctctgatacctcaggatgccttccaccccacctttccccaaatgcttgtccacattatagggagcagcaccctccggtacccaaaaggcccagctggcatggggatcacatgggatgcagaggcactagagaggcagagccgactctccattcggtggtagcaaatttcacctgtggggaagcccaaccatcccagttcccaccaagggcccaagcccgtgtctggaagctgccccctacacccaaacccgctggccagagcggtggacccgcacccacctgaagcacacatgcccagtagtagcccaagtagagggcaacggcaagagccaagagcagagagaaggtgtctgcccaggtgccattctgggggctcaggaaggagctcagcatcttgtgttgggggcttccgaccctcaggctcctggctggccccagttggccggctgtaactcgcggtcccacccgccgcccgccataggcggcctgtgcaggtccggtccccgctgcaggcagtttgcgctgctggccccgcccaccgccggtgccccgggatgggcggcgagaggcggcgctagttggtcgcggggctgggtggctggtcgcctagtgcctcgcgcggatctaacccgagtgacctgcgaatggcctcccgccctcccctgccttcttcccctccgcggttcttggctgtgcagcccgagacaagcggcctcccccagctgccatcttggtgcggggcatctccagctcccttaaactcttccccggcgacgccccgagtccagcagcctggccagagtcccttaggcgctcgcagtcagtcacgcacaggacacagctactcctgcagtgacattctgctctgtcacacactacagccattcacagtgaccctcaccagtcactgtccgactgtgacaccccacactgtcacaaagctttcagctgctcagtggtggcattgcaacacatgcaccttcctgcagtgtcactctgcattgtctcatacagtccctgccacacagtcctcgtacagtagataatttgctcaccacccgccctgtaccaggcacttgatacagaccccccatgttactgtccgtgtcttcattgaaatataggaggtcgtctactaagagtagtggctttcaaccttgactgcagatcggaatcatctaggatttttaaaactaccagtgcccaggccctacccccgatacagttagtctggagaggagcctaggtatcaatacaccgtaaagcttctaggaggtccacaagtcatcagggcttaacatggtccacacaagagaagtaccagctgccatgggagcactgcggaggtgcccggacttcacgcgagggtgttctagcagagggggcagcaaaggcaaaagcctggaggtgaaggatgtcttaagggaacaaagaaagttggtgtggctggagcatgtgggtggtcaaggaccacataattgctgcagtttatcctagggtcagaggaaagccatccaggggttttaagaagggaagggtgacatgagttatgttttaggagaatcattcagttgcttggagaatagattggaggaggaggaaagtagaagcagagaggccactgggaggctgctaacagaacgccaggctcaaaagatgcccggactggaggatacccaggagaggagtgaagatcttcaagatcagtggcagaattgataggacctggtagtagattggaggcaggggaagaaggaggaacatggatgacctccaggtttctgactgcacagatataaagtgtccatccctgggacagggaaacagaggagaggaaggtttgaagaggaagatgatgcatttagacacagacatgtagaagttggggtgctggtaggtgttttaactgtgtttccttaggttctgtatttgtctatttggcatccataaatcacagggccaacctaatggccaaggttgtttacatctcccctacaatccagagctcacactctgagcacttcctttctctaactttcacattccaagccagtatctcccctgccctaaatcaacccaggaccaggtaaccaggacctgtccctgtgccccagagcactctggaattattcaaactagccagtcccaaactgcttctcctgccttactgggagaagtaaaccccaataaaggcctgtaccttcccttcgcttctttctgcctcctgagtgacactggcacttccccctgtgaccgtgccttttgtttctaggggaactgcaaataacattaagcttttctttcaatagcagtgacctcttcatgtcctcactcagccacctttataaattaaaactcaggcacaaattagtaggatattcaatgcctgaagtggcctggggcttagagattggaggtggagaattggcaatcatcagcatttaggtggtgtattagttggcagtttgctgtaagaaagcactacaaactgggtgtcttaaaccaggggtccccaaccccctgggctgcaaattggtactggtccatgacctg

SEQ ID NO: 2508 - DNA, 4001 bp, Homo sapiens
ttcgaaggaacaggtttatacagtggttcgggtcattctcaaatacaaatgttgtctacaagataacagtatgtctaatcaaacaaaatctcacttccgcgatcaacaatgtggccattacaaaatttatgaacctataaaattgtaacacctgttttttaaaatttacactaagacatgaaaatgctttcctatatagctaatgttaagaaaggtgcctcacgcctataatcccagcactttgggaggccgaggtgggtggatgacttgaagtcaggagttcgagaccagtctggtcaacatggtgaaaccccatctttactaaaaatacaaaaattagccggctgtggtggcgggcgcctgtagtcccagctactcgggaagctgaagcatgagaattgctcaaacctaggaggccgaggtttcagtgagccgagatcgcgccactgcactccaacctggactacagaacgaggttgtgtctcaaaaagaaaagaaaaaagaaggatccctggagagatggaggtgggagcaagaaaaaaggaaaaaaaaaaagactgtgaagaaacagtttaacatattgcttccatttccatctttatcccaagagaatttaaacgggaaagaaaaaaaatggaggcagaacccataattcaaaataaccataaaaaaaaaagcaaaagattttagattttgcaaactgtgccttttaacctgctatcctttcaagtaatttttaaagaaggatttttttaatccacagaatattttgcttcatccaggagcagctggatctcataccatccggtatcccccgcctccatacacacgcccctaccactatcagcccttgagccaaacgatccatcacggtaaaaaaaaaaaaaaaaaaaaaaaattaaaccaggaggttcatcttcccaattctctctaagaaacagtcatagtctgtcctcctcccacccccaggaaaactgcctattctaacagaactaggagggaggggggaatcagctcatcatccttctccatagggaaaaaaatggcattaacttccaacaagaaactgctgctcttctaccgtatcccctttagaacataaaatattaagaaagggtttctgaagcattcacaggaacagaaaactgaagcctgaagcacttcactctgcagcaagataaccccttaaaaatcatccagaatttgggggatggaggtaacccgtcaacacccgcgacacccctaccctaaggtggggagcaggattccgtcaaacagaaaatgccactctccgccccctccgccatccggaacgctgaccggcgcggagtgcgggggcggccgagggcgggagcggcgaggaggcgggacgcgacacacgcaccacgccgagaactgcttcaccgcttttttaaaggtttttaaaatgcagtttctccagccggagaattcccacccattcaccagccccagccctcacccagctccccacccccatcgggggctccgctgggccgtgtccccgaggcggcctcggccccacgccccgaggcgcgcggcccccggcgggggggtccccgacgcggcccagctggggatgcttcgcacctgtatgtagttgttctcgcagtaatcggccacccgttccagatttgtgtagctgtcgaagagggcccggcggccccccgggatttcctcttccagcagcatctgcagctccgccatcttcacatcctcctcctcctcctcctcatacaggtcgcagagggagcggcggccgcagcgccaaggaaacccaggaccgggagaggaggagcggcggcgacggcggcggtaactcggaaggagcgagaaacagccccagcgcgcgacaggggagggggcgacgggggcggggcgcgagccgacggactccgaggacggtcaccgcggcgacggccggccgggcgcgcgcacgcgcgctcccttccctccgcccccgggagcccgaaaaagattcccaccctcgcccgcgccgccggcccctcccccacttccggcgtctcctagcgacggcgggggtaggggccgggatgcgcgcgggagttggtggtgcagttaacccttccgccgcccgcccgccgctggagcggctggagaagcccccacctcccggcggcctttgttagcccggcgggaacacaccaccctgctcagctggcttcctgccggctccctccgggactcatctcggctccgtccccatggaggtcatcggcctagggaacttctcgaggcttttctccctctgctgctgacgggaggccgaaggagggcacagcctccactcttgggaccctcctctgtgaaagatcacacctcaacagggcaggaataaaacttccacgcagctttcaatgccacctgacttcatttttctcagatttgacctcatcctctttgttgcagtgaattgcagtttcctaaccccagctttcctgcgcccctgcctctttgcacttccccactaacgctgttctcccctgccagattagcccctttctctcctggtttgcggtgccgtgggcctcagctttttatgtttgccatttctatgattcgcttcctcactcataaccttttctgtcatttctctaatgctatcaacttcgctgtcctttttcctattcatggattcagtatttaaaattttgaaaacgattttgctagtagtaattgccttcttcacagggctgttacatagataaaatcaacgtttattgtgaaaataccttgaaaaaacattaagtgctacaaaaattcaaggcagataattttcctcttgcagagttataattctgtttttattctccagatactgtgtcttgttttcctaaatcagactaccccacacaatgtaatctggaaaaactaaaactcctgaccattgctgagatatgaagccatgacctttatttgtgctgtggaaaatcaaagttgattccaggcagtaccatcttagacttgtgtagttagaacaagatccattgtttcaacacttttcttaatctggtgatctcttggccctcctacagtgaatttttttcattcagatgatgaggaaacttatactttcaaaaaaaaatcactttaggacgggcgcggtggttcacgcctgtaatcccagcactttgggaggccgaggcgggcggatcacgaggtcaggagatcgagaccatcctggctaacacagtgaaaacccgtctctactaaaaataaaaataaaaaaattagctgggcatggtggcgggcgcctgtagtcccagctactcgggaagctgaggcagaagaatggcgtcatcctgggagaagagcttgcagtgagcggagatcgtgccactgcactccagcctgggcgacagagcgagactccgtctcaaaaaaaaaaaaaatcactttaataccatatcattacaaatatctggagcaaaccctaatgttatattggcttcatgatacatacattagcagaatgtatgagttttcactgtggaacctaaattaaaggatattgaaaatgttggtctagtccaactagttttattcttaagcactttaaccatcttctgtagtagtggttctcaaacttcagtgtgaggagcttgttaaaaatgaaagctgcagggtcacacacactaagattcattagtttgagagcatgagtgatggaaatgagtagttatttaaatgacacatcaacttgcttcagtgaatacgacatatgaataatcaagtgaataaaacaaatgttagatgaagcaaacttttctttcagactaaacttcaatagatcaaaaaataatgttgaagaagctcatcaggtgagttaaatggtagacagactcttcccctatcattacttattcccacccagcattttttcaactatggcttagcaattagcctaataaacaaatttccctctgggatgtttcgtcattctagaaattacctagaaaaga

SEQ ID NO: 2509 - DNA, 4001 bp, Homo sapiens
tgattgtacaactatactccagcctgggaaacagggcaagactttgtctcttaaaaaaaaaaaaaattcatctatttcgtcatttaaaatcccattgattatttccttcaggaggcctttcccaactgaaatttaccttacactcattaaaacgcaccaatttttttttaacttaagatacacaatataacaagcaataaatgatatgtctgcagaagtttgtataaaatgtgaagaaacccttataatggcaaattcagatttcagattaagtaatattaaataagaaatctctctaaattggtctgacaaattttcaaaaataccatatctgattttattatctggactatatttggtctagttatacaaatttgctaaactttagactctcaaagatggttagttcatttgaaaagagccctgaactctcaagacattaaaaataataataatatgcacatttaaaaattattttcattccaaaatagttctaatcatttaggtctaaaaagagtgttgaataataatcattcaaatgacaagagtgctaaaatagaacatttcaaagatctattcaaaaaaagggaggcagaccaaaacctttatcatttttatattttttaaattgcattttacaacttaattggtttttcactgcagtattattttaaatggccccaaaatatgggaatgattatgaaaggtacaacatatacacgcaacattatgcagccactgagaatgtttatgaagaacttacaacatcaagagattatgtttgccttaacgctaagttaaaaaagcagaacccaaaattttatacctattctataactgactctattataatcctggctacttttttttatttttttttggagacagggtttcactctgtctcccaggctgaagggcatgtcataatcacagctcaatatagtctagacctccgcatgctcagatgatcctcccaccttagcctcccaagtagctgggacaacaggcgtgcaccaccaaacctggctaatttttgtatttttggtagagaacagggttttgctatgctgcccaggctggtctggaactcctgggctgaagcgatcctcccacctcagcctcccaaagtgctgggattacagatgtgtgcccagcccacagttacatttaaaaaaaactacttacaggaaaaaggattacaaggagatataccaaaatattaacagagaaaagcttgggaagtggtaaaatggtttatttttctactttttctcttctttttctgggttttcatgagtatggcttttataatgaagacagattaacattttttaaaaaacttttacaagcccatgaagtaatacacttttttttaaattatatataataaaaataatttcataaggtttgctagtctttccattattgcaggtatggtaccatcccagtaaacataaatcctaccaaaagaaaaaaaaatttttgaacaagccaccaatctatcaagtttatctttttaaattgataaagaagtatgaaatttgttttaaaaaaaaaaaaaggcgggggaatggatgaagtttcattatagggctgattatgttaccatgacaactgagttttaataaaattcattacgatttactttcctatcaaaatcacagagaagataaccatcccacaaaaagacagaatctaaaaacaacctaatattaagttgctattttccaaatcgtacatgtgagttaacttacataataaaagctgccagcattacagatagcctgtgtttattattaagggttcctcataggcaaataggaaaatattgtggtctcacttgtgaaatatgattgattgaagattccatccttcgtagctgggatgcctggatatccagcatctgcaggacattgttggccaaggtgtttatcagataggcaacacttgctaaggattgggtggtgtaggctttggtttcttctagggctctctgcttatctgctgactgggaaaaaaaacaaaccagtgatcattaattcaaaaataacccatttctagcaaactaacctaccaaaaaactcatcacaacgattctgctgagtccaccagaaagtaaaaaaactaatccaccagaattgaaaactactggtatcacataaaccccaaaccaaactattgactgaactcactaatgttttcatgttgaatagacacatctttgcacagatgcaaataaaaccctaaagccattatctagaaaatgagatccaatggacaatttgagcagtggcagcaaagtatatattgcttggaaaggtagcactgatttgaacgtataaattttgactcactttcttctgcttttctgaattcctcttttcctttcactctaatatgtgaaatgtggccataacataatgtctgattaaagtgataataatgtttaaccctataagagcatccaggaaaaaaaaattttaagaaaaaaattataaataatatgataaataaaatggtaataataatcatgataaactaaaagtaataaaaggatccttccttcccaaacattgtaagtgttataaccctaaaagatgtaaattgccatgttgcccaagctggtctcgaactcctagactcaagtgattcattggcctgcctcagcctcctgaagtgccgggattacaggcatgagccaccaggcccagctaaacattaagtaatttttaaaataaattaagttgacacatgcagttagactcattcttcttttccattttaaaattaagatttctatccattaatgatgtctaagaaatactatgacagtttacatatgaacatgaaaaaaccaatatggaaaaaaacacaaaaagtaaaaaaatttaaaaaacaaaaataaacaaagataaaaatacaaataaagtcctgtaagcattaagataacagccccggccgggcacggtggctcacgcctgtaatcccagctctttgtgaggctgaggcgggcagatcatgaggtcaggagattgagaccatcctggctaacacggtgaaaccccgtctctactaaaaatacaaaaaattagccaggcatggtggcgggcgcctgtagtcccagctactcaggaggctgaggtaggagaacagtgtgaacccgggaggcagagaaggcagtgagccaagatcatggcactgtactctagcctgggcaacagagtgagactccgtctcaaaaaaaaaaaaaaaaaaaaaaaaagataacagccccagaaaacacgtagcctgagagagagaaatatttttcctaatcttgatcccagagtaacaaaaaataaaataaaaaaaataccaacacctcaagggcttcaatatttcactctgaagttttacaagttctgctacatttgtagctttaaattatacaataatgaaataagaaaaaggtacagacaagaatattcatgttcatgaactcatttaatgatgaaagagaaaaagcatgaggctgactaaacaatacattcatatagtacattaatgcagtaatttaaaatggtattactatgcattactgctatgtaaagatatctacgatataactaagtgaaaaaaagctggttacaaagcatcttgaacataatcatcataattctgtatgtgcctgtgtgtaaatacaagcacaaaaaaaagtccaaaaagtaagctccaaaatgataacctaagttttctctgaatgttggaaataaagttgatttgtatttttaaaatgttttcagtatggcttaatttttttttaacttgggcatgtattacttccattatcaaaaggagtaaagcataacgctggccaggcgtggcagttcatgtctgtaattccacaacgttaggaggctgaggcgggagcattgcttaaagacaggagttcaagaccagcctgggcaacattgtgagacctcaactccacaaaagtttagaaaatcagccaggcatgatgg

SEQ ID NO: 2510 - DNA, 4001 bp, Homo sapiens
cccaggtgattcctttgcacattaaaggtaaaaaagctgttacaacaaaactgtagccccccagcccattcagagggtctctcaggtctccctttttccagtgttctctatttgagggtagattttcttgccatgcttcaatcaaactaacttacgccaatggataaaacagaagcagatatagttatctggttatcttctattatgccagacattaagggagttgtaaaaatgtaaaacaatgtcactcttttcactttttttctgtttaggaaaagttatttttcataaaaactgttatttatgttaacatgtaatgagcttcttattgtaacttttaaataaactaaatatctgtaaagtttctcagttatgtagatacctttcgataacgacagacggatagatataacctacataaacaaaagtcctttgaggtcctgtttaagagcataagggagccctgttatcaaaaagttttgaggcagcactttgggagaccgaggcgggcagatcacgaggtcaggagtttgagcccagcctggtcaatatggtgaaacccccgtctctactaaaaagatcagccgggtgtggtggtgcgtgcctgtagtcccagctactcaggaaagctgaggcaggagaattgcttgaacacgggaggcggaggttgcagcagtgagccaagatcgcgccactgcactccagcctgggcgacagagtgagactctgtctcaaaaaaaaaaaaaaaaaaaaaaaagtttgaggatcactgtcttataatgttccaaggaagagttaagtatgtatcctaaagaaaagtcaccttctcagtgacgtcttcccaaatctccccaggaaaagtaggcattttgtttcatagctctcaaataaaattagagtagcttacaccaatgctgtcattcgcaaatttgccagttccttcacccttattaaataatgaattctccatgcttccaatttgtttacccagtgaatagattttatgcatcagacagtatctgaaacttttgatcatattataaacaccaccttagtagtcactgaactacttagactctgtcttcattaatcctctgtatttagttagatttgttgatatatctaaagctaatttccttgtttgatggaaccctcgccaggtcatttctagcccagtttgtcctggacaattctggtccgcgccgcagcccgggcactgagtccgggtcccaagttcactaccgcgcggcgagtctaagccgtggggaacgccgggttcacagctcgaactgggacacagatcgcagcccgcgctcctgcagccgggcccagggggtgaccacctcctcccaaaacgcaggctcccgggtcccactgcaggccgctgaactagacgggttggattggggctccggaatgaacttctggagaaatctttcggctttccccgacgtgggctcggcggtctgttctcggggcggcacggctgacacccctttttcctccgcccagatgctggttgcacccagtccgcgggatccaggaaaggaggccagctctagcccggcgccggagttggggagcactcccagccgcgcgcgcaccgccctgcttcaagccagcgacaggagtgactcgctgccccaccccacagcctcccggcctgcagccgcggaagtcccggctggcactcaccgcgcggcgggcagctggcgcggcgcacggtggccgcccaggacgcgtagggaccctcggagaaggcgtgcggccatgtccgaaacacaggggcggcggggcgacggaggcgactctgcggctactcggcgactcggggcagggtccccgggagggaggacgatcagctgaggcgtccacctgtggtgtcctcccaaaaaagcgctcgcgcgcgcccttccggagccccaaccacgccacaggctggtcgcgagggaatacgcccgtcttggctgtcagcaataggattttacagcgaaactgctgcctttgcttgcagcattctttcttgtttatcgaagcagctctgagcctttttagcgtcctgaagcgctttgagtaacggatgaaagctatggagcccccaaatacgcgcaaatacctaaccataaaaatgtacgtgaagtttattttgtaaccttggaaattgatttacttaaagtaggctgaatagtttgagcaaacccttgaaggtgatagagttagccaggcatagctctgggagcccatgctatttattggtaatagcaagtagaacgaattaatccgacacaggatttagtagagacaggatttcaccgtgttagccagaaaggtctcggtctcctgacctcgtgatcctcccgcctcggcctcccaaagtgctgggattacaggcgtgagccactgcgcccagcccgttctgttaattcttaaatgtccaagttcaagtacatccgttgaacaattactctcgccctcagtgacatttcaactaataaaagcatgccctgtagaactctcaggtaaaagatgtgaaatatccctcaagggaaacataaatggctcaaagggttcatgaaatcctgggtgattggcttaaactatctgggtagtttgcttgacttttcatttaattttagcacagctaactctacattcataaacatatttgttcttacttcacaaaaggaaactcagtagaaaaaaactgataaacatgctaaccaaatgtgattcaaattaacttcaccaagaatggaacaaactagcattagagacacctgtattgaaaggaacaccacattatttatatactgttgggaaaaaaggctgagggttgggaagaaagctgaggcagggcttgcatgactgacataatgtcctctggaatgtgtctagacttgctggctccttgcttttagccctcctaggctcctattcccattatctcaagtagcagaacatgttccatacaaatgtaaacctccatttactcacctgtaaatgaagaataacaatatctatgtcatagggttgttggaaagatttttcagataacggaggtcaggtggttggcacaaagacaggaatacaataaacattcgataaatggtaattattattgtcatcattgagaaatactcatattttgtagtagataaaagaaagaacaaatcctttaaaaaaaccctctactttgtgtattccaatgcctattcaattagaaggcaaatgttcaagaaaaggaactgcttatgcttttcctctgatacctggtagtaaatgtcatggactacacggtcctttctaaaccccatgaaaatgccagcttctttaacccaaataactgcctgtgtctgtatctgtatctgtatctgcctgtttataaatgtataaaaagtgagtgattagaaattatatatatatttttatatttggtttgaagaataccttgatgacataattgagaaactgaaattggcatctgttaaatgtgtctgaaatattttcttttcccttatagaggacaatggtctcaaaactagttactgttttatgttttggaacattttctttaaaaaaataaatagcaatttaagtatctgtaaccaacaattttgacagtaaactttattgtcaggattaagaatggatttgtttaagcttccaacttcaaaccctaatctgcttctaaattgcttctctatgagccatacctataatataatatgaccaaaatattaatcatacacatttataaggaaaaactgctcaaagtaaaagaaaagttataaaatttatcttctagggctctccttttttttttttttatagtcattgtatacagagctcattagaaaaagtatttatttatttcccctggtgcaaagcaaaacttatctaatcaaatatagaagtgttgcataagttttagtgcattacagtcttagactaaagaaatctaagcatctgtaattctgtaatatagatcttggacaatgtca

SEQ ID NO: 2511 - DNA, 4001 bp, Homo sapiens
tttccctcacgtcgacttgaaaacaggagctctcgccctaaaatgatcacacaaaaagccactgttcctgattaagcagggttttttgttttgggttttttttttttttttttttttttcattcagaaagcctatacttggcctgttctgggcctgattagaaatcataataccttctcaacgcttcaacgacttgctgttaatacggggaaaacacacccccaaagccctgcgtgtgtcgcacaggcatgctgccttggcgatgctttatggaacttttttaaaactacgtctgcaatgtctgccccttaaaagagaaaagctgatgggcagcaaactgcagccatttctccatcttccttcgctttcccacccccatcctgggcagctttcccctccccccaatctcctggaggttgtggcattaagctctgcagttgtgtgcacattcaagtgtttatggcagagactggggaaaaaagagcaaattgtttccaagctagagctcccatgtgcaactttgctttagaaaagactttccatctggggaaagctcatattctgatgaaagaagggcaagcagtttatccatttaaaatctatggaaagttaaagcacagaaaccagcagcctccactttctttgctaggcgtgcctagctgatgtccacatttttcctggaataaataaagggacactaaaagcagcatctgcctttaaaaaagaaaagaacaaagttaccatgttgagactttgcagactgaagtttcaggggatgtcactgcaccaaatacattcaaagggctgtaaaccatttaaggaggctctctcccacttttgaaacactaagtaatcctgttgtgagcaaaaggaaagaaagaaagaaagaaagaggaagagagaaagagagacagccagtctgacttttacaacttctcattctccctggaagttacaagtcttggctaaccacccatccctgacctcactccaaagttctctcagtcactccttgaatctttgcacatgccaacaaaattgaacaaaatccacattttacctgaagagtatatttaaattgcaaaatagtagatttgtgtgtgtgcttcccccaaccccaattgaagttggacttaacaccttctaagagaacaatactcaaattagattagcaagcgtgccatcaagagaagagaagaccgggctgtgtttaacattcacgtttatagcttccggacttacagactctggtaaatcccccaaagtactgaattcaaatacatcttggactcacaaagattctcagcagttttctgctccatttaaggatgcctcttaataaagtgttcatcattctggaattacgtatttactgccaattttatctgtttccaaactgatatactagaagcaaaacaggtaaacagtgggtgccaagctaatccccatgccaaattggtcaggcagaatggatagtctgtgttcttgcaaagttcccctgcttactggagcttaaatagccacacagcaaataaacaccagattcctaaatacacatggaaatttccttctgcaagtgacttaagaaaactgccctttgctttctgaagagaaaggtgaagccctccgaattagcaaaagcactttgcaatgcagctgcgtgcagcctgggttttcagaaaccagacccgcagactcaaaagcacccatctgagcgattttaaagaaggcctttgaaaagaccacttggcttaagagcagaagccgtgccttctttccgagcagagctgctgcccgagcaccgtttccttacctccgggctggctgggctggctgggctggctgggctcgctcgccttcctggctgtgctgtgcgctggctcccttagtgctgagcactttgcaacaactgtgagctctgctggctgcagacttgcattatatacactgcagaaaggagcctctagcctctagatggcagctttgtaacccacatctctctctcccccgtgccacccccatcccacaggcagacacacacacacacacacccccctcttgtaaacctcactagtctgttgtttcctgcacaagtgtactcttgggaaaccccagccttctttcatttgcaaaatctggtgaagccacaaagtccaaaccccacggggggaaaacgtcagccaaagacaaactgcaaagaaaccctagtgcttggcaaaatcatcaaatatttatctggtctcaggtatatcttgaataatcccattaacaccaagagctcctgtgaatgcctcttcgctctagggaggactttgttcccaagacaaattactctgaacttctgaacttcgatgttgatttactaagcctgggttttccttgttaattcctccaaaacagaagtaacagttttggtatgaccaatgaatcgatgccacaccgtatatccccaaagtggagaaaagagtctttataatagattatacttgaatacttttatttgtaaaggactttaagtacaaaatccttgagactctaatcaagatagtattctacagtgtctgcccagtgccagacacgcattaggaagataataaatgccttttgataatgtctttttctgagatgagtctggcaaacactttactacaattattgcaatctacattcttatttggatgcgtattgctaaagttccccccacggaggaattcaacctaaaaatgtgatccaggtgatactcatctccaatgccccatttacaaaaatcgtccataagatagggacccaaaggccacccgccagcccatcccatgtgcaatgctctggctttcgtattgctttctgatctcctggagttcttaaagagcggctcaagtggagtgtatgaaggcaccagctgtattcacgccttctccagagctaaaacttttcgagattctttttatacttctactaaaaataacagcagacgctcggtcccagcgctgaatctgggggactgggaggtcaaagtctcacgtggctagaaagtctccgtgtggagaaagcccttaacgaaagaaatattttgtttagctaaaagcttcacatttttctcctgaactggctgcccagcgggaggcgaggtgcacacctgctctccgggggcctccggaggggtcgccctggggccggcctttcccagcccgagcgcagcgtcccgccaccgcctctgcagggcggcgcaatcactcttcgtgtcacatcggcaccaaggacatctccaggctccccagagacgctggaaaggaaaactgccagcggctgcgtctacccacacccaagatctaggcgagacctcgactctccacagcatacgtgtcctgactttttctgtcctgtttctttcttgtgggggaccctgtgtctgagcccgctggaaatgtacggggatcccctctggactgcagctcggtttccgctttctgtggctgtagccgtgactccggggcctgtccttcagagaacgcgctccgcattgcagagcctgcgcgcccggtggaaacacagagtgggtgtcaatccgttctgagctaagtgtactgtcgctggaagaaaggccacatgggccggggaccccggacaggatgctaacgtagaggaaggaaaaggcaacgcagtttttttaaaaagtagaacccgcttcgtgcgtccggggccagaatccacgaggccgccttgcagcagcctgcgccctgccccgccagccccggccccgcgcccacccacggcctgcacccagccccgcacccacacacggcctcgcgccctcccacagccccgcgccctgccccgcacccacccacggcccgcacccacgcccttccccgcgcccagacttgttccgcactcacgcacggccgggcacccggcccaggcgcctgcgagaattctggccccggggtcaccgccctcgcccttcgacgtcccccacccgtcccctagttccgccgggcggg

SEQ ID NO: 2512 - DNA, 4001 bp, Homo sapiens
atggtgccttcttgctgtgccctcacgtggcagaaggggcgaacaagcttccttgggcttactttataagggcactaatctcatacatgagggctctgctctcattacctaatcacctccagaaggctgcatctcctaataccattgccttgtggatgagggtttcacctgaattttgggggggacatacacattcagactgtagctctctctaagcctcaaaatcctgtctgcacaaggaggtgtatgccctggagcttggagccctgcttggagggtcgatcatgctagctagctttctcagtgggatagtacaggggggcgttgtcctctagagaccaccgtggtggtttccaaagcatttcatgtggatattctttcatactcaaatagagaaaaaagctgtaacagaggaattagtggttttttttttttttttttttttttttgctaggtatagtttatggctattttaaaataccaaatactaaaatttggatttttctaaaactctcagattagggagtataatctattgcttccattacctgtatcacaagttagtcaatgtgttcattgcatcattcatcaggcaaatactcataaatgaggggtagaaagtggtgggcgccataagatgtaagaaactgcatgcagcttctaaacaaggcagatgcactcccacaaagtaactggtgcattcccttcatgaaatcattaacattgtgaagtggtttacacttcagtaaactatgatgaggacaacagcactcagaacagcatgttcctgtgtaaacatgtagagtccttttaggaagagcaggttgagaggtttatcttttatcgttagctgtgcataggataggctttcaaagattttgtttttcaatccacagtttctaccacccctcttacctaagataccaatggacaaagaaatacttaagataaacattcttcaatgagacaactatgagaagaaaatagtttcatctatttgcacaatgaaccacatttaattcaagtttgggttaattcattttccctcacttgggataaaaaagttgaaacattatcggtggtgtgaaagtactggcagaatgctgaagattgggtaaaacctgatattaagcctgaacaaacctctagccaattttacatttctttcatgttcctcaccttcctctttttatattcattcaaaagttcttaatgacaaaaggaaatttccatctttagagaaacacaaagaatactctcttaggagatgtcactgtgcaaaagcttcatgtcatttattctcgggttttttgatgtacctacttcctagttcttcaggacaaagatttatagaataaagaacatcaaacagtaaaggtttcaggcagtgtcctaaaatagactaaaaaaattcacaaagctatctcttggtgcttctaaaacttattttaaacattttggaaaggagatatattttagaagtccttgaaaccgatcacattccatttttaatggtcttctacttaaaattgtaactttaaattctgtagttggcatgtatcttcccagcagctgaatatgtgatttttgaaaaggtaaatctgccttatttaaattgtccagatattttaaagaatggttcatttgagggaaaaaagggtttctgagaaagcacttatttctttaatccaatgttatttcaaaataaatataaaagtcatttttaaaagctagaaaatcagaactaccaaatgatttaaccccctcgccccccaccaaagcagataaactagacatctaattccacaaagaagagaaaggcattgagaaaccctggagaagtttcagaaataattcagcaaattaattaccattaccttttttagatctggccattcttttggtagaatatgactatggatgtcaattttcatctccacaggatcagagaagcatgcaaggaaagaagttttgatatcaagagacctttgtgaaaactgtggagttaattgatttacttagtccctttacagcaaccttcaggcagcagtcagtaggcctgcccaacccagtctaggtccattagaactgctttattaaagttcaaagttctgtttatttgttaaccaagctttggttaaccaagctttatttgttaatcaagctttgggtcaacacagtttggtagtcaggactcttggcacaaaacttaaaaaaacaaaaacaaaaacaaaaacaaaaaaacaactgtactcaactgtatgaggtcaaaagcacagcaggatgctttgacttacagcaggtcaaaaattgactgatttttcattttaaatattttaacttagttgtacatagttaataattaaatagtttgtagttaaaaataaaaccatgcagagggcttttacagaaaaaggatagatccctgactcaccttttcttacttttccttgcactattcagaagcagccagtttttatgattttgctttttgttcagttagttactcccatatctttaaataatatttaacagttgtcttgttcatgaaaatttaacgtgttgaaaagttatggggaggtttcacattttaaatcacagaaagagtccactcttcatatatgttttttcctccagtgcctttgtcttggactcattcattcatgcatttttttccttttttttttgttttttaatttgagatgcggtctcactatattgcccaggctggtatggaattcctgggctcaagcaatccacccacctttgcctcccaaagtgctgggattacaggcgagagccactgcacccagcttcattcatgcatttaacaaacatttatggagaactgctatatgctgacgatgtaaggttgactgagagaaagatgatacatatcctaaagtgtagggaaaagaagatagtagccatttccatttagcattatcagagcagtcagggagggcttccaatatagcagaaagtggggcttatatggtcatgcctctaaagagagcctggaacaaaacagcccttgattgttctgtgtttaccctttcctcttcctgaacagcttaaaatgttcaagggaccccaggtcccctggcaaacccttaaacctgccttggttgctgccttcagctcagactccacaacacataaattgagtagtcaaaaagcttccttctgtaattcagctagattctggataaattataacagacagcttgaaagaaaataaaggaaatccttgaaatccatttttttagaagttcagtgagctaaaactgaatgagtaagccttaaactaacatggaggcacttgctaatactgagtaagtaagtgcaagcatttttagagcactcccaatgggccaggcactggtccatgaattttaataaagtcggttcacttattactcataacattcctgtgggggaagaactaggaccaatattcattttatagaagaggaaactgaagcacggagaagtaccttgttcatggttacacaatagtgtgtgggagaactggaattagaatccagaaaatgtggcttcagactcctagagatttcagggttaatatcccacaagggaatgggagataataatatgggcttgtacaaaactgaaatgccctcattacactaaaagtcttgaaggatctagaccctcagggaaaaagtagtctaggaaaaaaatccattggccaaaaagagggagtctgtaatgaaacctgtcttcactatgaggggaaaaaaagagaagaaataacaattttctctgagaatttctttgagaattactattcaaggtcacccactaagattttagttaaagtaccactcacctacttcctcccaccctgtcttagtcaatttagtgttgctttaatagaatacctgagtctggataatttataaagaaaagaaactcatttggctcacagttctgctggctggaaagtccaagaacattgcaccaggagctgtttggct

SEQ ID NO: 2513 - DNA, 4001 bp, Homo sapiens
ggaactctttgcactgttaagaattatgaggtcccagcactttgggagaccgaggcaggcggatcgcttgaggtcagaagttcaagaccagcctggccaacacggtgaaaccccatctctactaaaaatacaaaaaattagccaggcgtggtggtgggtgcctgtaatctcagctactccggaggctgagacaggagaatcgcttgaacccaggaggtggaggttgcagtgagctgagatcacaccacagcactccagcctggacaacagagtcagactccgtctcaaaaaaaaaaaattatgaggtccccaaagagcttttatttgggtgggttatatccactgatatttcccgtattagaaattaaaacagaaaagttttcaaatgtttattaattcatttgaaaataactaataaatctattagtgtattttatgaaaataactattttccaaaacaaaaaaagttagcaagaagagtagcatcgttctatatttttacaaatccctttactgtctgtcttaatagaaagcagctgtattctcatgtctgcttctatattttttctgctggaatactacacatcatgtggtctctggaaactgccactgtacattagtgagagaatgagagtgaaaaagctaataactttttttgtattactataaaaacagtttgtactcatgaaccgcctgaaatgctcttgggtccccccagggctccctgtaccacactttgagaaccataacttaaagaactatgtatgagagagagggaaagagaagtcggcgagacactgatggatatacccaccatcccacacttctcacttttcaactttcaaacgcccccaactccccactaggtaacctcagtgcaggaaccccagattctccaaggacagcctgacgttcactcaagccatctccttccctctcatttccgcaaaataaattaaacgagggctaagtgggcatggctaaccaattaatcctccacgggcacatactgacatttttaatagggcctttcttaagctagaactccaaagcatgcctccaactgggcttttcagactgcttgaaatgggtatgagaaagagagcccacaggagacacgaatgccgagttctggtcctgactgtccggtgactgaaccatctctctatctccagtgcagctcaagcactcaaccctctgcctgcttctcagggctgtcctggcatcggatgacatcgaggacctgagttcttcttataaccaaaccgccccgctgaagctgcccattccgcacacctgcactccgagggggtcctgtaagcctgtcccaccccgacgcccagacacgccctggacagggccactccatccctgtgcgcccatcccatcgcggttttctgtccccttctccccaccaagggtgggacatcgcggggcggggactcaagaaacaggttcaacaaaccagcaaggccgatcttccagccacacggtcttcgtagacaccgcgcctgtcaccgcggggcccagccctgcacccgactcttcgtgggggagggagctcgggaggagagggcacctctcagggggccgaagaggtcggcggcggccggctgcgcccacacacctggggaggggagcccgtcacctgcggcgaggcagggacccgcctctcaggcgcggcgcacaccccacctcgccctcgccagggcgttgtccgcagcgacgctccggggaccgaggggacacgctcggcggcttcgggggcgcgggcaggggcgacggccgcagcgcggtacctttgccggaagagcgggcgccgccgaggagtccgcgcagctcgttcttgaggctccagaagtcgccgtccaggtagcggtgcagggaggagtccccgagccccagacccggcgccggctgcatcgcgctcacctgcctctgcttctccgcgtggctggcagggccggcttcgctccgcgcctcctccagctcccagcaggtgaggccccaggcgcacgccctctccctctccacccctcccggcccgtctcctccctcctcaccttcctctcccctccctccccggccccgccctgccctggcttcccgggcgggaggtccggcgcgagcgggcgcttctacggtggcctccccttgcccttccgaggaagcgaaaactctaccctccagttatcaactgtccctcaagatttgtgagccgtaagaaacaagtactagacccctagaaagggtgccagtcacgtggacctgggcaccagaggcccggctgctcaggactgaccggctgacccactcagcagatctcccggccagccactttgcctgacccccacgacccaagatagcctggctccagctctggcccctcctcagctgtatctcacctcttccccgcactgggcattactgtgaactctaatatcacggtaatctaaaggcgtcccaggtctacagcactgcagtccagggtagctggaagctgcattcatgacgaggtgatcgaccggaacacgatactcatttcccaggacactcctttttttgttgtggctggaggaaaatgagttataacctaagtggaaaatgttccttcctttctgctccctaattctcatataccttgttgattctccttttaaatactcaaggaaatgttagccgttcccttccagaggctactttgctggggagatgatggtgtggtctgctgtcgtgaggttagtggatgccatctgtattcgtttccagtaacaaattcccacaaagtgagtggcttaagatagcaccaatttattctcttacatttctggaagtcagaagtccaaaataggacttacagggttaaaatcaaggtgttggcagagctgggttccttctcacagctccagggaaaaatgcatttccttgtctttactagctcctagaggctgcctgcatttcttagctcctggccccttcgtctgtcttcaaaatgcatcacttcaagctctgctttcatcgttccatcttctactgactttgaccttcttgcctcccttggacttgtttacatgggacccatgggaataatccatggtcaatgggaataatcttcccaccacaagatccatactttaatcacaccagcaatgtccattttgccatatcagaaacacactctccggtactagggattaaaacatgagcacctttggcgagtcattcctctgtctaccacacctgtgcagctgcgagtaataatacccagtcatccatgataaaaggggctttgttttctcacatcacaggaagcttggtggtaggaaagccccaggggtgaatttgatggctctaccctggggacccaggtcctttgcatctttctgctccaccatccgccatcctttctctatatgtaatcgttacctttttttttttaacttgtcttctaccagttgtaagatggatgctgcagctccaagcaccaccctgtgcaaagcagaagaggagtatttccttctatatcagccaaaatagtgtagtggtaacaaacaaccccgaaacgacttcacatacacttcctcaaatcttagggcctaaaaagacaagagtttatttctcactcatgctacctgggggttctgttccatgtcccctcggtccaggtcctggctgacagaacagccatgattgtgtggccacactggcttttaaagcttccagctggaagagacacacataacttctactcacaatccactggacaaagcagctcactcctgtctcgatgggggaagggaggtaccaccctggacatgcccaggaggtcaacacccaaaatcatctgtaagcagagctagtgactattcaatctgcccttctggtcacactctcccttccacaggcaaaatatactctccatccttccagggaagcagccaaagccccacacctccacaacatcaagtctgaggcccctgggggatacagagtggtccttg

SEQ ID NO: 2514 - DNA, 4001 bp, Homo sapiens
gcaaagagaagccataagcactacccttaagtaaaaaggtgaaagtttttgacttcttatggaaagaaaaaaaaaacttataccgaggttactaagatctacagtacgaacaaatcttctatccatgaaaatgtaaacaaggaaaaagaaattcctgatcgtctgctgtcttgcctcaaactgcaaaagttgcgaccacagttttaaatgcttagttaaggtggcaacggtattacatttgtgggtgtaagaaacgagcagacacatgttccaattgacagcaattgggtttggtactacccacagtttcgggatccactggggagtcttggaatgtatcccctacagctaaagtgggactactgtatatgcaaggatacacttccccattaacagcaaccatgatgcattatgccagcataatcgacaataccaaccaaaactatacaagggaatggaatattatttagtaaccatccttaaccaaactactgtttaataaacttattgatttcatcattcagccttcaatgagtcttaaaaatcaaatgatgcccactaccaatgtgaaacaaggtaagccttctaattcgtctttcacagaagttaacttctacaaaacctagtcagcgtttatcatatattgtcctaaagctgaaaacaaaatgaaaaataagccacagttattgccatcgacaaaattaaactcagctgggatttcaacagactatcaaataattatagtaaaatttgtgtaataaaagatgtcgataaggaatcacaccttttctgtattacatcttttactatattacacaaattatagtaaaatttgtgtaataaaagatgtcgataaggaagcaactcatgatctgggaaagcaaaggaggaaatatttaggtttgactttataaaataaaaaggctttccaggcaaaatgcataatgggcacccagcgatgaaggctcagtaagcatgtgaagtgctaccgaacaacgaaaggttctggaaggcagtgtcccgagggtgtgagcaggaaaaggtacaggagataaagtgaggagtctgtaaaaataaacagaaactgcaggaaatgcaaactcacagaaggttttaagtaaccggactactgacaatttaggccttcctctcagggtggaggcaccgaggaatataaccttgtagtgctacaccaaaggaagatccctgaagaccaaacggaaaataaattatgtttgaagtaaggcaagctaagtgttgaaattctaggagtgaaaataatttaagctggaaagttcctgaaaagccattaataaaatacactttcatttttcatgggccaaagttatatagggacctccaggtctcctttgcttggcttttacaatcaagaaacccgaaaccgtaaaacttcatctccctttaactcagatccctatctaagcatgggctaaggaaactagcaaacaaaacaatgttgtcataggactcaggaggcccctaagagaccacatcagtccgacaacctccaggcctacctgggcccattggaggggaacgagagggattctagtagtcgcaaagaaagtaccttggcttgtaggggctgtggctgcagatgccaagagccccggatatatggcaggcgcgaggggacccaggtttagcgggcaggctgggcgggtgcacggggcggatggggaacaggggcgctgcggcacactcctagaacaccctaggcctcccagtccctggcctcctccccctcatggttcctaggccggcggcacaacctacagcgcacaagcccgatccaactctccagaggacgtcagaacatgagtaagtcggcgccctcttacccagacacacaaacagcacggacttggtagcctgttccgccatcttcccgcgcgcagaggcgccgagacaccgcggcgttccgcacgccgacgcggcgcaggcgcactgccaccctcttgccccgcgcgcctgcgcagtcccgcaccaacgccaacagggcagcgcgtgtgagagccacgcctgcgcaatcggctccagtgcgcctgcggaggcggtcctatgacggtagtaggacgggcggggagggtccgcgggtcacctgcagggactgggccgccgttcacctgcaggggcggggctgcaggttgtccggaggaggaggagctgcgggggtggggtcacctggagggagtagggccgcggaaggcgagggggtgtgtgtgtgtggtggcgggggttggcgggggggagtcacctggagggggcggggctgcgggtcgcttggaggggaaggagccgcgggaggtaaaggttacctataggggacggggccgcaggagaggggtacctggaggaggaagggccgcgggtcacctgcagggcgggctcaggcctcgcggctccgcgggccgcccacctgggttggggcacagcgcgagtctcgcgcacgtggcgggctgtggtgcctgtcgttcgagttcgcatagaggggctgggcgggtcacgcggggaacctgccttgagccccgcggggtccacgccggaccagggcggccttgggcctgggcgctccctgagacccccacccccaacaccgtgcttggagccgccgcggggctctgggcttttcgatcttgaggacggggcggttccgaagtccctgagggcgaaggcctgagcgcggcccggcgggcgcgtggtttttgtcccgcgaaacgtacacggcgggtgttttgcgccgcctccttcgtcacctgccgcaggtacgccctcgctggggcctccttgtccgcggggcggggcagcgcgccttcctcttcctgggcagcctcgggacggggcgccgcggccgggcgggcagcagtgagtacccggggacccacctgtccggcagcaccctcccctctcaagagctgggcggtggtgggaggaggaggacgggaaaaccggcgatgcctctggggtttctaggtcgcgcgtctgttaaccgcaaaccgcccaaagttaagatagagcagcttccaggactttcttgaccacagcgattttgattgaagtttagccaccgtcttttccatttttagaaaagctattccgaagtttggaatgatgacgatggtcgtgttatttttaacttcctgatatttgaacggcgaggtgtcagcgaccatccttccgttccacagaagcgtctctgaagtttgggtcgaatgcgcgcgcttggaatgtgcgtggaacccgcggcaggcgcggggaggaggccttggctagggcgccggcgaggttcgagtttgccagccccccaacctggaagagaagggccagcccctcacacccggaagggaagggccggtccccccaacacctggcgccggggtcgcggggccacagggcgagcgcggggtcgcggcgagcacgggtcctctctgatcgctgggccttggcgctggctgctgagtttttccttctttaaggaagtgtggaactggtctcaatcggttgaccaccttaaggaaataggatttacactgtggacagagatgtgtcctttacacttcatttgaaccaatatgcccatgctcctgtggaggctgagttggaaagtgacacgaagctgcccccccgcaagagagcaggtgctcggtttctcttctgcttacaggagatgcatgtcctgatttcttgttctcctaggtgtttttattgagatgtagggaatatctgaattcataacgacttagaaaatctgtacacacagttgagagaacaggtctcgaggctaaggtgctgtttactcccgtgggctggcctgttattaaaatacttgtgcagcgactgatgtttacaaattactatgttggaggttaaaatgatcaaagtgataacctccatcctgtctatcatgtttgaggagaattggttatttggttcactaatgttctgtttaaagaaaatttctgtaaaactagtaaatgtta

SEQ ID NO: 2515 - DNA, 4001 bp, Homo sapiens
gggaaacacaaaagcaaatgaaacagacctcgaggctttaagatctgattctcaccccaaaccagacagaggatgattttccccttataatttgtgcgttcttcatttctcccattcttcctttcttccttcaaggagaacattttagaccctcagaatatttaagctttaagtcactgagtctaaagccttacaaattcagtaactgagatccaaagatacgaggtgacttgtcaccttgacccttaggtccaatggaccactctgccccacacccaatgtcatcctacaaaaccaatatttttatacaaaagagaaaccaggaaaagtctagagagaaaacgcatgcgacaattagaaggcttactcatccccaagtgtgaggaactgcccagaaaaatgccagaaaacaaaatcaagtctgtgcaaaagattcccatgtcacaccacctgtcccctataatacccttctaatacactttcaggagcaactcatcagcacccttaactctcagaactaatttggggaaacaaaataggttgataaacatgaaagaaggtatcatcaaactacaactctcctggccacccagactaaaatccactgtggaaactattcagccagccaccaaggagaggcagcaaaatatagtgcttagatttcagagctctggatttacacaggcctgtctgaatcccagcttcttactagctgagatctgaggcaagctaagtcgtccaatctgcagtttctcccgctgtaaaatgggaataacccccaccccagaggactgttaacagtgtgaagacactgtacataaagctctccaaacagtgcgtggcatgtaataaaagctcaataaatgtcagctatttgtcattcttttcagctataatttcgttcacaaagcctactgcctttctagcttccatataattttaaagacattcctccagccttttcattttcgagggatcttttatacagcagcttagagcacactttctagtatcagacttcctgcgaaaaccatttgaaaacctgtgcctcgggctcctcatctgtgaaacgagcctgataacacctaccccacaggactgctggtagtaagcagtccccgagttacccaacctatcaacagtatatgattaaaacgcacttggggaaaagcaaagctgcaactctcaaaccccaaacgacagtcttaatcccagtcccaccaccacgatagtgcccagaaccaatcaccaaggtcgacccacctcacgcacctagtttcttctcaccccacgcagcaacagcccctcccgccccgccaaacaagggttttccgaaatcgcagggctgagtctccttccacggacaccgcactgctggggccgcggcagagccctcttaattcaagggggtggcctccccaccccgccccacagcgccgggaggcacgcagtgcatcctccctgcctggtcagcgccgccccacgccgttcgcgctgcagctcccggctcgcgtgggctcagggccgaggccccacgtcagccgcttcccggaccccagcgggccgcctcccaccctgctcgccgctgctcctggtgccgcgggccgcccgcgcgcacacccagcggtcaggtgcggcgccgacgacagggtcccaggccccgaggctggggagcccctcgggcccagccgaaccgcacgcggaggccgcgccgccaaccggctcccgccgctcccacaaccggcgccgcactcaccgctacgccggagtccgggttcctccggcctcgggcccgcgcaggcctggctgagccccagagcgttcacgccccgcgccgccgcccggggatcctggcgcagctgtcggggccgcaatgcgaggggacgaacgtatgcgaccccgtccaacgcctcctcgtcccggccccggccgcgtagacaactgcagtgtcgcagcccggcgcagccacagcagcgtctgttgagcggaaccgcctgggacgctcacccccggccggcactcgttgcctatgcagagaggctgccacccattggcccgcgagcggtggcgcgtgcggggctgggcctatcgaattcgggccggggagcgcggcgctggcggcccggggcggggcgaggttactacgggtcattccgcggagccgccgcggaccggacctggctgcagtctgcgcggggcgggggcgggaacggggtcgaccaggagggacggaccgcgggtgggggaggggagcggggatctgcggcagcgacgtgggaggagcggctagcccaatagggtctgcaggagctccgtccctccaggaaaaaacacccctccaccaaaaaaaaaaaaaaaaaaattacagtcgcacaattattgctgtaatgtataaatttcaatataaattatgaaatagtatgcatattctttttcgtttttaactggattagttatcccgttcttgcagaaattgctgtcaaatcctgccaaataaaatggcttttggaactgcctggggcaagaagagcctcaaaaactcaaagcttatccattatcatttctcttgttttggcctcacttgacctagcatataacccgttttcctctaaatgcactcaccatgcaaatttgctatttcttttcaaaaaataaagtttactccaaattattgtttttgaacgttcttaggaatccacagtggttctgtattttaaggagtttgccattgtttctcgttttagacactaaacaaggataagaaagaaagcatccagtgcaggtagtagaactacatgtactgtaagagagaagattttcactcacccagtactagtaggattggtctctttttttaacccaacatattgtttagtttgcctgtgaacttttccttaagtaggtgaaaggttgccttcctgagccagcctcaggctaaagcaggcctcatttcccaagagaatcaaaatcaggaagccgccagaacttgaactaggtggagcgatgatgcaccaagcaaagagagctcactcaccgtgggccaagggccaatcgagaacctaaagggatggatacctgactcaggcaaactgttctcccacttcaaaatatggcagttcagttgctcattaatctgttgaaatcttatcaaaggatacatcctgaagataaatggaatgcagaatttcttatctgaaaagacattcgcagctctgcagagagaagcaggctttagaagtagtacttctagaaccatgaaatcctctggaaaatactggtttttttccgagagaagaaaactaatattgcacctttttatctatccataagcctaaaacagactagaagaattccaacaatatctttcttcattatctttatattatggaatatatattatggatatggacctatatttaaaagaaaatggtcctgggaattaaaattctaaattctcatcttgtttgctgtttaacaagctaagtagaaatacatagagatacttcagagacattgtgggtttggttccagaccactgacacttaaagggaatatcaaaattaagtgagtcacatgaattgtttggtttcccagtaaatataaaagttatgttcgccgggagcggtggctcacgcctgtaatcccagcactttaggaagccaaggcaggcggatcacctgaggtcaggagttcgagaccagcctgaccaatatgatgaaaccctgtctctactaaaaatacaaaaattagccaggcgtggtggcatgcgcctgtaatcccaactactcgggaggctgagacaggagatcgcttgaacctgggaggcgaaggttgcagtgagccgagatcgtgccattgcactccagcctgggcaacaagagtgaactgcatctcaaaaaaaaaaaaaaagttatgttcatactataaagcgtgcaatagcattatatttaacaaaacaatgtacatatcttaatttaaaaatactttattgcaaaaaaaat

SEQ ID NO: 2516 - DNA, 4001 bp, Homo sapiens
agtccactctcctcacagctgccaaagcagccccttcaacagataccctccagattaaaacccttccatggctccccatagcctgatcctttagagtctaaagcccttgtaatccagccctgcggacccctctgaatttagttttacctgattcctgccttgctatctaaattcagtggaattgagccacttgagtcccaaagaccatgcttcctctttaccaggaaggaccaagcttggtccttacttcaggaccaagctcaggcacctcttcctccaggaagtcttccctgataactcctgggttgagtgatgggctcctcctggcctttacccctttcgtgtacttatttgctccatggttctcatctgtttatctgtctcttccagtaactgcagaagcctctccactgtccctaaggagcagagacagtgcctggcccataataagtgctcaataaatgttggcagaatgaacaaggggaaagaggaaagatatctcgccccaaggtcatgatgtcacacggcccatccccttttctcaggcctggcatgtaggatcttactgttcattgcagtttctccagcacccatccctctctgtcacaggaagctcttcctcttttcagcccaagggttagtatcagagtccaaacccacattcaagtaatcaaagtgagcacttagagcctccctgtacaaagtgtggtcccagaccagcagcttcagtgtcgcctgggagcttgttaggaattccaagtatcaggccatatctcggcctactggaatcagaatctggggtggggcatggggcaatctgtgttttaacaagcactccaggtgattcttaaagtttgagaactcagggccgggccctgacagccttgagctgagtgctgtatatacgcattctctcgtttaatcctcacaccatcgccaagtagatattattattcttgcccccattttacaggtgaggaagctgaggtcgctcagtaacttggttagcctgacagtctgccttcaaggcctgcactgccacacccagcctgcctcacctgtgaagagatgctagtgaattctgatgccaaacatagaagtggccccttcatctcatcttcctcttaattctttgtgcatgtgttgtgtgtgtgttgggtgggttggggggagtaatgacatctgcaaatgggtcacagttgggtgtgagtcttttggatgagtggctgtacgtctctaggcctcaatgtcctcatcagaggagaatgaactagatgggtcccaagttccttctaccctgaaacctcacgatgccacagggcaagtggaattttctccatcccccaatgatcctagagccttcaaggactgcagaaaccctccattctcctcagccaagcacagatcagaggacagagagacccacaggggacctgaagaaaataccctcccattcccagcacagacatttcatggactaaacagctcacagacaccaggaccactgttggctttgactcaagtattctgaaaagctgcttttctgcaaagtatatgatcccctaaaacagcctcccagacattctaacccaagacaaaggacatcagggtgtggatctgcactggccctggggagcagggctagtagagactgcaggcattatatcccgccagtccccattctgaggcagggagcacggttccaagctgcccctgccccaggatgtcccatggccagatacgccttttctcagcaggctgcagtatgcttgcaggtgccgctgcccaccaagggctctggtgtgtgatctgggccagcgtcacagaagccaggccaatctggaggcacctcccgcacccaggaggccaggcagccccggaaaggaagaggtggcaaaagccgtacagtacttaccgagggtatgagaggttcttctcccagtgactgagggctggtgtgtctttggcatgaataccagagcaatataaaaccccagaggcggatcttctttaaacaaagtccctaaaaaggccagctgacggtgtgttagcaatattaccatataaggtggttttttcaataaatcgccttgggggtagggaaggggggtgggtagagtgagttatcatttgaaaaatgtatgcaaaaggactcagtggcaacagccccggtgctggtagatttgttccttttatgctgcacttgcataaacaaaactcacaccaggccttataagctgcccagagtgagaccagatgcagctgtgctcctggagtgagaaccataccaagaatggcagcgggcctcctccgtccacacctccctcctcaggccctgctgcatgcggcccctgggtctgcctgggacgcccaggcactgtccccaaaatgggtgcaatcatgccttgtctggcacgagcctgggaccaatgaaagctgaagagaaatgccttccgtacccaggaaagaaatcctgcgtgccctactcacctgctgcaccttgacacaagctcctaacccttgggctgagttctctgagggtctcaggacaccttaggcttcattctctcttggctccttcctggttttcctttaaatatctctaaatatctgcagactgagggacctgcttcagggttgaggcacacctaacaagactcttggcctgtaggattttccacagtcctgtgattcttgagctgcttctttttcttttttgagatagagtctcgccctatcccccaggctggagtgcattggtgcaatctcggctcactgcaacctccgcctcccaggttcaaacaattctcctgccttagcctcctgagtagctgagattacaggcacctgccaccatgcccagctaatttttgtatttttagtagagacagggtttcaccatgttggccaggctggtctcgagctcctgacctcgtgatccacctgccttggcctacaggtgtgagccactacgcctggacttctttttgtttgtttgttttgtttttaattagacagggtctcgatcttgaactcctggattcaagcaatccctccaccttggtctcccaaagtgctgggattacaggtgtgagccaccatggctggctgatgattgctcttctttgtgtaattcatgtactatccctaggtagctggttcatttcccacattatcagctaccagctctgcagtattactttcaactccacattctcatggtccccctccctcaccctgatccagactaaaatgatcaattgcctattggacatcccaatccagatgactctccagctcttcaaactcatcctgtctaaaactgaacccttcttccctaccctcaaagctgctgtgcctcctgggttgccaacttccaagtccacccctcggcccttcaagctagaagtcagtcagtctagaaccctgtgtctccctcatgctcccacaaccacctgggcaccacagcctggtgctcccccgaccagaaatgcccctcagctctgtgtcctccctcaatccctgctggcctgcgctgcctcaggctccagtcctatctggcctggagtggggcgcagcttcctgactggccttcctgactctgcttcgtcttcaacacagaggttcccaaagcatggggaccaccagagtgcagcagcagcatgatatgggaatgtgctcacaatgcagattctcaggtgtcacctagccctattgaaacagaaactcagtgaataggcctcagccatctgtgtttcttaaactttccccacccggtgcccaggatacccccgcttcaatagaagaagcatgcattgcatccctgctaaacgcacagggagttccaggtggttttgggtcacctggtgcaatggcttggtacaggtctggcttcctcattaactgaaaattgaggcaggagatggtgtgaatgaggagtgtcctctgctgagacagcccagaggaaagatttaaaaacactttccttgaggacctgcagt

SEQ ID NO: 2517 - DNA, 4001 bp, Homo sapiens
attgggggcaattttgtatccccctgctctggcaacatttggcaatgtctggcagctggggagaggggacatgcagtgggggatgctattggcatctagtgggcagaggccaaggatgctgctcaacatcctacgatgcacaggcgagcctgcactaccaacaaggagctagcccagaatgtcaataatatagagatagagaaaccacgaagggcaccttcctctgcacaactaatggttggctccagcaggattccatagcacatgctactcccaaaagctagaagaaacccctctgtgtgggtctttttttttttttttcaacagcttccttctcccccaagaacccagaaggcatggaacatggacgacctacagggcctgctggagaagaccaatgggtgcatgggatgaccggcagcttccctcaagtggcttcccagagactactaggagaacttggtcctatcgctgcccccacctggaagctggacttaaggatcccccaaagaacggggcaattagaaacctcccacccagcgaagggataagcttctcaactcagtcccaccactcttcatcgcaaccctctgagtctgcagcagaaacaaacatctccaagttacagaggaggggatggaatccccaaggggccgagcggtagcccttttaacttataagcctgttgattagcctatacgagttatttgcacgtcaagaaaggaagtagcctgctccttcctgcagcgtcctgctggtgtgacagcacgtccccaagctcagtgctaacctccttattaaacatcccctgctgtgactcagggaacccacatgggtactctaaaacagtcattcagggaccccacggggtcatgtgggagggagacagatcccagaaagagcacaagtgagtcattaccaaaaactccaaggcccgcacaccggacgcacatacccagctaggggcagactcaaagatcccagcccttatcttctccccatatcagagctcggaagccagaaatcttcctaaggcaggtgaaagcaagccgagccccactgctgaaggacaaagccacaggaagcctgatgacatctttcctctgaggcttccaaacgatcaccccaaattgcttgctgatactgggaagagtggccatgaactctccattgctctgctggctgtggaatgtttgctcagcacaggaagcatttaaggagaaagtcaaagtagccaaaaggcaaaccagatggtggtggacatgtgggtgacagagcatcctgcatttgttgcctcggggtgcagccccaaagataaagccagcagtgtgcaaatgacaaatgctaccccacctccgccaggcagccagagccagggccgaaggacgcggaaaggaactggtgtggaaacctgcccaggaaccgcactctcaactgagaagagtccggggcgcgtccccgcccggccgcccggctgtcactcaagctctcctgaacttccccgcccgactcggggaggggtcggggaagaggctctgcgacgcgggcgagggggctcgccccatggccggccttacaaggccaagagggcgcgcgcccccggggcgaagccagcggcccggcgggggcgacggccacgcagtgagcggaggacgcgccgaggcgggcgggggtctctccctgcgccgccgcgtgcgcccccgggggcggggcgcccgccctccccctggctgccgggcctcacgttgtcgatgaccacaggctggttggcgatgatgtcgtaggactccatggccgggccgcgccggccctgcccagcaggcgggctgcaggaggcaccggatgggcgggcgggcgggaggaccgggacggcggcggctcccgacgcggcgccgctgccctccctccccgagcctgcagcctacgcgagccccgcggggctttctggagggcgggcccggcggccaatcatcgctcccacctggcccgattgacagcaggtgcccggggctggctgcgcgaagggggcggggcctccggaggctggccagccaattgaggtcgtccggaaaaaagtggtcgcggcgttgccaaggtaggctgcgcagtgtctgggatgatgtcatggctccgtcttaaaggggacgcgggcggcagaaagtggagctgggctggtgtgcgcgcggccggagtctgtggagctggaaattcaccggtccaggaagacgtctttcccgcgtcccagcaccggtccagaaagacgtctttcccgcgtcccagcacctcgggccacgctccttcgtgagagcgccctctccaaggaggccggccctggatatttcacccaaaatatttattttttctttttttctaggtaaggtgtcttgctctgtcgctcaggctggaaatcttgggctcaagcgatcctcccgcgccagccagtaggggggactacaggcgcgcaccatatttatttatttttactgaaatagtctccgtagagactgttaaaaattgccgatgtcgactatattgcaagtcgtcacggtggggtattgcgaaaagttttcaattagcaataatcgcgcttcggataaacctcattggccaccatacggccaccgcgcaacgctagctaattaaaaaaaattttttttgtagagaagggatctcgctatgttccccgggctagcctcgaactcctgagcttaagcgatcctcccgcttagtctttccaaagcgttgggattacaggcgtcagctattgcgcacggccccataatatttcctcgttgagcactgaagaaaagatccttttccttataaaaattacagtttcgtggtattttggtcctggcatttattgagcacctgctctgtgcctgcggagcacttctgcccactttacataagttatattaaatccttgcaacaatatcaggtagttgtattattactcccatttttcagtcagggtcttcacactttggtaacctgcccaagattattgggtgtggaattggcatgcaggtagccccctgcggcactggagtcagctgcttcaagagtgcaggatagttgagttctacatttgtttaccaaacggatccatagttatttccctgtatatatacctctcccaatgggttgtgagcataaaatttgtaaaattgaagcgggtgtgcagaaatcacaagtgtacatgtacatttcaatgaatgattaaaatgtggacacacttgcataaccaccgagttcaagaaacaatattgttgctggaaaaggggtcccgatccagaccccaagggagggttattggatcttgcccagaagaaattcaaggcaagttgcagagtgcagtgagaagcgattgtttattgaaagctactcagttacagagtaggccatcctcagaaagcaagagggggaacacaccctctttatattaaactcttcttatagaggggtcttatctatgtaaaaactaagctatgtctacatgagggtgggctgacagcataacaaaatttagtgctttttgatttaaagaaagttatccttggcattttaatgcataaatacatcaaagcatgactctctctctctctctctctctctctctctctctctctctctctctatatatatatatatatatatatatatatatatatattttgttttgttttgtttttttgagacagggtctcaccttgttgcccaagctggagtgcagttgcctgatatcagctcactgcaacctccacctcccaggctcaagctatcctcctgcctcagccttccaagtagctgggaccacaggtgtgcaccatcacgcccaggtaatttttttgtatttttagtagagaccgggttttgctatgttgcccaggctggtctcgaactcctgagctcaagcagtccacccactttggactcccaaagtgctgggattacaggtgtgagccatcgagtcctgtaactataactatcttaaatca

SEQ ID NO: 2518 - DNA, 4001 bp, Homo sapiens
caacctccgcctaccgggttcaagcgattctcctgcctcagcctaccgagtagctgggattacagacgcccaccaccatgcccggctaatttttgtatttttagtagagacggggtttcactatgttggccagcctggtctcaaactcctgacttcaggtgatccgcccgcctagacctcccaaagtgctgggattacaggcatgagccaccgcgcctggcctcaatgtacgttaacactctttttactctagtccatttttaacacagttcagatgaagctaccataattattgcttgtaaaattgtgtaacaaatctaatcaagggcagtattatggcagtaaataccagctcttttccccctcaacaattcagattccaaagtgttttgttcaagtaaaatgaactttaattcatacatcatatttatgggagggaggggagaaaactcacaaaatgttgcaacatcaaaatggttagaaatcactatagaagtcatccagaataaataatatttccatcttctaatttgctgactttgctacccaaaatacatttttttttaatctggcaagagggaggtctgaatgaaacaattttttttttttataattgagacggagtttcactcttgtcgcccaggctggagtgcagtggcgcaatctcggctcactgcaacctccgcttcctggcttcaagggattctcctgcctcagcctcccaagtagctgggattacaggcaagcaccaccacggccggctaatttttgtatttttagtagagaccggggtttcaccacgttggctgggctggtctcgaactcctaacctctggtgatctgcccgcctgggcctcccaaagtgctgggattacagaaacaattttcaaatagtttctaaatcagtgctttagtcagattttacaatttttgaatcttaaaggctaacattacctgtatactgaaacgaagggaaaaaagggggctgggggtgggataatcaacactaattaacttcccctaaggctagtggaattaacacttgagtcttgcgggatcctaggtcacccaaaaccactcaatggaacatgctggtctccgtgggcctactcctgggccaaatactagtatgtaaaacaaaaagtgaacgatgcgctgccgatctggaccccttccctcgaaaaaactaataaaaagcccaacaaacacagcgaaagggctgaggtccacactccatgacagcacttccctttttttttttttttttttaagtaaacccgcttcctgcttctcgtttggtgtatcttcaactatacaggaagaggaaggcctctaggtctttctcctttttacaaaccggtggccctggggaaaagagcccttctcggaacacacaaaccgagccttttacgcttccgtccgctttagcccaattgcccccgcattagcgcggagcaggtccctgccgggcggtcagtaggctccatgtccagtgccggtctcgcccgccgcccccacccggaagggtgagggggtggcaggctaaatgggtggcaggctcaagggagaccagggaacggccggctcgctcccacgcccgcggaggtgggaggcaccgccccgcgccccttcgccccgagggcccggaggtgcagccctgggggccgagggcccgtgcgccagctgctcgtccccgccggcgtctgtggccgccaaggcctcctcgcgcggcccttaccccggtgccgttgtcgcacaccaccaccttcctgccctggctgtccatcgtccgcccagggaagagccgctgcagccgcacaacctacagccaccgccgcccggccgttttctcttcttcctcttgcgtcttcccggcccctccttcggcccaacttttttcccccgaccggaagccgccgccgggctccgcccgtcatttagctgaatgcctgcacgaaaagggtgggacgggcaggcagcgcgactggcagcggtgagctccaataaaagatggaggagcgtcgaggcccctcccgcagctccgcttccggctcggctgtcacggtcgctgcccacccgggttcttcgctgcttctagttccgggcgctttgccgggcgttaatggcggccaacatcgccggtgctgcggctttctccctaaagtgtcacaggagctaagggcgctgcttaacgaactgcagaagacgcaggcaggtgaaggacaccggttctgctgcggcagtggaatgtggcggagaagctggcgggtagggcggggagcaagcctggaggtcctggcggaccccaccattcgacagggcttggtgtgttattgcttctaggccttttcagcggacagaactgggatggatacacacatgcttatttgaaatcatgcgtttgttccatactccaatgtcagcccaccccttctttgcccaagttgctctatggtcaagtgagcgagagcaggtgcctgcatttccagcctcgtggctcaccgcctccttccagtagtcccatgttgcttcacacctcttaagtacatgtacttctgtgaacccagagccttggctttgaaatcagacaaccccagtttcaaacgtggcgctgccactcacgagttttgtgattttggcatacccctgtctgcatggggataataacttctatctccataggtgtggtgaggataaaagtctatgcatggaggaaatgttcattcagtggtagctatttctaattctgttcttctggacctatgattctatctacgatgcctcattttttttcctttttaatcaattggcaaacttgtgctctgagacccagcttgttacatctctgatgacagctgatatcctcaggatattccgtacttcctttctccctattactttactatgaatatatgaataacattgtgcttattgcatgcaacaaatatttattagatgaatgacattaaaattcacctttaaaatgccatcctttatgagaggtgagaaatagaacttttccttcgacatggctgtacatgttcaacaactagaataaaacagtcatcatgaaccctcaatccagtattctttttataatatagctgcctgtcagttttcactgttcttttattagaccagtgattttcaaacctttttaaaggcatacagtgctttattcaaatctaatcttatatggaaccctcaacacataaatattaagataaaaataaagctgccattgttgcaattagaagtttgagaggttagaataggtaggaagtctcggaggaacatttcttcgttttacctgctttaacagtcagagaagtacctcagccagcagaaaaatttatttgttcataaattccttgagtatagagtccgtatcttatttttgtggcctccaatgctagtgctgtgcagttttcttgaaagtgcattttattggtctcagcaaattgaactcaagcatttctgtgttcttttacttttcctctttgtggaattaaggggattgctaatttgtatttttaaagaaagaacattattccgggcgcggtggctcacgcctgtaatcccagcacttggggaggccaaggagggcaaatcacctgagatcaggagttcaagacaaggctgaccaacatggcaaaaccccgtctctactaaaaatacaaaaattagctgggcgtgttggcacgcgcctgtaatcccagccactcaggaagctgaggcaggagaatcgcttgaacccgggaagcagaggttgcagtgacagagatcgtgccactgcactccagcctggtgagagcaagactctgtctcaaaaaaaaaaaaaaaaaattggcaagtttggccctaaaatttatatgaaatgaaaaggaaccagaataaaaggatttcgaaacagaaaaagatggagaacttccactacctgaattcaaaacttattataaagctacagtaatgaagactgtaatactggcatagaggcagat

SEQ ID NO: 2519 - DNA, 4001 bp, Homo sapiens
ctcagggtcctcaacctcaaggacttatcctccatgtgcaaataaagctgaaggtgtaacttcccaggaggcaccactggaaacttgtaagaccaaaaaggcttttgagaaccaaaataactgaaactctaaagggggaatttcagattgtgacaaatggtaaaagagagtgaggtggcaaggggactcctaatcagttccattcaaatcatcaatgtgcagttaataacctctccttattggagaaaccaatgtaataacttaaaaatacactattgtgataatcgtaattttaaaacagaaatagcctaggttaaattgaacccctcttcccgatcctactggtcattcagcatgttttaaattcaaggttgccctttaggaaaggaggtcacttaaggacagtttatctcaatgaaacatcttgtatactaattcgaaactatttcaaaagggggaaaatggagattagaaaagtaacatactacttgagatgttaccatattatttctcagggccacaattatttacactatttttttgaaaacgcagtaatttctaaagcattaattatgtagcaatattcgtcactttaacaaaacacatttgaaaagtcctatcctactgactcaggccaaatctaattttaaaactgaacctagacataaaaatactcaccaattagactaagaagggagaaataaaaaaaattattggttcagagaaatgagactgaattaaggaaaaacttttaaataaagtgttcatcaaaaaaatacatagaagttccaaggctagtgttttcctaggagaatattaagaagttggtggtttctctctacctaactgggattttagaaactgccacactagctagttatgagaatgaagattaaagaaatttcacataaagagtgaaggacacacaatcttttaagtaacaataatgaaatcaataattataattaataataaaaaaaaaagcctgacagtccacctcttactgacttccccctcaaaaaaaaaaaactgggagtgttctgggaattggagagatgtcatcagcacagaaaaaaaaaccactttcctatatgtcatcctgaagcagtgattctacataaaaataagggtagtctattctctatgcagttatgagtgtggtacaactctctaaaacgtctattaatacaaaatgaacgaccacactttaaagccactctacattttcgcaaactaccctacatatctacgagtaactatttgcaacttaaacaccctcctatatacctctataccttcctgcttccttcaagataccatcacagaatgaacgaatacaacttaaattagtttattttccagggtgcttcctttcccccactccatgaaacataagtacatttttttaagtcatataaatggacaccaagcaccggtaattcagtctctttaaaacctgcttaaaagttctagtaagatgtgctcaggttggaaactaaaaactaccttataagggtataaaagactgaaagcaggaagcggctttgacaaaactaaggaagttgcagcgcgcttgctcactgggggacttttttgaggctacagaagtaacacatgacatctttctccctcgaattaaaatgtgacttggttcaccggttaaaacgcagagggagatggaaatgaccaggagtcgaaaggagaaggtgggtggtcaaatgaaagccccactgtaggttcccattttcagagtccgattcttccctttccccacccacaccctgggcagaatgttgtcacagcgatcttgtcaaacctaccaggagcgcttctcttttctagctcccctgccaggccagtccccgagctcggcccctgggtccccaaaccgactggcaaaaacgggcgcggagggaaaggaaagccggatgggtcgggcccggggaccacccccaagacgaccgtccccagcgccctttgggcggcgctgcccaccgtagtgggggaagggccgggaggggtcgcgcggagaaagccgctgggagggttgggggttgaatctcgggcccgcgcccccgccccagtcccaggagggagaaacgaggggacccgcgaggccctggctgcgggccccacccctcgctggccggcgggtctaggactgacagccggcggcggcacctcgccgcaccattcatttcccggcctcctccctcccccgccatcttccttcctccgcctcagtttccccacccccgcccgtaagcccccttaccccgtgccacagtccaccacacaggccggcagccgtcccgccatcttcctcctcgcctgctgctgctgctgccgccgtctgctccgtgctgctaggggccagagattggcggcgggagacaagggctatctgaccatccacagctgggccgccttcaccgtccggggggtagccgggaagccgaagcagtagcaagaaagcagcaggctcggtcggcggctatcacttccgcaacccaggcaggcaggcagtccccgccctgccccgccgcggcctcctccccctctctcttccctcctcctcactcctgcccccaccctacaacttcttcccctcacgccgcctttccccgggaagccaagatggccgccggtgccgacgccccggccaggccaggcccaggcccccagcgctcccccttccgctccgagcgggaggggctagcgagcatgcgcaataaggtacgttcgcctgcctgggctccgatcctgaagttggtgaaatccactgcgggttttccaggagtgtagaggcggagaagtctatccgagcttccagttctgcttctgaagctggaaggggcttttcggttgtaacccttgggttagtttcagttacttctttgctaggttgaggaaagggtggaagcgcctcctgcagccacgaatatcctccagtgcctgagagaaaacggcctaatcgaaaacgtccgcggcatacatccattcttaaaacttgagtggctgcttttctgggtggaaaagagcggtatcagacagggtgagcagtcggggaacggatgaacaaagacttgcaccgtggccctgatgcctttgttccgagttctattcagttgtacttgtgcgttgttacaggactttagaatgcagccctgccccccaacccccacctcccagggccgacctgtgctcctaggaaggcaaacctcccaggaatatattctgcataactatacaaataggcctttattcaaggcttttggattatgacaaagattaccctcaggagtagtaagattctactagcaggataatagaaaggattaaggctcccctccaaagaaaatttttttaagttagaaacggaggcgagccgcagtgggtcatgcctgtaatttcaatgctttggaaggccgaggtgggaggataggatagcttgaggctaggagttcgagaccagcctgggcaacatggggagacccccccccatccctccaaaaaagaaaagaaaactggaaagccttaaagaaacctttcaaactttagtgtgtatcagaattacctgaaaggtttgttaaaacagattgctgggccatacccccagaattctctgactgggctatcggaaataatgcctgagaatgtgcatatctaataagttcctagttccactttaggaccctagaaggttagtatctttcctctctaccaggcttatcttaggatgaaccgttcggggtttgctgatgtgaagctaaaacaaaaatattctttaaaaggagggatgtcttattcagtccataagatcatctaatgtattaagctggcttgggggatgaatcgggtgtttcattcattcatttgacaggtaagcattgcttacctactctattatgacggggtctgtgctgactccgaatattcggtgggatgcaaaatagttaagtgctcttgtagagtttacagattagcggaaaacagacaaa

SEQ ID NO: 2520 - DNA, 4001 bp, Homo sapiens
ataaaaatactcaccaattagactaagaagggagaaataaaaaaaattattggttcagagaaatgagactgaattaaggaaaaacttttaaataaagtgttcatcaaaaaaatacatagaagttccaaggctagtgttttcctaggagaatattaagaagttggtggtttctctctacctaactgggattttagaaactgccacactagctagttatgagaatgaagattaaagaaatttcacataaagagtgaaggacacacaatcttttaagtaacaataatgaaatcaataattataattaataataaaaaaaaaagcctgacagtccacctcttactgacttccccctcaaaaaaaaaaaactgggagtgttctgggaattggagagatgtcatcagcacagaaaaaaaaaccactttcctatatgtcatcctgaagcagtgattctacataaaaataagggtagtctattctctatgcagttatgagtgtggtacaactctctaaaacgtctattaatacaaaatgaacgaccacactttaaagccactctacattttcgcaaactaccctacatatctacgagtaactatttgcaacttaaacaccctcctatatacctctataccttcctgcttccttcaagataccatcacagaatgaacgaatacaacttaaattagtttattttccagggtgcttcctttcccccactccatgaaacataagtacatttttttaagtcatataaatggacaccaagcaccggtaattcagtctctttaaaacctgcttaaaagttctagtaagatgtgctcaggttggaaactaaaaactaccttataagggtataaaagactgaaagcaggaagcggctttgacaaaactaaggaagttgcagcgcgcttgctcactgggggacttttttgaggctacagaagtaacacatgacatctttctccctcgaattaaaatgtgacttggttcaccggttaaaacgcagagggagatggaaatgaccaggagtcgaaaggagaaggtgggtggtcaaatgaaagccccactgtaggttcccattttcagagtccgattcttccctttccccacccacaccctgggcagaatgttgtcacagcgatcttgtcaaacctaccaggagcgcttctcttttctagctcccctgccaggccagtccccgagctcggcccctgggtccccaaaccgactggcaaaaacgggcgcggagggaaaggaaagccggatgggtcgggcccggggaccacccccaagacgaccgtccccagcgccctttgggcggcgctgcccaccgtagtgggggaagggccgggaggggtcgcgcggagaaagccgctgggagggttgggggttgaatctcgggcccgcgcccccgccccagtcccaggagggagaaacgaggggacccgcgaggccctggctgcgggccccacccctcgctggccggcgggtctaggactgacagccggcggcggcacctcgccgcaccattcatttcccggcctcctccctcccccgccatcttccttcctccgcctcagtttccccacccccgcccgtaagcccccttaccccgtgccacagtccaccacacaggccggcagccgtcccgccatcttcctcctcgcctgctgctgctgctgccgccgtctgctccgtgctgctaggggccagagattggcggcgggagacaagggctatctgaccatccacagctgggccgccttcaccgtccggggggtagccgggaagccgaagcagtagcaagaaagcagcaggctcggtcggcggctatcacttccgcaacccaggcaggcaggcagtccccgccctgccccgccgcggcctcctccccctctctcttccctcctcctcactcctgcccccaccctacaacttcttcccctcacgccgcctttccccgggaagccaagatggccgccggtgccgacgccccggccaggccaggcccaggcccccagcgctcccccttccgctccgagcgggaggggctagcgagcatgcgcaataaggtacgttcgcctgcctgggctccgatcctgaagttggtgaaatccactgcgggttttccaggagtgtagaggcggagaagtctatccgagcttccagttctgcttctgaagctggaaggggcttttcggttgtaacccttgggttagtttcagttacttctttgctaggttgaggaaagggtggaagcgcctcctgcagccacgaatatcctccagtgcctgagagaaaacggcctaatcgaaaacgtccgcggcatacatccattcttaaaacttgagtggctgcttttctgggtggaaaagagcggtatcagacagggtgagcagtcggggaacggatgaacaaagacttgcaccgtggccctgatgcctttgttccgagttctattcagttgtacttgtgcgttgttacaggactttagaatgcagccctgccccccaacccccacctcccagggccgacctgtgctcctaggaaggcaaacctcccaggaatatattctgcataactatacaaataggcctttattcaaggcttttggattatgacaaagattaccctcaggagtagtaagattctactagcaggataatagaaaggattaaggctcccctccaaagaaaatttttttaagttagaaacggaggcgagccgcagtgggtcatgcctgtaatttcaatgctttggaaggccgaggtgggaggataggatagcttgaggctaggagttcgagaccagcctgggcaacatggggagacccccccccatccctccaaaaaagaaaagaaaactggaaagccttaaagaaacctttcaaactttagtgtgtatcagaattacctgaaaggtttgttaaaacagattgctgggccatacccccagaattctctgactgggctatcggaaataatgcctgagaatgtgcatatctaataagttcctagttccactttaggaccctagaaggttagtatctttcctctctaccaggcttatcttaggatgaaccgttcggggtttgctgatgtgaagctaaaacaaaaatattctttaaaaggagggatgtcttattcagtccataagatcatctaatgtattaagctggcttgggggatgaatcgggtgtttcattcattcatttgacaggtaagcattgcttacctactctattatgacggggtctgtgctgactccgaatattcggtgggatgcaaaatagttaagtgctcttgtagagtttacagattagcggaaaacagacaaattgtgttaagagcaatagaaagaagagagcggaggactctgagaaatgaaggcgaggagtgggagaatgagaggaaggtggaaggcaggtaaggagtctgaccagctggtatttaaaagctaagatggggggaagagtctcccaggagagtgaacagcaagtgtcaaggacctgaggcaggaacaagcttggcttcttccacaaattgaaagaagatccatatgaaagagtcagagaagatgcaatgggagatgaagactgagagataaggaagagtgaaacagtgcaagaatttgtagactgctctaagcattttaaagtttatcttaaaagcagcttgataaattagatttatggtaattagtttaaaaataaaaataaagcaacttgaaaggatttaggcaagaaaaagttgtgtctgctttgtagagaatggctccagcagagtccagattgaatcatacattgtatgatattctgtgttccggagttcgcagatagaagtatgtgagggccagcatccaaatggaatcaggtatgtgcagaggagactcactaaagggcatcatcatcaattagtgcccagcatgtctgcagctattcacgagagaaggctttttttagaggttgttttcagagaagtcaaacaactggttgtctcaga

SEQ ID NO: 2521 - DNA, 4001 bp, Homo sapiens
gaaaaatattaatagagtaagtgggactcagccatggtaaactcaggaagacagtatgtgagtgaatgaactttgacaatcactggcaaaagtggccaagaacatgagttctgaagtcctgcagacctctggttcaaatccccattctaccactgaaatttgccaagcctcaatttcttattgtaggacggtaaaataataataagacatatggtgtttgtggaaatgtcatgaaaaagtacctgtgaagagctgagcccagtgcctagcacatatccagcacccctaaactatcctgtcattaaagccacccaaacatatcaaagagttttgccaccatcagtggtttgcttctccagaattcctactgagttgggcatgagatcgcttcacataaaaataaatcaagatgcagagatccaagagcagaacaagccacagactacagctcccagccccagcattgattccatcttcacctcatgaccttgaagagcagaatcatttttcaaatccatttctgtcctgtcccccctccctcagaagactggactactcaatccaagcctgagaattacctagaagcctatcatgacaatcatgggactagttcagtccaatctagggcaagatagaggcataacctctatctcctgactcaatctctgttataccttccttggacacatgaagaaaactggcaaatcactactttgaaaaaaattcgttacaaatctattaatcaaattaagttcctcacttctgaaattaatacattacattcctgaatatggcatctttactctgaatccttaatattcctttaaattcctcacagataacaacaaacttgctagaattcaaatgatcactctcttccaaggtacaaaagttgtaagactactatctaaatcaagttttatttaaaaccaccctctccatttcaagtaaaactcaacaacacagctggaaaaggagggcatgaacccaatctataatcatcccaatccttagtctttgtcacctatccagaatttatctatccatcattcaccacctgtgagtacctgcataaggggtaatagcagaaatgctattatccaacacccagttacatcaacttaaggcctagatttcagcttcaaaagaattccattttttaaaattccaagacagaaaataaaaacaagtgaatcataaaataagtgatcgaggtcccatccaggcataagataacctcctgacccctatgtccccatcagtgaaatggatgaggcccatatttcaaacttaagcagtctgcacactatgaagctgcatggcgaggccgatgtctgaggtcagcacaagtctagtgtctgctggctgcccaagcctgggcccctggccagcaacccacctccagagacaagtgccaggacatactatagtgtttccatttaaggcccgccacttggatcagcccatctctgaaatttcttaacaccacctttccaggaagaatttttttggggaaaagggaggtggtgtctattttttgccaccgccttcccttgggctgtcagagcaatctgcatctctgggacaggattctttaaaaccactgggttatgtctcaattcatgggcctcttctcaaaaatatgtaaaaacatgtatggaacgggcccctttgcccatcatctaactcttatcatacatccctcaaaaaagaaagaaaagcccaataaaattgacaagtccattgtattaccttgctgcctctctccaaaagccaaattcatgacaactttttaaccaagacttttcttctgttactaagtggaacgttttcttctctaagtagcttttctcccatgcaagcagcgttcaaatctccaggggaaaggaggggtggggagggggtgggagactatctggcacaaactggacagagccgagccagtctagaacccgacggaagttactgaatccagcggccccagaggcccacatctcttcttagtgcgcccgaggttctagcctcactgttttggttacagtgttgaaggaagggttttaaacttggcaaagtaccgtgcaacatctgtaaccacatttgccttctggggatcggaagatgaatcccacattcctggctttgaagctttttgaaactgcagctaggaagaaccgagggagggagggagttgagcagagtttattggctgtctctccagcagaaaattcctcttggaagagatggatattttgagggtgggggaaattcgcctatctatctccttactctctacaagctcagctaggaaggtaagccccgtggccccgcggccagatcgatttacaagtcagagtcgcacaccctgaaggagttcacaacacacacacacacacacacgcactcacacacaccccaatacaaacctgagacccccgctccacgcctctgcccccccaccccccatatcccaccagcagttcaggcccaaagcaagacagttttgttccgcggctgcttcccccacggagaggggatcaagcttgggggagaaaggaatgaaagcgagggggaggcaccgcagacgcccaccctgccacccccgatccctgcctcttctcccgctaggctacctcctccctcagtcctcccggctccagcaggcgcggccggcgacctgcgctcacctcgggtcccgccgcggccgggggctgagccgggggaggcggagtgcgaggcagccgggcgctgcaggtcggcgcggcgcggggcggcgcggggcggggcggggcggtgcagccggcgagggagcccggaactctgcggggccgggagccgggggccgagggccggcccagagcggcggcggctgcggtggctgcagcggagcggtgcgtggggccgggagcttcccggccctggggccggcgcggctggccgaggagcaggctggcagcggcagcggcggcagcggcagccacccgggggaaagagccgggggagggcggggaggcggggtgaagaggaggaggaaggggaggagggcgggcagaataaacttcccgaggcgcagaggctcgggctgggagcacgaccgcgggcggggcgggcggaccagctgggcttgcccccgggggcggcgggggagaccgtcacagagagtagaaaagttccccctgcgccgagggggaggctgcggcggcggcggcggctgcaaagagcaggagccggagcgggaggagcgggaggaggaggaggaggaagtggctgcggagcgctcggccaatgagtgtctggagctgtgattaaccaggcagcaacacatcatttcctcccggcgcggatccagggagccgggaggggagagaggaggcggcggggcggggccgtccccgcgccccctgcaggcgcccggccgagggcgagcccgccgagccccgccgagcctgaccgcgccgcccccggcgcgcctggcgctgtctggccggtcgcttggcccgggtggaagctatgagcgcgccgccagcggggctcctcggaggcggcggggcaggcccgagctgggctcctgtggccggggtgggaggagaagaggccgcgcggcacgggtgagtgcccaggtaggcgcgggcggggccgtctggacagctcccgagggcgcgcggggcaggcgggcggacgggcgggcatcccgggcccggcgactgcgggcggccacctactcgagccctgcatgtcagacttgggctggattctcagagagaagccttagcattctcatccaggccatctctgacctgccttcagatccccttccactttgctcatttccttgcaaggtctagggttatgacagagcttgccatgttcgcctttggcttccttagtaacagaaataagcatggaggggcttctgcagtgatctagccctgtcctaggcgccatgggagcttacagtggaaatgcaggaacattctccgctgcagagagtctgataacctcgg

SEQ ID NO: 2522 - DNA, 4001 bp, Homo sapiens
gttcctcacttctgaaattaatacattacattcctgaatatggcatctttactctgaatccttaatattcctttaaattcctcacagataacaacaaacttgctagaattcaaatgatcactctcttccaaggtacaaaagttgtaagactactatctaaatcaagttttatttaaaaccaccctctccatttcaagtaaaactcaacaacacagctggaaaaggagggcatgaacccaatctataatcatcccaatccttagtctttgtcacctatccagaatttatctatccatcattcaccacctgtgagtacctgcataaggggtaatagcagaaatgctattatccaacacccagttacatcaacttaaggcctagatttcagcttcaaaagaattccattttttaaaattccaagacagaaaataaaaacaagtgaatcataaaataagtgatcgaggtcccatccaggcataagataacctcctgacccctatgtccccatcagtgaaatggatgaggcccatatttcaaacttaagcagtctgcacactatgaagctgcatggcgaggccgatgtctgaggtcagcacaagtctagtgtctgctggctgcccaagcctgggcccctggccagcaacccacctccagagacaagtgccaggacatactatagtgtttccatttaaggcccgccacttggatcagcccatctctgaaatttcttaacaccacctttccaggaagaatttttttggggaaaagggaggtggtgtctattttttgccaccgccttcccttgggctgtcagagcaatctgcatctctgggacaggattctttaaaaccactgggttatgtctcaattcatgggcctcttctcaaaaatatgtaaaaacatgtatggaacgggcccctttgcccatcatctaactcttatcatacatccctcaaaaaagaaagaaaagcccaataaaattgacaagtccattgtattaccttgctgcctctctccaaaagccaaattcatgacaactttttaaccaagacttttcttctgttactaagtggaacgttttcttctctaagtagcttttctcccatgcaagcagcgttcaaatctccaggggaaaggaggggtggggagggggtgggagactatctggcacaaactggacagagccgagccagtctagaacccgacggaagttactgaatccagcggccccagaggcccacatctcttcttagtgcgcccgaggttctagcctcactgttttggttacagtgttgaaggaagggttttaaacttggcaaagtaccgtgcaacatctgtaaccacatttgccttctggggatcggaagatgaatcccacattcctggctttgaagctttttgaaactgcagctaggaagaaccgagggagggagggagttgagcagagtttattggctgtctctccagcagaaaattcctcttggaagagatggatattttgagggtgggggaaattcgcctatctatctccttactctctacaagctcagctaggaaggtaagccccgtggccccgcggccagatcgatttacaagtcagagtcgcacaccctgaaggagttcacaacacacacacacacacacacgcactcacacacaccccaatacaaacctgagacccccgctccacgcctctgcccccccaccccccatatcccaccagcagttcaggcccaaagcaagacagttttgttccgcggctgcttcccccacggagaggggatcaagcttgggggagaaaggaatgaaagcgagggggaggcaccgcagacgcccaccctgccacccccgatccctgcctcttctcccgctaggctacctcctccctcagtcctcccggctccagcaggcgcggccggcgacctgcgctcacctcgggtcccgccgcggccgggggctgagccgggggaggcggagtgcgaggcagccgggcgctgcaggtcggcgcggcgcggggcggcgcggggcggggcggggcggtgcagccggcgagggagcccggaactctgcggggccgggagccgggggccgagggccggcccagagcggcggcggctgcggtggctgcagcggagcggtgcgtggggccgggagcttcccggccctggggccggcgcggctggccgaggagcaggctggcagcggcagcggcggcagcggcagccacccgggggaaagagccgggggagggcggggaggcggggtgaagaggaggaggaaggggaggagggcgggcagaataaacttcccgaggcgcagaggctcgggctgggagcacgaccgcgggcggggcgggcggaccagctgggcttgcccccgggggcggcgggggagaccgtcacagagagtagaaaagttccccctgcgccgagggggaggctgcggcggcggcggcggctgcaaagagcaggagccggagcgggaggagcgggaggaggaggaggaggaagtggctgcggagcgctcggccaatgagtgtctggagctgtgattaaccaggcagcaacacatcatttcctcccggcgcggatccagggagccgggaggggagagaggaggcggcggggcggggccgtccccgcgccccctgcaggcgcccggccgagggcgagcccgccgagccccgccgagcctgaccgcgccgcccccggcgcgcctggcgctgtctggccggtcgcttggcccgggtggaagctatgagcgcgccgccagcggggctcctcggaggcggcggggcaggcccgagctgggctcctgtggccggggtgggaggagaagaggccgcgcggcacgggtgagtgcccaggtaggcgcgggcggggccgtctggacagctcccgagggcgcgcggggcaggcgggcggacgggcgggcatcccgggcccggcgactgcgggcggccacctactcgagccctgcatgtcagacttgggctggattctcagagagaagccttagcattctcatccaggccatctctgacctgccttcagatccccttccactttgctcatttccttgcaaggtctagggttatgacagagcttgccatgttcgcctttggcttccttagtaacagaaataagcatggaggggcttctgcagtgatctagccctgtcctaggcgccatgggagcttacagtggaaatgcaggaacattctccgctgcagagagtctgataacctcggtccttagatacacaaaaacaccccagtgtgctaatattacccagagcatcaaaaaggcatgcaaggatcaaattttgcatggttcctgctgagtgtaaaggaaagcactaagccattttctctgccctctagaagcttataatgtacagtcctatcacaaagcagaataaaaacatgaaacctataaatgggaatgccataaagtatttttatctctacaggttcattcatgcagagggcatttattgggtgactgcagtactgcaaaaggttgcaaaggaaatggaagatctggtccctgcaggttgggagtttacaatctaattagaaatacaaggcatatatacgtgaaaaaactagaatccccagctgtaagcaaaaggatggagtaggtgggagcatttttttcataaagagagctttgtacctgtatgattggtgaggagcaggagaggcaagttcagtaccaatcaaggcaagagcacctatatgtatccctgctctatagaatgatgtaacagggccctcattgtcacttggctgaagtgtcagctctgccacttacaaactgttttgaactggggcacatttttaacctaagaagggaatacaggttgtctcgtgaggtggttgtgcagttcaaatgagattacaaacgtgaaagcttgtgaagctcaatgatgtacattcatggagtcctcattgtacaaactggcccttcttggtaacctttagagttccctcccaggct

SEQ ID NO: 2523 - DNA, 4001 bp, Homo sapiens
aactgttccccagtaattggggtttcttaatctattgtctcctgcttaggagaatattggtgtttaatggattccaattacatttagaataaagcaaaatccacaatcattatcatgacctgataggctaatagtctgggttcttcccactcctccaacctcatctctcataactcagccttccggagcactggtctccttttcacagctgtgatataacaagtttcccacctcatggcctttgctcttcttgttccctttgcctgtagtattctcccctttcttctcattctccaggtctcagctcaaatgtcaccccctcagagaaatcttcagtgactccccttgctcaaggatctgctccccatccttcctgctatgtatcacaatctgtaattcgctttttaattgtattagacccactagaatgaaaacttcatgagggcagggcccttctcctgttttatctaccatcacatcccaacgtttagaatagggtctgtcagtgcggtaaaatccaataaagatgtactgaattacaaattgtagaaaactgcaaagtacagaagaaatttttgtccatgctatttatctcttggatgaattttaaagtttcttctcaatttgaaagaggtttttataaagatatagaatagaacagaatagaatagaaatagatatagaaatcctttgtcatatgtgttacatatagcttttcccactttcatatttatttgcttttttcctaacacattaccttcattatttggggggtggggggcagaacgatacttgccccttgacaaaaagaagtcaagtaatacacataaagaaggaagtaaaataaaatacatcactcctaatcccataacccccgaaccactaatgtatacaacttctccaaatattactccgtggagttttacactagatatgcatagtgatgttctcattaaaatccaataacatgatagacataaactgtgtctatcaatattttactctgcaatttattttgctttaaagcttagaaaatctcccatccagatattttctaaatagtcaatattttcttccaatttatgatttgttttttagacacttaaatatatatgcaattttgatatggatcatccaattcatagctaatatacaaatctccttgacagtagtaaatgaattactttatggcaagtctttagataagtttttaagatcattatttaaagagtactttactacatgccaaactctttggcaaagagtcaaggcagggagggagggagagaggagagagaaaagacatgcactaaaggaacttggccttgtaggttaaaggatgttaggacagtgtggtaaactgagtcagggacacatgtaggagctgtgagctgcgttgggacacagaggtggagcactactgaatccggctggggctgcgggtaagggacggggcaggggcgggaaggtttcttggaggtgaatcttgagaagcacacctgttcagccttcctgccgttcggaggacgagtcccagcccatcctctcagtagtcctccaagacggtccagacagcacccaccagcctgaggaaaccgcggcagtcctccctcaccaggcagtgtggaaatacctcctgctgcgacgcggccctgcatgtgcattaacctgcccccactttgtcaacgggtttggtaacactcactgccctgatggaactccattcccggtccccagcgcgctccccaccccaaaaaggaccttggcaccccggcccgcccccggggagctccccttgcctggacttgcaggttggagctcggagccctcccccagagcagcggccaggagcttccgcctccccttcgcctgatgaatttgcgaagggacaccctgcggtcgccgggatgccccagctttccgctggaccttggcgcagtgaattcggccccgacgacagctcccgcggggctcggccacctgcccgacggcagcgcaacccccaggagacgttctccgacggcttcccggcgcacccgggtaccatctagtggcagcagaagcaggaggcaggctattttttacagaatgacctccactccggattagcatttctcaagcatttttaaaacctgtgtgtctttaaaataatcataaaatgtcgcactctcgattttctgttatttgaaattttaaaataaaatgccttgtctagaagcaaatcaatgcagtgatgatttgatgacgctttttcatttggaaatagtggccctccactcgtgaacgcccttaaagatcaccattctagcccgggaggatttgctagaccggtatttattgagagaaatctcttatttgaaccaaaagattccacctatccaaatattgccagtgaagtctttctaaattgtaagaagaaatgagaaactgataattaagcccctaatgtgtattataatttgcatattcacataggtcctattggtcttatagctgttatatttatgctcacataaaatcatacctgataatggtggttaccagatttggaaatttcactgaccagtaaaatttcaaaaataatttggggacccaaccaagggttacaccaaatttttgtgttgtcaaggaagaacattgaaaaaaaaaaaaaaagcatcctctattactatgatttcaaaaaagaagtcaattcacatgatttaatcatttcatactgtatacatatcaaaacaacacattatacctcataaatatatacaattatgatttgttaattaaaatatttattaaaagaataaaaataaaatagctcacattaaaaaaagaaaaaagagcattatactaccaatcaagaaagtaaagacataaatcccagaattaaggtctgactttaccaaaatcaaggctatcttttaaaaatttcaaatgtggataaacataattgtattttataatgttacatttattttcttttaatagtttttttttttttttgagatggagtctcactctgtcacccaggctggagtgtagtggcacaacctcggctcactgcaatccccacctcctggtttcaagtgattctcctgcctcagccttccgagtagctgggattacaggcgctcaccacccaccaggctaattttgtatttttagtagaggcagggtttccaccatgttggccaggctggtcttgaactcctgacctcaaatgatccacccatctcggcctcccaaagtgctggggctacaggcgtgagtcacctgcccagctttaacagtctttttctaatacaaattattaatctgggggttgactgcatcagaaagtggagctgagtgtccaagctgttattattccaacctattgtgttaacaatgaacggccatactccacatggaaatgttgtctcaagtggaaggggcaattttctgtagtgctatttttactcaatatggaatattctggaaactgaaaaaagctgaataggccggtcgcggtggctcaggcctgtaataccagcactttgggaggacgaggcaggcggatcacgaagtcaggagattaagaccatcctggctaacacagtgaaaccccgtctccactaaaaataccaaaaattagccaggcgtggtggcgggcgcctacagtcccaggtactctggaggctgaggcaggagaatggcgtgaacccgagagggggagctcgcagtgggccaagatggcgccactgcactacagcctgggctcaaaaaaaaaaaaaaaaaaaaaaaaaaaaaaaaaaaaaaggctgaataataatagccacccactccaagctacagagaaagctaataatggcagaccaggtgtctagctaacaagggacatctctgcccacggaacagggctgttgagctttcccggctcaacaagctcactctagataagatgttcacctgccagaaattcacttggcaatgcctccatcagtactggagcacaaatcttaacactg

SEQ ID NO: 2524 - DNA, 4001 bp, Homo sapiens
tgcatttttcttagacttcaaattttaagtgagcgactttgaatggattatcttttttttattttttgcatatttcaatgtcaaaagtttccatgccttttcaagaacatgaggcatgttgctatgctcaaggtctctgaaattttctaaagattctgggtatacaacaaaatatacccttgaagctacattttaaaaaaattgaatctgttttgtagaaatgtgtgcagccaagttatcagctcctccaaataaaaagagttgtacagacagcctccagaggcagtttcaccccatcaaaactgtgataccttgaagacttttttttgtaaactctattaaattgtcaagagcactttcagtatcccaagttagcagagttttcacccattttttaaagactttcccatagttggttttctcccacttataaatttattaactctaaatgcaaatatttcactttatcccatcatctttccgacagtcttgggctgttttcctaaaagataactggaatgttttaatcctcagattttgtcaattaatccttttcaataatcaaatttatatttgaatattgtatttagtgattctctcaggccatctgaaacactgaaatctgtacatgacagcaatcatatcattcaaatcattctcttgcacatgtcactaagaggaaaacgacccaccatgaatatagctattaatgtcaaacagattgtcatctgggaaaacaaaatgcatcaaaatcagcttcggacaaaacacagctctatgggaaaacaccagatttttatgtgcaaatgtcttcaatgtctgatagaaatttttaaagaatgagttagcaaagaatctgctcctcctctgcataatccaggacaatgtaatgaaaatagttttcgaggtaaagggcttttagtcacagcatattatgattttaccaaagatgcatttgccccactttctagtaaacattataaagaaacgtctggcttctagattgggtagagggctctatttagcctatcaaggcacagacctgttataaactctggggcgcttgccagaatttttttccccaggaactctgagtaaagatcgtacctcgaaagcaatgtgcgttgcaaaccacacagatttaagctcccactctcgcctccatagcttggcatctgcggcttttggggtattccccgcctcctaaaactcagactaaatcaccacctcccaccaccaccatgccaccatccttgagcagctctcaggggcttagcacagagcgcgtccgacgcatacctgcagccctccaggtccctgcagggtgaacccagctcccagccatgcgcgcacccacaaacgctctcctattttctccgctgcaaactgcccacaaattagtcacccacctcacccctactacttattcccccacgtccctgctgccttttccctcttccgggcggcttcgtccccaacacacctgtctacccctacggctgccagacgtcaggtgcccacgctgcaccctatcccgcgccccctcaatccgactggcgcttccctgtccgccccgaaggtcagtttgctcggagcaccccctgtcccccacccccgtgctcacccgcagacctcctcccagctcccaccctcgcgggcgtcgggagagaaaccagcaccgtacctggcgagagctcggcggccgctgcgagcagcaggagagcctggcggagcgctgagcagagcgcccgggtcatcgccaccaggcggccgcgccggggctgcgaggccccagagcagagcgaggcagccggggcagcacggcccgctttgaagttcccgggccgcgggaggggagcgcggcaccgacacccttttgaagtgcgcggttggctctagtcagtgtgggcgcccccctccccggccgcccccatcccacgccccctgcggctggcggtgcgcggcgctcctgccactggccccgcagccgggcggggagcgggtggtggggcgggcggcagagcccgcccctgccgcgcctccgccccctgcgccctctcgcagccgcccgggcctgctgctgcagggcaggcaggcaaaggcggccctgtgcccggcagtgagatcgcccagagctggggcgaagaaagagggggcgtggggaagcagtgcggagcctccgggactagatactcaggaatggggcttctcacgggaggaaaagccccactgagactttagggaaacttcaactacgcggcgattgcgcccaggtgatccgctctataacctcccgcagaagagccagcctcctagctctcctgacgtttgttgtccagggtccttaagtccaaccaggttgcgctgtgagagccccgcgggcttcctactggcttgtcccacccctgcgtcctggccatttgtgcctctggggaagggcgccctctctgttcatccctggaaatgaccagttgtccgactgccttctggacctataagctttggtttaacaaacttcatctcttcttgggtgccttttgggaacccttccctctatgaatggcgaccaaagctggaccacctgcgccaggtgatgtggccatctacaatgtgtgacccacgtctggtggtaaaagacctcacctatggaagataatttcggcagctacaacttcagcaattgaagaactaagggaacatacacacacacacacacacacacacacacacacacacacacacacggattaagggaaggggaagaattgtttaaagtagtatatgaaaaacttgtttgagtattgtttaatccctagaggctaactgtcaaacgggtgcctgaaaatataaggcctggattgtgcctgaaaatataaggacaacggcaacattaccaatttatagaaattaaattcaattcacctatggagcctgaacattaaagtgaatgggattatttcaatctgaacaacgcgaaaaagcaagaatacaatactggtgttattactactgttgggggttccttgaaaagtgatagcgtcataaaaattgctttagagtaaaacatttcttgcttcttcacctagctcaggactaaattatatgctaggtgttctaagttctatgaaagacctatggtgaaatgttgtatgtaattgactttattatcaaaggatcacagtatgggagatgagatggttgttggactttgagatgtgggtggcatcctgaggatcttttctgccaccatcttatattcctaagcacaaaaaaactttgttcttgttttatcctggatccaaacaaacaaaaaactggagatgtgggacaaatctgagccctttcagacacccacaaaacagatgcttttttaaaaaggcaagaaactgctaggacacattatattttgtctggtttggcttgctaattatttgataactgcaccttaaattgtgatctgccaatagatcatgataccgggagcctaaatagcagaatgtaatgaactttctgggtctgcttcctcaaaagtaaatggaacttaattcctccctatttcccagaactttgaccaggatcaaaaagggtagtgtatgagagagcattgttaaaccatacacattacaacaatggcagggatttactccccacatacttattttgtctctaaagcaacatcctctgcaagttgtaaagctctcatttgcaaaaaaaaaaaaaaaaaaaaaaaaaaggccggtcgcggtggctcacgcctgtaatcccagcaccttgggaggccgagacgggcggatcacgaggtcaggagatcgagaccatcctggctaatatggtgaaacaccgtctctactaaaaatacaaaaaattagccaggtgtggtggcgggtgcctgtagtcccagctactcgggaggctgaggcaggagaatgacgtgaacccaggaggcagagcttgcagtgagccgaaatggcgccactgcactccagcctgggcgacagagc

SEQ ID NO: 2525 - DNA, 4001 bp, Homo sapiens
ataagactagactttatccatttattaaccacaaggaaatgtaccattcagcaaaattctatacattacaaaagattatatttaaaggggggtggggaagacggacacaaacacacaaacacacacacacacaccccacagaggtacacaaagaagactaccaccctttaattttcctgtggcaaacgagataaagacatggccatgaaacctgtcaattcgcccccgtttccaagagtcccccgtaattctatgccacaagcttgtaactgaatattaaattttacaataaatagatccaatgagacttatttaaaatgtttcatctattgaactaactctcctgttatgtacatctgcacacctttcagctagatgctgtatttatttatagaatttcaaatacaaaagactagatagtttttccaaccactggttgcaaccatagaacgtcctcacaaaatcaaaatttccaatataaaatggcccgtttattcccccaaccttgagctaaaacctattttatgagtgtactatatttaacaaaaacaatttcacatgggttgttctaaaccgaaaacaatgcttcaatacaaagcgtttaaaataagtattccgtaggtaagcaaaatctatgccccaaaagagcacacaaatggtggttgaacgccagcacattaccaataccaagcggcatacctcttctgcactgggttatagttaatactccaacaacaactacaactatttttaacactgctggacgctgaagttgaagaaaacgtgaggggagacccagattaaattgctgataggatgtattgtttcccacagccaaaattaagcagcaactggcttgatctatgtcgtgatattcaccggtgaagcactaattaaacgatgacaaaaagcaacccttgttttggaggagcccacactaaatactcctttcagatctcaacctttgcataaattgtcacttgtggtatttgcggcttaattgcaacccaaccagcgctgtcatccagtgttatggccacaaaacatgactttctcacttccacaacaacacagcactcactcttatcagctcgccgacccaactcaaaaagagaaaaatgcatggaggtttccagatcacaatcagacctgggggcggggggggggggcggtggcagccgaggggcgcagggagtgggcaacctccccaggctccactggactctccgactcaacaccagccgcggcccccagcagcggccgccgcggccgcaggagcagccccaccgcgccgcgctccctgcacctacctgaagaacaggagataagaaagacggcaaacgccaactttgcagcagctcccattttcccgaggcgccggggaatccggaggaagttctcgctagatatccagttccctgggtcttcctcggagacaaacctcctggtgtaaaatcaaccgtcataaaacatattcggaagcccagaccaaaaaaaaaaaaaaaaaaaaaaaaaaacgctcactgggttaaaaaaaaaaaagaaaaaaaagagcacaacgataaaaaataaaatgcaccacgggggaaaaaccgccacacacacgcacaacacacaaaaccaaacaacgaaaagccaacaacaacaaaagcgggtttaaatcactgtcaaaatcactgtcagctccgctcgcctctcccgtctctcggaacaaaacgccaggctgaggcgacgaagaggcggcggcggcagcggcgtccgctgccgcccggacagtctgggaactgactgggtccgatgtccggaccgaccttcaacccagacacctaaagtccgaggaccactggcggccgagctcgcggcggtggcggcgaggcggctgcggcgcggggaaggggcggcgggcggcagcggcggcggcggtgcaggcggcggccaagttctggtccaggctctggctccagctccgggctccgggctcggccgcgttttcggtctcctggcctccgccgggctccgccccccaaacttccggttccggcccgaagctggaagccaggcgcagcggaggaacgctcggcggcagcggcggcggcggcggcggcggcagcggcggccgggcgcagcgcgcgtgccgggccgggagcgcgaggagattgtcggggaagcgaggcgggagcgggggaggggtgagagagcgagggcggggcggagtggagggcgaggaggcggggcggacggaggctcgataccgcgaggcctcggcgtccggcctgcttgggctagagataccgcgacaaaggggcgcgggcgcctcaaagtccctaagctgtggctgggctgtggccgggcgagtagatgcgggctaggccgggcacgacccgtttccaaatcgcgtccgacgggcctgtctggagcgcccacccaaagggtcaggagaagcccaagaggaagaggaccccgaggtggggcgagtggccagggacttctccaaggggcgtctgcggcgcccagtctttcctctggggggacgcctcgtccgctctgataccgaggagtcggtggaaggcggacgtgggagctgtttcgccgcgcccgccgagctgcccaggcgagctcgcgacgcgcgagctggtgtgtgcgcccccagacttagcactgcgtcccaccgctgcagcttctgcacacgcgtgctgtcttggtgactagaaaagaaaaagaaaaaactcacggaggaagggctgtccacccgctcaggatattcacgccatttatcacgatgcgcaacttgaatccattcccgccgttccttttacacacaaagcattgtgttgaaaactgttttgcacgtaataggtgcgcaaatacttgtttactgcgctttgaagaaaaaaatgaggatttcgaacgacatatttgatgatcagacaagtgattacttgtcaaaattttagctatttaagggcctgtttttaccccttaatccatgtcgattgcttacaagctggtgtgctaggcacggaatgggatccaacaggtaaaaataggatggatccctacctcaagtagcttttagtatttgctgtattcagttggttgcagaatacaaactagagactattgaaggtagttgctctgtcatttaccacactttagtgagcttcgtgaaggtagagatcttgattttttccttattttattccagcacccagaagtatcaactagcacataagtgcttaataaataattgtataaatgactaagggatgactgcctttctcttaaatacagtctctgttaatgtactctacaaagttttggtttttaataaaacaactgtataatatggctaattcatgtttcatttgtggtttactgattcccaccttttcccacaaagccaagtcttctcacttatatttacagcagtttacttcctctaaattactctgtatttctgtctattaagttcatcctgtaattatctgcccatttctacaacttatcagggttattaataatcaacgtggctctttaaatctctccaagattgccagttctcaaatcgtgatgctcagaatttgactgatgttggaacagttacaaagtcccaagtcggtattaaaggtgtctgaatgatctcatgtagttctcctatctttatgagttggtcaaaggaatatgtgtaagccttccattttctggttgaattaagagttgtactaacggttctggaatggaagagtatattttactctagaaacacttgaagttcattagagaatttgatgtcagttagggtcaggccccactcttgtcttatctgtgcatcacttcagtatttctttaattgtgaagcctgagcaagtggaataactggaatagcgagtaatacaactgaaacttgtaaatatattccttatcttaccaactaaatttgccattataagaacgagagcatgaaaattatttttctgtagtactaaagagaagcagccagt

SEQ ID NO: 2526 - DNA, 4001 bp, Homo sapiens
acagcctgcttttcaagaagtaataccttgagactgctcaagaataacctccttcatcaattagtgtgactcaggtgggtttgagagggaataatgtccacaattccttggtcagtggccatgatgcccctcctcctcaagggcaagagatcagaacaagggatttgaacaagaggagttcaccagccacaacatatagaagcagaggaaaaaagagtactactggaaagataaaaactacatggttaagtcatgtcacaaaagcaagaggtttaatgttatcaaggccttcattcatttcagacacaccattgtttagcttccttcccaaaccgtgcacaaaaagaactgtcagcctgccttaagcatgttccttcttccatttaaacagacatgattcttttggttaatctctggcaatgatcgccatttcacaacacattcagcccacccggaactgatcaataccactacagacataagactagactttatccatttattaaccacaaggaaatgtaccattcagcaaaattctatacattacaaaagattatatttaaaggggggtggggaagacggacacaaacacacaaacacacacacacacaccccacagaggtacacaaagaagactaccaccctttaattttcctgtggcaaacgagataaagacatggccatgaaacctgtcaattcgcccccgtttccaagagtcccccgtaattctatgccacaagcttgtaactgaatattaaattttacaataaatagatccaatgagacttatttaaaatgtttcatctattgaactaactctcctgttatgtacatctgcacacctttcagctagatgctgtatttatttatagaatttcaaatacaaaagactagatagtttttccaaccactggttgcaaccatagaacgtcctcacaaaatcaaaatttccaatataaaatggcccgtttattcccccaaccttgagctaaaacctattttatgagtgtactatatttaacaaaaacaatttcacatgggttgttctaaaccgaaaacaatgcttcaatacaaagcgtttaaaataagtattccgtaggtaagcaaaatctatgccccaaaagagcacacaaatggtggttgaacgccagcacattaccaataccaagcggcatacctcttctgcactgggttatagttaatactccaacaacaactacaactatttttaacactgctggacgctgaagttgaagaaaacgtgaggggagacccagattaaattgctgataggatgtattgtttcccacagccaaaattaagcagcaactggcttgatctatgtcgtgatattcaccggtgaagcactaattaaacgatgacaaaaagcaacccttgttttggaggagcccacactaaatactcctttcagatctcaacctttgcataaattgtcacttgtggtatttgcggcttaattgcaacccaaccagcgctgtcatccagtgttatggccacaaaacatgactttctcacttccacaacaacacagcactcactcttatcagctcgccgacccaactcaaaaagagaaaaatgcatggaggtttccagatcacaatcagacctgggggcggggggggggggcggtggcagccgaggggcgcagggagtgggcaacctccccaggctccactggactctccgactcaacaccagccgcggcccccagcagcggccgccgcggccgcaggagcagccccaccgcgccgcgctccctgcacctacctgaagaacaggagataagaaagacggcaaacgccaactttgcagcagctcccattttcccgaggcgccggggaatccggaggaagttctcgctagatatccagttccctgggtcttcctcggagacaaacctcctggtgtaaaatcaaccgtcataaaacatattcggaagcccagaccaaaaaaaaaaaaaaaaaaaaaaaaaaacgctcactgggttaaaaaaaaaaaagaaaaaaaagagcacaacgataaaaaataaaatgcaccacgggggaaaaaccgccacacacacgcacaacacacaaaaccaaacaacgaaaagccaacaacaacaaaagcgggtttaaatcactgtcaaaatcactgtcagctccgctcgcctctcccgtctctcggaacaaaacgccaggctgaggcgacgaagaggcggcggcggcagcggcgtccgctgccgcccggacagtctgggaactgactgggtccgatgtccggaccgaccttcaacccagacacctaaagtccgaggaccactggcggccgagctcgcggcggtggcggcgaggcggctgcggcgcggggaaggggcggcgggcggcagcggcggcggcggtgcaggcggcggccaagttctggtccaggctctggctccagctccgggctccgggctcggccgcgttttcggtctcctggcctccgccgggctccgccccccaaacttccggttccggcccgaagctggaagccaggcgcagcggaggaacgctcggcggcagcggcggcggcggcggcggcggcagcggcggccgggcgcagcgcgcgtgccgggccgggagcgcgaggagattgtcggggaagcgaggcgggagcgggggaggggtgagagagcgagggcggggcggagtggagggcgaggaggcggggcggacggaggctcgataccgcgaggcctcggcgtccggcctgcttgggctagagataccgcgacaaaggggcgcgggcgcctcaaagtccctaagctgtggctgggctgtggccgggcgagtagatgcgggctaggccgggcacgacccgtttccaaatcgcgtccgacgggcctgtctggagcgcccacccaaagggtcaggagaagcccaagaggaagaggaccccgaggtggggcgagtggccagggacttctccaaggggcgtctgcggcgcccagtctttcctctggggggacgcctcgtccgctctgataccgaggagtcggtggaaggcggacgtgggagctgtttcgccgcgcccgccgagctgcccaggcgagctcgcgacgcgcgagctggtgtgtgcgcccccagacttagcactgcgtcccaccgctgcagcttctgcacacgcgtgctgtcttggtgactagaaaagaaaaagaaaaaactcacggaggaagggctgtccacccgctcaggatattcacgccatttatcacgatgcgcaacttgaatccattcccgccgttccttttacacacaaagcattgtgttgaaaactgttttgcacgtaataggtgcgcaaatacttgtttactgcgctttgaagaaaaaaatgaggatttcgaacgacatatttgatgatcagacaagtgattacttgtcaaaattttagctatttaagggcctgtttttaccccttaatccatgtcgattgcttacaagctggtgtgctaggcacggaatgggatccaacaggtaaaaataggatggatccctacctcaagtagcttttagtatttgctgtattcagttggttgcagaatacaaactagagactattgaaggtagttgctctgtcatttaccacactttagtgagcttcgtgaaggtagagatcttgattttttccttattttattccagcacccagaagtatcaactagcacataagtgcttaataaataattgtataaatgactaagggatgactgcctttctcttaaatacagtctctgttaatgtactctacaaagttttggtttttaataaaacaactgtataatatggctaattcatgtttcatttgtggtttactgattcccaccttttcccacaaagccaagtcttctcacttatatttacagcagtttacttcctctaaattactctgtatttctgtctattaagttcatcctgtaattatctgcccatttctacaacttatcagggttattaataatc

SEQ ID NO: 2527 - DNA, 4001 bp, Homo sapiens
caaatttacctttaaattttaataatgtttatcatactttttatattttcatctagtgttctaataataatttcaataataactccatccagacaaaaaatttaatacttggagctgttgaatacaatgagttctaaatttctcttcaaagaatcagtatgtcagtatgctcggttctttgcgctctaaagtctagcttcctcgttctcctcgcctctagtttcagtaaacaaccttttccaccagttctaatcagtagttcacctctattcctctggtcacctgctccatcctgagtcacccctggtcacctgctctgacctgaatcatcctgagtcacctgttctgtaaccacccttcctgccaaattattcaccccgccacttgagctcgtacgcctgctctttaaaatagccagtcggaattagcttagactgtgcggtccaaccctagccagtaggggaaagacacagcagtagaggctacctgcatcaggaataagaaccccttcccctcccctgttcaggtgtgccgttgccattgcttcatccgcgagtcgcacccttctatagaggtaaaattgccttgctgagaaaattctttgagcgctagttcttctttttggcaccaaagaaccagcatttgtttctaagagagccttattgtcaaaggaaattaagaaaaagcattacacttattcatacatgtgcatatatgtacatatacatattgcagaaaagtatgatagggtgagcaaaaaaaaaaaaaaaaccctcaagcaaaacaatggggtaattcggtgggaaaagtgaaatgaaaatcaaattcaaagaggaaaagaaatgagtaaaatttcccattgttgaagagttttattttaaatgaagatggtggatgttaaatcactaccctatttatattccattgcataaatctcagagtgacttaatattttcatttataaatatcaatattttcaacaagccagacattacaaacttggcaactacttaaacttaggatgaaacaaaaattagataacaatttcattcttttaagagctacaaagaggtctaaaaaaaggtttgacctctgaaaaattaaccttaaaccatctaagtgtccttcctaaaactcaagtcaagcccaggtagcttcagtggcaagcaacgagaccactagttaaaagaccctcttcttttcctacccaacttcaacattcccccgtgccgcttactcccgcacccagcagccgcccacttctggtcctcagcagtcccctgacccctcctctcccgctcccccacttccctccccattcccgtacttccgcccgtccaagtcctcgggcgcatgcgcgtttcgcctccctccccgccgccgctgctgtgtcatggcggagcggaagtcccagccacaacgggaaaaggcatactttaggtgggaggcgcttctcacagctttctccccttcctcccataacctttttgatctcccaccgtagaggggcctcctaccctgcactcttccgaacacctcgtagtccacggatttgagtgactgggcggtagacatggcggcggcgagccctctgttgaggagccggagaggggctcggggcgcagcgactgcggcggctgcgagagggaggggacacatgggactgcttggcgcaccccgcgcctgtcaccggtcccggacgctagcgcgccggggtcacgcgtcggaagcggcaaatgagactgcggggcctgggagcgagggcagccggggacgccaggagggaagaggccgctgggccccaggcatcctaggcctctcttcccggactggggaggatgctgtctccacagcgctccctaccatttaattgatcaaggtactctgttctcaaagttagtaaataaaagccggatgctgtgcccaaaaaaagagtggcttcccccagctttattaaagtgtaattgacaaataaaagttgggtatatttgtggtgtacaaggtgatgttttgacatatgtatgcattgtgaaatgattacatcaatgaaattaacgtatccattgcaccattttttaatgaagagaacatttaagatctactctcatcaatttttaaggacacaatacatttatcgcagtcaccatgttagacaacagatcttcagaacttattattcacactaactgaaactttgtaccctttgaccaatatctccccatttccaacccctttcatcccccatcccaggtcccccaccccactccatcccagcaagattggcttttgaaatcaagggcctgcgtgtttagtgttttgagagttagtaaattatttatgaaatgtttaggtgactaccaagccagcttttaagataaggtctgcaacatcttgagctcttctgtacagtcaggaaggaattgagcctgaactcgtattctaaacggattgtgatattttctgggataagaaactttttaaaaatatgaagtcttttatgctagtggaaacagacaaaagaaaaacactgtagtcatcttgtctgctgttcatacagtttttttggtgtgggtttgttgctgttgttttgagacggagtttcgctcttgtctcccagactggagtgcagtagtgcaatctcagctcacagcagcctccacctcccaggttcaagaaattgtcctgcctcagccttccaagtagctgggattacaggcatgcgccacctcacccagctaatttttgtatttttagtggagacggggtttcaccatgttgtccaggctagtctcaaactcctgacctcaggtgatccacctgcctcggcctcccaaagtgctgggattacaggtgtgagccaccacacccgacctttttttttttttttttttttgattgtcttgattattctcagcaacatcccaattgcctagaaggttaaggctgaattttatttcctggtgagctattaccaagttttaatataaaaccatccaccactccaaaggatctggatacagctattgataatctgccaccttctagaattccaaatctgtttacttgtgagaatttgcatttctctatttgttggcctcaataccttggcatatttctctgcatctggccacacagttaaaataatccactgcaatctgattcaatatactgtgccaattctattagagaacaccaaaaatcatccaaaacttggttagaatatggttaaatcatttttaaagtaaaatatattctggaaatgctagtgcagttaatttatgtagtgaaggtcttagtttattgcagagacctcgtaacttaactcttccatctcccagttcattccatgcagactctagaatcaacataaattttaaatcattcttcttaatacgttcaaaatagaacctaaggtcttcagcctccactacctgcttatgcaaatcctgcatttaaactatagtcaagacactctcggttattctgctctctcagtacagaggtttaaaacaaagaacctcttctcttgggtctactctatctggaatgcctcccccttctccaaaatcttcctctatcccgctcagtcatctctgcgagtggttaccagattttatcctagttatttagtgtgccttccccactagtacagtcagccatccatattagcaggttctgcatccatagattcaaccaacctcaaacagaatttttttttttaagtatcttggcctgcacggtggctcacacctgtaatcccaacatgttgggaggccaaggctggcgaacagcttgagcccaggagttagagatgaccagcctggacaatacagtgaagccccgcctctataaaaaatacaaaaattacctggctgtggtggcctgtgcctgtagtcccagctacttgggaggctgaggtgggagtaggatcacttttgcccaggaggcagaggttgcagtgaaccgagatggggccactgcactccagcctgggtgacaga

SEQ ID NO: 2528 - DNA, 4001 bp, Homo sapiens
agcggtggttcatgcctgtaatcccagcacttagggaggcccaggtgggcggatcacgaggtcaagagttctagaccagcctggccaacatggtgaaaccccgtctctactaggaatacaaaaattagctgggcgtggtggcacatgcctgtaatcccagctactcaggaggctaaggcaggtgaactgcttgaaccccgggaggcggaggttgcagtgagctgagatcgcgccactgcactccagcctgggcaacagagcaagactctgtcttggaaaaaaaaaatggtctaaaaaaccttacgatctgcaaatgttatgaattgatctagaaagtaatgtttctctttaaactgtatgcttccttgggactcatgcttatttttacctacgaacaacagattaataacataagtgaaacagttgtgtcagggtggtgcaaatataattttaatatctcaaaatacatatttattctttttactaacatttatccttaaaatgaagacccttaccctatccctccatcctaaccacaatcctacctcaaaatgtccttcaatttgtactgacttaccacttctcagcacttcctaacaagatcccttgcctttcattagtcacttgtaatccatttcaatcggaaagaatcataagacagctgttcaagtgataacactctcaacacctttagtatccataccaatccattacaatttctgtccactaaatataaagaaaaaaaatactacacatggtatcatggtgaaatttgggaaccagtacaaccatgcaagcctacaatttcacacactgggaaaacattatttcacactttattactaattaaagtatcttacacgtcaatttttgaaagataaaaggattttaaaatacactaaaagttcacgcaaacttacttccaccaaagttcagatcccttaatgcatctccatccttaaaatccaatctctctggaaaatctaatgaaataggaaccctctactttctagcctctaaattcatcaaactcgtcactcttgataatttctttgtttaaaagtgcaaggaaagcattcatagtggcagcatcacgagttggcttaccaggtttccgcctccccccatctcccaagcacctccaataagctacaattgaaataaccaagaacgtgcttaggatgttcgcaaaaacacaactcttaagactccaactccagtctccgcctcccaacgagattactgcataagtacctcctacagcagaaattctagttccctccttcgaggaccaggaagaattctggagctttgggcccttcctttctggctctggtaggaacacacaacactagatttgttccctactaaggcaagaaccctgaccacatctccctctccaaacaagatccagccaccctactccttaccgctttcccaacaccctccccgaacacaaagctagggagcaaacccctctcaggcgctcagtcactacatggagcccgtccagtagccctttcccactcagagacaggcccatctcctttattctttccccaaactccgagagccacacccccttctacactgaaaacttagggacgcgccaccatcgccaataccccgcccccaaacacctgatagacccagctcccctgctcttccctcaaacgagcgctccaggcgccggcctaagccaactcccctgggtctttaccgagtctctggtgggggccgaagcccgggtcatccggaggtcgcggcgccagcacgaaaggaaccacgctggtcaggaataggagagactgcctcatgttcccggccccgctaccgactccacctctctgggcagccttcgcctgacggggtttcggaaaactgctcacatcgggggaggacgggatccgcccggcctagcccctcaatcctcttttccctcccgcgccgcctactgggaagattctaccgccaggctcgacgcccccagaagtgcaggtggcgttaccaaaggccggctcagccagcttccggccgccgctgtcccccgcaccacccacagccggaagccggctgccgcgcggcatcccgggaggctccgcttgccccgccccacgccggtgcgccgcgggcctctggtccgctgccgtgttcggccccgcccgtcacgtctagctggggctcgcccggcgccttcctggacgcagacgtatgagtcccaactccacccagtccggcctggcctctgtccccgggtgaccgcggaatgggggggcgggagctagcgagcaggccctcaagcgcgtctggccgcctcctttgtcttgatgcccacgtctggttaggacccctgctgtccattttattaaaggagctgtagaaagcggcctggggcccagcgacctgcccagggcggacgaggaggcgcgactggcccgatgccgcaggctctctgcccagtgtgctcaggtgggagggcggggacatgaatcgagccacagagtgccctgggcacggaccccccgccccccccggccccgggccccgagccccgagccccgagcccggccaccgaagcccgtgccactcgccagctcctgcgagacgagcctttcgagcgcagctcaggcatttggttcagggtcctactgccggagtcgtctgaggcctccatccgtctgtcgtcacgaaaaaggttttggggggactaataagcacttcctgaatgcacatttgctccacgcccctgctgtagggagagggtctgcagacacttcaacaaatagaatcctaggaccttacctgtgagtacaagagctggaatcttcccaccaacttcttaaaattcaatcctatacttggtccatttagcttagactggaaatttcccaaggcagtttgttttgcaatcttttgcatgattttagctctgtatagtttagtgaatgtttatggtactgaataaaacagtctaaaaacgttgggtacatgttgctgttttatttagttcaaccaaagtttataaaagtaggacataatacgttttccacttaagagtgagacagcctttattatgaaacggtaaattgttaggaatactagtcctattcaagtttcaaggcttattcctaataaaatactcaaactgtggttaaaatttatgttaatggtggtttgccgcagtaaaatatcagcgtctttttcaacaatacattgttggctaaaattaaccggacctggtctgtacatctgaagtataaaatatctttattaaacatacccattagtggcatacctagtcaaaaagtaagcagaatttcacatgcaaattgtatacaatctgtaaaaattgtattccataagaatgtgacagttgagtacggtttttggggggcttttttggtgtaccataataatgtcatctggtttcttttctgaacatccagtcaccataatgtccggcttgtaactttagtagatcgtagattgtattattttggtatccccaacagctcttgtacagtgccttgctcatagaaggtacttagctgtttagtaaatgccgtttaaaaaaaaaatcccgatccattttcttttcttttttttgggggggggtggtgggggaaagagtttcgctcttattgcccaggctggagtgcaatggcgtgatcttggcccactacaaccgactgaacacctcctaggtttaagcgattctcctgtctcagcctcccaagtaactgggattacaggcgcccgccaccacgcccagctaatttttgtatttttagtagagatggcatttcaccacgttggccaggctggtctcaaactcctgaccttaggtgatccacccgcctcggcctcccaaagtgccaggattataagcgtgagccaccgcgcctggcctgaataaccagaagtcctagatttccagggacattccaaatttcaagtaatcttttcaattcacaaatcaggacccaaattattccaatttg

SEQ ID NO: 2529 - DNA, 4001 bp, Homo sapiens
ttaattgctttcttaataaaatgctgcagtaaaatttgtgaactcagattctggcagaaaatcaaatcaaaggaaaactcttcatgatagttacttttgcatagccagcctcctgcctaccttattatgtttttgctggtgtcttgcctttgtgtcaagaacgtgataagggctttccgagtcttggttgatgtaatatatgagtcttgaaggcagtgtgatttctttctgcattgcattgctgtaactgatattactgctgctattctgttgcaatgtattgtcttcatctgccaggactcccaaatttttttctgcagtttcattccaatgcggagctggtggaggtaggggggtgggggagcagaaaatacaaacatacacaaacacacacatatttaccccataaatacataagcactaaaatgcatttttcctttaatttcaaacacaaagttttctatttataagcagttaagaagtagagctagagtaaagcaagttatttcaacaataaaatggcctggagaagttaataaatagccaataaggcttatacaactgtgcactatttattttgatttatgtcttatatatacatttctagtcagactcaaatctatacttctaagtgttggggggggggtagaatgaacttgagggaagaagagtcattaaatgaacatgttcaggggtcctgcccccgatctccaccccttctctgagtccacagaagcacaactctactctgcctagtggcatcccatccaagagctaagaacgctcctaagataacttgagtactgaatttatggataccgaatattaatcgactcttttaacaaaatggacaattcccttctcttttaactttaagatgagcaaacatactttgccatgtagggatacagatgctggcagcttcccaatttctttttattttcctgacaaagccagctttctgctttcagtgacttccaatcatcaatatatagaagatggtattatattaattgttcattataatgacaagcactttgagaaatcagaaccaaaggtcgtgcatgaagtatgtcttcagcaccttaattctttggtccccgaagtgtgcctcccccaccttaattccaaccgcactgaatgcgccggatacgaaatttgaggaaacagcccattaccactattatcactacatcctccccgcattcacattaaggttccaccacgcaagtagcaacttgctccctcgctgtatttcccatccactggttgcccctccgcaagttgcacagagatcgctgagggacccaggatccactaaacacctcccagtggaaccaacaagaattggaatgggtttttcgcgaatgcaacagaaatggacttccaaaagtgaactgggatgaatgggggtttgggaacgagaagggtggaaagacaggcagggagggaaggaaaggccgagccggggacaagcccggagcacacggacccgcgcgcccttcgctttcctctgcagggccccgcgggaaagccaacgcaaagggcacggggccatacccaccgctgggcgcagcagccccccaggcgcggggccgggacgaggcggcgagcggaggcagcaggagaaggacgagaagcaggcggcagggcggcgtgcgggccggggcgctggcaggcaccgagccggcggggccgcgttgggggccgcaggaagcgccggcaaggctgcagcccgccaggggcggctgccgcgagctgctgccgggcggcttcatggctcatagctcccgggcgccgctccgtgtggccggcgagagcgccgggctagctgcggggcggccgcgggcggagccggtcacgccggctcggcgcgcatggtgccgcggcgggcagggggctccgggctcggggcacggggcgcggggctcggggctgggcggcgccccctttcccggctcgcctagcctcgcagccactcccggggcgggacgcagaggagtccaggggtcctcgccgctccgccaacttggagcctccccagcggctactccctcccccggcgggcgcggccgcttcagcgactgcgggggctgccgccgggcctgaggatgctgaggcggcgcgcgggagcgagcggcgcggggacgcgcgggagcgagcggcgcggggacgcgcggagcgggcgtgcgccccgccccccgagagcgcgcccgagcggggcttcgggtgctgatgctgttgctggatgctgtgctgctgctgttgcctggcccggaacgcactgcgcatgctttgttggggggcggggaagggggtaaagcagcagagtgatgcagcagcccaagcagcatcggaggtgacgggtggtacctcaaaagatgggggcggtggagggggagccggcagtcacggataagccagaagaaagagagtacgggggtttccaggccagagacagggatgatcgggagaaaacaaccagccgaagtccacctgccttttccaccaccccagacttcacataccctctcctattccaacctcttcctgctctggataaactaaggccacgcatctccttcttaatcccttatatatttgcttcctgcatgtaaatataaaggattgcagccggggaggtaaaaatagcgcggctcctcattcagattgccagcagcgggtgggactgcggctgagaagagcgtttgcgccgcaggctggcgcggagtggcaggaatcccccgcgcaggggcgctctgccccggcctgtgtcctccctgccggtgcctggggtctttgaggaaagcacaagaagccggacggtgtttgctcaaaagttcagaaagtatgactgggcatattcgggaaggacttcgacattctggcggggaagcaatacagagattagaaaccaagtgtgtggcagctatcttgggaaatccgttgtttgtcaaccacggggatgggcacacatttaggaggacacatttctatttttgagatccagtcctgacttctgcagaggaaaggggaagttttctctcgttgctgtaaaaaatgtaaatccctgacttcggtgggttcgcagccactaaatctgatggcttcagataagagtctgtggcatatttctgcccccaaactctcataatgcaagcattcatttattcaccctcccaatgacaatctgagtgataacaatgttgtcttactccgacatccacggggtgagggctggggtggagaattccatgattaaaagaaagaatgtgggtataaaagtgccatggccatgacagaactcagtgttagccatcatcttctccactcacacttaacaaagagaaaagaagaagacatatacgcgcgcgcacacacacattacaaaactgttaggtaaatactgagataacttcctttctatgttgagctaggatattattatcacatatttattcctgtaaatttgtaattgttgctacctcccccatgtgagggcaacaacagttttcccttctgcacaccattgtgtccctaggacctcacacagtgtctgaggcacagagaaatcgcttggaaaatatgtactaaatgaataaagaaatgggtgatacacacaagcagaagtcacacttggggcaggctagtgaacactctagccccaccggagtgcccactgcaggtcaatgttcttagggttgtctccctcaagtcaagtattctctggctaggttttccaaatttatatttgacacaatatgcatcctgaaaaagggcctgagagaaagcaagccagaaaggagatgtacaagcaatgagaagggagagggaaatgaaaggtgcaaagcacccagatgcaagttacttgaaaggcatctcttgcaattcagtgacaacctcttaaagtctgttctgataaataaacctatcagccaacctggactgaccaaacccacccaccagttacaacacatcatttcatgcacttggggtatgga

SEQ ID NO: 2530 - DNA, 4001 bp, Homo sapiens
catggctgctagaggctcacgtcagtcagcaaggattctgggcacgccctgcctctcctgacacccagaaggtcaccgcttcagagctgactctaccccagccccactaaccacagaacagagctggcgtgggagttaagacatctctaccagacagagcactgcaggggcaggaagtgggggagcctctcttgaccatcattggcacgaggctggcaggctgggcaccaaacccagatgcagacatctccgcctcattctctggtcaccggcttgctggctccccagggacacacactgcctactgtccctcaggtcccctggtctctgcagcccctgagggcctggcacttggtgggaacacaatactataatagttaagctgaggccgaaattccaccccttccagtagaaagcgtgctccaggaccagcagaatgcgtgctttaggaccaggagaccctacgtcacagtggccggcatgactgtccccatttgcatccccacaccacaccttcagtggggagaccaccattctccacttcatagaactccccaggcaccccgagctcccggaggcaggaaatatgacaactgcgtcttccctctgtgcagcccttcacgtatcctaatgcgctttcccccacatctcctgcaatcctgacaacaaccgtgtcatgcaggcagagcggacgttatccccatttgacaaaggggcactgagtccacacagctagtcagtgctggggagagatgggaatcaaggagccctcttcccaagggaggtcctccttgccagggtcactgacagggaatggccaggacaatgctgcctcaagaccagccctgggtgggccttcctgtcacacacttagactgggcacaggtgaagagtggccctgaggcccaatgccctgacatcctcctttccctggggccaagcacaggcagactccgggtaatggcacaggggtgaaaaggcagggactagggagagaggtgagagccccggaggcccccaggacacattttgactcaaaggcaaagcaaacagcaactccaacaggtcccaagttggtgagagctgcaggagaggacgctgtggggggacagtgggcaggactcacctcccgcagcagctgcatccccttgagctcctcctgctgctgctgggccacggtgacccccaggaccaacgtgtgcaccacacaggagaccacggagatgatcacgatggggctgaggctgaggggcagcgtgatgaagaaggagaagacaaagaagacctgccagcccaccgtgtcactagccgcgtgggcacgcgcgaagttcaggcccaggtaggagaagatctgggcggttatgagcagccacagcacgtagggcagcactctgcgggtgacccggtccgggagcagcccctttttgcagagcacgaagaggatgatgtccaacaccagtccaattccagccacggcgagggaagccagcttgtcgctggagaagaccacagcacacatgaccaccacgtagcagtcaaagagggctgcaaagaccaccagcaccagcagggtctcgtggcgctgccttttgaagtaggtctggtagaggttctccaaggactccggcacgaaagtcagccgcatgaagcgaggcaggcacaggcaggagcccgagttccggaccgagatttcatgggtccggcccaccccgcggtcagggtcggagggcaggctgacggagtactcggctgagtactcggccgagtattcgggctcggagaagccctggttcctcggcatactggctggtgtctgctactggccctagagaagtggactgggaacggaggaagagctctggactgggcctcctctcagggctctctgagaccgggggagggctgagggcctcttcttgtctggggcggaggggaggccacctccagcaggaacgcagagcgggtttccagagcacaggtagcactgatcagctagaactgaaaagggcattgctgagtagaagcacctcttccctcctaccttgcggtttccccatgacccgccctaaccctcataaaaggatctctgctgcaagagcctcccaacccagggccttccctgccacccccggctcacaccaccgcccaccgcaggcacacttagtcctgtccacgccagacactcaatttcctgtccctggcttgtggaagggcctagccgcctttccatccctggtaaccggtttctctctgtcatctcttctttctcagtccccgacttcctcacctaaattccctccaggcccagtccttagaagctgtaaataaaatgtgccggaaagaaatcaggaccatcgtgggggattcctgagccttccttctgtttacttcctttttccaccaaacccttggaggctcgggctccgatccggcccccttcccacgctcggggcgctgtcttcccccccggaagcctggccctgcccctgcgtttacctgtgcgggaactcggccaccgcgtgctccgggacggtccccgcgcgggctggggcgggagagctcggcgcgcccgagggctgctccccgcagagccgcgccgccccggcagcgcctcggggcccggccggagcgcgatctcccgccgtcaggcccgggatccgaccgggagaggcgcagggctgcccctcagcatccgcgggcgcccggccgcagggggaaggaggaggcggcgacgagggctgggagatccgtgggcgccggcccagcgcgcccgccctggggctgaggctcaggggcaggggccgtgcgggggccggcaggcgcgggcggcggcgagcgcggctctccggacccctcccctgcacccgcggcggcggcggctgctaggggcgcgcgcggggccctccccggcgggagcgcgggccgagcccggggaagcccgccagcatcctctcgcccgcccgcgccgagccgagccagccgagtccgggctcggcgtgctgcacagctattccccgcgcggcgccggcggctccggggccacgcgcgctccaggccccgggaggcgggaggcgggaggcgggaggcgggcggggcggcccctccctcgccccagtctccgccctctcggcggcgcgttccggagtggggcggcgagggaggcgccgggcggcggtcccaggacccgcgcgggcgagaggtggaggggcccgggcggcccccgatccggcgcgggcggcgggctggggcgatggctgcgtggaagcgcgggcgcgggcgcgggcgtgggcggtgggcggtgggcggcagggctggggcgaatccaccccttccagcgaggaggcccggtctaggaggatggaagcccgggacgcgcccgcccgcaggtgaggcgcgctcggggcaccccgccgccccctcctccgccgcggcttccttccgggccggcagaggccagggctcaggtttggggaccgctccgccgcggggcacgtggggcctaagtatccccgcccaccccgggagcccagactccggagcgccgggcctgagctttccgcagaggggctcggcagcggagccctgtcctgctcccaggaggcgggtggcggtggcccggtgggcactacacacgtggaactggaagagttcctgagaccctgcttcgaagagatttcccgtgcacattctacccgtttgagatgtgtttgagttcacaaactgtcccttaaagatgcgaatgctcctttgaatagttaaacctatcagtctcttacaccatagtataaattattttccttgcatttgacagaacaccgtgctaagatcaactacaggctttgggaatttaaataaaggaagaggaaagagatagaatgttttgggacaaaagggacaaaagcatgtgtgggaaggtaagtgctgaggacagccagcagcaatagggggtcatctcccctggggagagctgaaggaatgaacagaggggagagaaacttggc

SEQ ID NO: 2531 - DNA, 4001 bp, Homo sapiens
ttagagctgtttttgtttcctgcccgtagccattgtagaaggtctcatgctcatgtttttgtatcagcctcacgcttaagaccattttatgactccacccttagtgtccttttttctttcccaactacttccaagttaggctgccttgccatatttatgaatccctgtaaactatcttaaatcccttgtggaagaggtggtaataaataaatatatctactagtcttttttatatatatttaaaatcttaacactaaacccactgccagcaaacacatttgctcaactgttaaccttaagaatagctgagatttgctaattccaacactatactaatatttaaaacaaattcaatccaagcctagaaaccacagcatatcatgtcaggcattgttgtacattgtgtatatgacaagcatatttctaataaggctaggcaatttggtggacaagaaagaacatagggcttactacaaaattcttatggattttggatcaaagaataatttatctttagtggtttttcaaaatgtgttgacatcataccaataatgaaaactttgcttttacttgtgccctatgcagggaggagtagggaagaaaggctgggcaagatcctgatctataggagaaaagtctctacagagaaaagtttgatcacattacacaattaaagtagaaccttataaagtaaaaatattaaatggtctaaaccccccttttaagtctctaacatatattattcatatgctaatggagatattatttgcaagtctgaaacgtcatagttctcttctttggtcagattcatttaaaacacttttacttcaaatgctgacttgctatttttctcttaaaacggaacataattttctaatgccattaatgagaacacccctcactgcacaagttaaacatctcaggaatcccagctagatccacaaactagacatgaaagcagttgcttgcaccctctccaatccctttgcttctgccaggatgccagaccaaccactccttttgggttactcgggaagcacgaaatgtgcatttaggaaactgagatttgatttctattatcgataaagctcatctgagtcagttgaatcttagacgacaaacagcaagagggaagagtgggtgtaaggaaacagatgggtattaatcatgtgtcagagataaatgacagttttttaaagaatttgatagggtgtgggctggagcttgcttttttattttctatttctatttcctattttctatttttagttttgggcaagagatggagattaggggtgagaaaaggaaggaagagaaaaggcaagacaataggccagacccgagagcctgatctgcatcctaaagcagtctgcccctccctcccttccccccaacaccaggtaggctgtggtgtgatttaaaaataagcagacaccgactcccgcctccgggaccggggatggcctccgccccggctgcagaaagggaggggaggcagggagaggagagggaagatggaagaaacagactggcaagaccccctcgggtacagtgggatttttccctccaaagtggtggagccgcataaaatcaaaacccacgaggcccgctcacgtgccggttgccccgatctcaatgtaggcggctgccgacgccgcacctgctcggccggccactgcggctgagcgccgcgcagccagcgatcgcgaggccccgggggacgcgcccagccccgccaagcccgcctcgcaccgctaccccggagggcggcggccgagcgggaaggaaagagaggggaggggagggaggggaggggaggagcggccccgcccggctaggcgaggcgaggcttgccgcccctccattcggacccaaaagaaagccccacctgtcaggcgttacgctccgggcgagggtcccaccatccccaagcaggggccagtgcttgcagccccgatttcctaagagcctcggatgctacatcatcaccagaaacctttaggcgcaaaacacaccgctgccggccagggctgcagcaccgacgcgctcggcaacagacgcgccccacctgggccaagcggctcccgcccggccgagggatgccagggtctccgcgccaggagaccagcgaccccaggcagcccaccaggcccgctccccagacccttacctcctgcgcggcatcttagctatctccggtcggccactgcgggttggttttgttattttatgggtttggggggtggggtgcgcttaaaaaatccacccagctaatctgcagggcagcgttttctgcccatgctgcagcccgcgctcgtcagagctgctgggagatcccccagcagtgcagcggctccgcggcggcggggatgactggccaccgacgccgcagttccttgacaaaaggctcgggttcccgctagtccctcacagccctgccgtcagaattaaagccatttcccgcacgaggctgggaggaaatgagagctctcctggccctgcgcgctgacaaaaggccgctgcgcggtgcccacagcgccccctccagcaggccgcgccggccgcccgagggccgcggtgctgcagtgcccccgcccgcagcgccccccaccgccccgcagcggcctcgccccgcagcacccccactaccgccccgcagcgcccccctcctccccgcagcgcccccgcccgcgccgccgcagacccccctagccaggcttccagcccccttccacccccgccccgcaccactcactacccgggatggccagagctaagcaggggagtctgttactagggagaaaatctgaaacagagctcccttgggggaatgtattctccctggaaggaagaaagcaaaagtcttagacttggaatatttcttttcgtctggaaaggacagctagccttcggaagataattctattagtgattttaatagcaattgtttgactgaattccaaaccaaaattctccctgtcctgattctcactccttttcaaccaggacaacatttttgttgtggccctgcccttgggggctgtggacccaacgctctccaactctcactacattctcctctcactcctttccttcctcaggtctcccgccccagaaggaacaggtgtgtagtgagtggggaactggatagggaaccagaatacttcggttgccgtctcagagctgctcttaactagctgtgagaccttaatcaacccacttaacctctctgggcctcgttgtcttcctctgtaaaatgacagtgtacctaaggcacctcccatttccaatactttcaaggcctggccctcagagagtaggggtgttaagagatagctctggacttttcacccccataatctccaccagtccccaaaactcccctcaatcaacatcctctccaagggcttttgaaaatgtgcttgtgaaaatgtacagcttccagaaaagcctctggccactgatctgaaacctgatcatggcccctctgcccttccaggttctggggcaccacagccctcagacacccccacaaaagtcactggcccccaccacagtgctgctgtggaaccagaatctctggaggtaggctcaggattggtaattttaacaagcagccctagtgattcctttgcacactaacactttagaaacaccactctgagagctactactgatttagaaaagaaaatgctaacgacaaccctagatgccaggataaacttgtctttctgcttcagccccccttccaagaaacatacatgcatacctggtccctgcaccctccttccacactcagagcttctcactcattctcattcagaatcaccgagtccacaagacttctccccattctcctgtcaaaacctgctagaagaattacaacaggctcagccacacaagatgaaaccccttcccctccccaccccaggacctaggtctgtctggtcaaagaagccaggacgtgttatgtttattgagtcattcctggcagccatagc

SEQ ID NO: 2532 - DNA, 4001 bp, Homo sapiens
aatgtgttgacatcataccaataatgaaaactttgcttttacttgtgccctatgcagggaggagtagggaagaaaggctgggcaagatcctgatctataggagaaaagtctctacagagaaaagtttgatcacattacacaattaaagtagaaccttataaagtaaaaatattaaatggtctaaaccccccttttaagtctctaacatatattattcatatgctaatggagatattatttgcaagtctgaaacgtcatagttctcttctttggtcagattcatttaaaacacttttacttcaaatgctgacttgctatttttctcttaaaacggaacataattttctaatgccattaatgagaacacccctcactgcacaagttaaacatctcaggaatcccagctagatccacaaactagacatgaaagcagttgcttgcaccctctccaatccctttgcttctgccaggatgccagaccaaccactccttttgggttactcgggaagcacgaaatgtgcatttaggaaactgagatttgatttctattatcgataaagctcatctgagtcagttgaatcttagacgacaaacagcaagagggaagagtgggtgtaaggaaacagatgggtattaatcatgtgtcagagataaatgacagttttttaaagaatttgatagggtgtgggctggagcttgcttttttattttctatttctatttcctattttctatttttagttttgggcaagagatggagattaggggtgagaaaaggaaggaagagaaaaggcaagacaataggccagacccgagagcctgatctgcatcctaaagcagtctgcccctccctcccttccccccaacaccaggtaggctgtggtgtgatttaaaaataagcagacaccgactcccgcctccgggaccggggatggcctccgccccggctgcagaaagggaggggaggcagggagaggagagggaagatggaagaaacagactggcaagaccccctcgggtacagtgggatttttccctccaaagtggtggagccgcataaaatcaaaacccacgaggcccgctcacgtgccggttgccccgatctcaatgtaggcggctgccgacgccgcacctgctcggccggccactgcggctgagcgccgcgcagccagcgatcgcgaggccccgggggacgcgcccagccccgccaagcccgcctcgcaccgctaccccggagggcggcggccgagcgggaaggaaagagaggggaggggagggaggggaggggaggagcggccccgcccggctaggcgaggcgaggcttgccgcccctccattcggacccaaaagaaagccccacctgtcaggcgttacgctccgggcgagggtcccaccatccccaagcaggggccagtgcttgcagccccgatttcctaagagcctcggatgctacatcatcaccagaaacctttaggcgcaaaacacaccgctgccggccagggctgcagcaccgacgcgctcggcaacagacgcgccccacctgggccaagcggctcccgcccggccgagggatgccagggtctccgcgccaggagaccagcgaccccaggcagcccaccaggcccgctccccagacccttacctcctgcgcggcatcttagctatctccggtcggccactgcgggttggttttgttattttatgggtttggggggtggggtgcgcttaaaaaatccacccagctaatctgcagggcagcgttttctgcccatgctgcagcccgcgctcgtcagagctgctgggagatcccccagcagtgcagcggctccgcggcggcggggatgactggccaccgacgccgcagttccttgacaaaaggctcgggttcccgctagtccctcacagccctgccgtcagaattaaagccatttcccgcacgaggctgggaggaaatgagagctctcctggccctgcgcgctgacaaaaggccgctgcgcggtgcccacagcgccccctccagcaggccgcgccggccgcccgagggccgcggtgctgcagtgcccccgcccgcagcgccccccaccgccccgcagcggcctcgccccgcagcacccccactaccgccccgcagcgcccccctcctccccgcagcgcccccgcccgcgccgccgcagacccccctagccaggcttccagcccccttccacccccgccccgcaccactcactacccgggatggccagagctaagcaggggagtctgttactagggagaaaatctgaaacagagctcccttgggggaatgtattctccctggaaggaagaaagcaaaagtcttagacttggaatatttcttttcgtctggaaaggacagctagccttcggaagataattctattagtgattttaatagcaattgtttgactgaattccaaaccaaaattctccctgtcctgattctcactccttttcaaccaggacaacatttttgttgtggccctgcccttgggggctgtggacccaacgctctccaactctcactacattctcctctcactcctttccttcctcaggtctcccgccccagaaggaacaggtgtgtagtgagtggggaactggatagggaaccagaatacttcggttgccgtctcagagctgctcttaactagctgtgagaccttaatcaacccacttaacctctctgggcctcgttgtcttcctctgtaaaatgacagtgtacctaaggcacctcccatttccaatactttcaaggcctggccctcagagagtaggggtgttaagagatagctctggacttttcacccccataatctccaccagtccccaaaactcccctcaatcaacatcctctccaagggcttttgaaaatgtgcttgtgaaaatgtacagcttccagaaaagcctctggccactgatctgaaacctgatcatggcccctctgcccttccaggttctggggcaccacagccctcagacacccccacaaaagtcactggcccccaccacagtgctgctgtggaaccagaatctctggaggtaggctcaggattggtaattttaacaagcagccctagtgattcctttgcacactaacactttagaaacaccactctgagagctactactgatttagaaaagaaaatgctaacgacaaccctagatgccaggataaacttgtctttctgcttcagccccccttccaagaaacatacatgcatacctggtccctgcaccctccttccacactcagagcttctcactcattctcattcagaatcaccgagtccacaagacttctccccattctcctgtcaaaacctgctagaagaattacaacaggctcagccacacaagatgaaaccccttcccctccccaccccaggacctaggtctgtctggtcaaagaagccaggacgtgttatgtttattgagtcattcctggcagccatagctcttttggtgctaatgggtgatgagatctgagaaacagggaaccccttctccagagctcagaagtcacaggtaaggtgggctctatatcttaatagaacccccaaaaagaatggagaatttttgttagaaatagcaggtttcataagtcaccccagtcatttccatcccccaaaatttctcttcctagtgtgttattttgttttctcacatgaatcctagcaaacccttgttggttcctggcactgttctgagagctttacatgcattttcacataatccttgcaaaaactctgtgagggtggtactattatcatccccattttatagatgaagagactgaggcacagggatgttaagtcgcttgccctaggtcacacagctagtgggtggctgagcaatgaatcaaactcaagtgctgtggctccagagtttgtgggccctaaccactacactgcatggcctcccagaggggacaataaactttttttttttcttttgagacagagtctcatgctgccccccaggct

SEQ ID NO: 2533 - DNA, 4001 bp, Homo sapiens
acatggagaaaccctgtctctactaaaaatacaaaattagcccggcatggtgctgtgcaccttgtaatcccagctactcgggaggctgacacatgagaatggcttgaactcgggaagatgaggttgcggtgagccgagatcatgccactgcactccagcctgggcaaaaagagcaaaaaaaaaaaagaaaggaagaatataaaaacacacaggacattaaaaccacagagtaaacatgatttaattttgatagccctgactcagagcagaactagacggtaggaaaaactatgtttgagcccatgtaataatctaaaagatgtctattaaaataaatcttattttattctttgaatacattaagaagctgacctgtaatctcactcttgttcttgttcttaaaaccgtcaaatgcacaatgaaactccccaagtgtattaatttgaaccctctggttgtttggattgtggataaacataataagtcaaaatttattctcctctcattaatggaaaactataaaccacttgattgctttgaagaagtaccctccagcaaggtaagtgttaaaccttatcctaggaaaagacaaatactatgtaaacattaacatgcatgccctgtttcgcactggtatgccaattgtcacttccctcttctgttatttaggatagaacaagatgatatccaaatagattatgctggaatattctataatcctttcccaagggaaaaagtgtggtgtccaggtaaccctgtgtatttcatttaaatcacatgaatgaagattagatccagtcacccctcagcctatccctgaggcctaccctggccctctcttttgcagtaaacctttgttactgcaaaaccatttgcaaataaacaaggtgagcggatctggactggtgctgtgcaagcaacgggacaccggtgcaaagcctagccccgccttgcaaagctagcgttacagaggcagggctgacaccgggcccagccgggacccaagccagctccaccgcccactggagacgcccccaccccaccaccgagcgctaccccccggggatccccgacagaccgcggcaggaccccgcctcgatctgctggcgcccggtccctcccccaggacactttcaagcggagtcccccttcctccgatagaagaaacccctgggcctttgaccgaggttagccaggcaggcagggcgtcggacaagcccaacgagcccacgaactcgcagcccgcctccggcgaatcttgcagccctgccggccgacccttcaggtcgctgccaatcccggagctgcgcgtgcgcagcgagtcccggctgcgaggcccctgactcgccaactctgctgctgagcatgcgcagcacaccccaggcaacagaaacggaccgccgacccccaccagccccgctgctgagcatgcgcagcccaccccaggcgccggaagccgaccgccaaccccgtaaacttcgctgctgagcatgcgcagcacaccacaggcgctgggggctgaccgccgacccctcaacgccgctgctgagcatgcgcagcacacccaggcgccgcgcaggaggccctgaccacccagccccactgctgagcatgcgcagcccaccccaggcaccgggagccgccacgaacccccaaatcccgctgctgagcatgcgcagcatgccgcggctcccaggccgctgcccggcacctggaggaggctgggctgtgcgcggcgtttgggggtcggcgtcgcccgcacgctctgcgaggcttgggctcgcgtaccttccagtagagcaccccgagccgccgcagctgctccaggcccactgggcggccggggtcggggcggtggggttgccgcgggtcgcccggggcgtcgtccatataccaggcctgcaccatgacgcgcagtgcgggtgccgtgttcgaacccaggggccgcgctcggagcccgtcggccgcgctttatcttatagggaggcgtggacgcgcatgggagccgggattgggcggctggttggaggcagggccggcgcgggggaggccccacggctccgctgttttcggaagcaaaggcattcaagccccgaccctgtcctgggcaccctcggacctgcctgaggcccgcggcccggggccagccgttcgccagacgcgccgggcaggtgaagctcaccgtaggcatcgcacgtgccttgtgtgtgctgccgcggtctccctgcaccttcagagcaatcttgtgaggcaaacgacgttaaacgtgtttagagtatggaaagcaaatgcaaaaaaaaaaaaaaaagaataaggattttgttaagctcatgcagtccatatgggcacagttgagacttcacagctcggatcccaggtgagacattgtcctccacctccccgctcgccagacttttgcagtgtcggcattctgcagtgctaccctgtactttttaaacttcctcttgtttcctcttttcatcgtttctcccttccccatacactgtaatgtgctagtcttagaataaaaacaagcttcccctatcccattctgaatttttcaatgtagctaataaagtccagccgcttgaccatcctagatgtcttttcaaaccaacgagttgaaaaagatcagattatctcagccattccctcagtctctttaacaaataacgataaagcagacaggatttaaatgagactgctgtaagagcacaaccccaatgcatgcaattgactcttgaacttccagaaatattgcaagaaaaatacacacttatttcatttctgttcccttgctctaatggctttgcaaatacatcctccttagagagcctacctctccacctcttcacttgaccagttactactcatccttcaagaacacaccttagacgccattgcccatttttctgcagcactcatgacaaaccttcatgcaagaatctaatggcaatctcgcacctcgcattttctccttaagccactgcaataaggcttcgcttctcaccactggggaactgctaatgactgccatattgccagatccaatcatggcacttctgttcttaccagcaacattcgtcacagttgcccacgcccttcttgaaacattttctcattttccttcatgagggcatcttggctgctccttcccaggcccctcctagctcctgctcctctaaccactggttagtggagcgttccagactctcctcgtcctgttcctatccactcactccaggcgactttccatgctgtgctgccggctcctgcagccacatctccaacctggacctcattccagaacctcaggcttgagtatccagttggtgttgtcacatacatggctaatcagtgtgtcaaacctaacatggccaaaacaactgattccccacacacacccccaaacatgcttctccctaacctttcccgtctcagtgaacggcagcactgactgcccagtggcttaataaaaaaatctaggtgtactctcagttttgcttttcctcaccctcaagatccaatccaatctatcagcaagtcatgttgctttgaccttcgaaacacaccgcaaatccattcacttctctccagcccaactctttctgcagtcttttcttgcctgatggaattgactactgaaattccccctcctcacaccgcttccatttttgccccagtgcaatccattctatgcacagcacccagagtgaccttttaaaaataggagccagatgccaggcactgtggctcacgcctgtaattccagcacttcgggagcccaaagagggtagatcacttgaccagccgaggcaacatggtgaaaccccgtctctactaaaagtacaaaaattagctggccgtggtggtttgcaccgctagtcccagctactctgcaggctgagacaggaggattgcttgagcctgggagtctgaagttgcagtgagttgagattgtaccactgcactgtagcctgggtgacagagcaagactctgt

SEQ ID NO: 2534 - DNA, 4001 bp, Homo sapiens
taagcccccatcccagcgcctgccagggaccgcgagtgcctagcgtgggtgatcagtcttcgtttcttcctccccctcagcagcaggccccactgggaaaagtggaaggctggctccgtgctctttgtgggtgggggggagatgaaaaagaaacgaaaacaccacaagcaagtgacctgccaggaacacaaggtcctcaagaaagggaagcccagacattggtctggagagcatggggctctgggaagaaagtgctctctcttctcctggtcttggctatgttccagaggatttgaaccacctccatcggcctgtgctcagggagagggtggagaaggggtcccccacagctaagccggcaaggggaagcttcactgggacccttgctagcagcccccctgcccacccctcccaaggggttcctaagatgaggcctacaggatctgggcagggagcagaaagcccaggggaggcagccacacacagcagggcaagaagcagggtgaccccggcgccaccgcaccaaccccacaggggcagcgcaggcgggctcaccaggccgtctgggtccacgggcggcacaggatcctccggaaggcacggcggaagtcctggttgaagatggtgtagataacagggttcagtgagctgttgcagtagccgatccagaagaagaactggaagaggccatggggcaccttgcagtgcttcgggcagatggctcccaggctgtagctgaagaagaaggggaaccagcagagcacaaaaacgccaatgaccacagccagcacgaaggtgaagcgcttctcccgggtcagctgcgcccgtcgacgccaccactgcccacctatagcacccacgcccctgcccaggagcacctggccacgtagggtggccagcacccgggagccctgtggctgctgcagcggggggctgcaagctgaggccggagacactggcactgcctggggttcacactcttcctcctcctcctcctcctcttcctcctcttcagcttcatcctctggagatgccccacaaacaccctccttctggccctggcctgagttgggaagggcagcccaactgggtggcaaggcccgggtcccagtatcttcaggggtctccccctcctccttctccccagtggacttcgagtgtccgttgacctctctggcagaagccacagaggccagggctggcagtttggctgaggccaaagccccaccatggtcgggtcggggctgcttggactcaccctgcccaggcccccccttggccctgggacctctgcggttgctgcgtttggcgatcaggtagatgcgcaggtagacaaggatcatgatgaggcaaggagcaaagaaagatccgatgctggaggccaggatgtaccaggcctcctggttgagcttgcactgggggcgcccgcgcggctgggggccctggtcgcccttgtagatgaggggcggcagcgagatgacggcggcgatgagccacacagtgaggatgatgcacttgatgcggcgcggggtgcgcttggagttgtactccagcgcgcggctcacggcccagtagcggtccaggctgatggcgcacaggtgcacgatggacgaggtgcagaagagcacgtcgagcgccaggtacacctcgcaccacgtgcgccggaagtaccagtagcccagcagctcgttggccagcgagaaagggatgatgagcgtggccaccaggatgtcggcggcggccagcgacaccaggaacaggttctgaggggcgcgcagcgagcggctggtcaacacagccaggatgaccagagcgttgccgaagatggtaaagagaatgaggaaggtgatggccgccgctatggccgctgtggcctgcacggagtaggggtcctggtggtccatgacggggcgggaggtgggcagagggagcgctgcccgcccagtgcgcaccgtggacgacagcgctgcccggctcggctagacaagagcgtcgcccctcgggcggcgccgagggcgctggagccccatggcctggacgagcggggcctaggaggtcgggaacacccaggaccagcagccgccctcctacatcctcctccaccggtgcccggggtccctgccgtccgccccagagaagtttcccaagttgtcccgccgccgtccccgtcccgcccgggaccggagaaagtcgcgccctcccgccacgcggatgccgtacgctctgggggcgcgggccgggctgggccggttcttaaaggaggcgcggaggaccttgcgcccgctcagctcgcaggctttcgccccagccgcgcctgcaggggagtggggagcggggagagcggctggaggaaggcggagactggaggcgggcgcgggagcgggcgggaggcggggcggtgggcggaccgaggtgggctgaaggtgcgcttcgcgggaggcgtgagcccgggacttcccgcgcccggaccccgcccagcgcctctacctgccttcctcccggcggccgcgcctcgggagagcggaggggcccggcggccggggtctccggcccccaggcaggacgcgcgcagctgtggaggggtcggtgggtgccgggagccgggacgcggagctagcgcgcgggccggcaccgggacgggacacttctcccgggggaaccgggctgggcccggcgccggtgcgccctgctctgccttccgccgctcgggagcccgcagggagggcagggcgggcgtggggctggggcgccgggtcgcaatacaccacaaccccgcccggctcggccgtggagacgccctgcggagaggtgggggagcggggagcggggagccggtcccgaccctttcccaggcgctgcccctcgcggaccagctccgtcgggccagcgccgcgcgaggagggcgcgtcccggcctgcgagcgccccctgctgccgcccgcgggcccagcccgtcagcggcagcccgggtcccggagccagcgctcgcagcctgggtcttaggacttcggcttcttgtgtctccgcagctgcctcagtttcctccattaagggcaaaggaggtaacagggaaactggcttggactcgaatcacagcatcaactgcgattcagccaagggtttgtacggggcacagggcgagctgccgccccttgactaatgcgaaggggaggtcccttccttgccgtgggggagtaaagggtggggactttgtcacacagctccgagaaaaagcaggtctcaggggcagccgtgaagagaggagcgtccctccgcttctgtagtgaccccgggggaaggggttgaccctccctccctgctgcggtcctgccccacatacacactgaagcccttctgggggtgacagtggaaagagggttggggtaaaaagaaacttcagactaaggccccccactcgccttcaaagcgctatgagcaactgttctccctcagggccccaactcactctccctgccacaccgccaccagcaccagcctgggcagccctgagggcatgtttccccggttctggagcccctaatgtcataagccccgcctcgagccaggcctcttattcacagcccacgactctgcaaggcatcctctgtataaataagcaccaatccacctctgacagtggggctcccccaggccccgtccaacctgctggacctcctctcctccctgctccctccatgggagcagagcacgtggcctctcagtgcccacggacaatgtctagcgcctccccaggctcaggtgggaggtgccccgtctcaggtacccagaccagcacccccagccacgggggtgtgttgggagtaggtgcctccttgatccccccatccctgtcattctgccagactccccagcttctggtgaggtgcaagtgcccacagcccatggggtggatgctgccagggctgggttcggacagggcaatcagcctccttcccacccccaaccctaggcttcagctcaaaaccgaccactctgctagac

SEQ ID NO: 2535 - DNA, 4001 bp, Homo sapiens
cacccgcaactggaattaaactgcttccagcggcgatttacctacagcagctccccagtgtgagatcccccgagaaacggaacctggagtgccccccgggctgcgagctgtgagcgtggcataaagggatacccggggcgcccgggtggggtggggaggaggagtgcaactgtgacgaggtgtgaagaaagggcccagaggaactgtgaaccccgaggaaaggagtctccctgggctaaggcctctggaataccggcacggagaaacactcgtttcctgccctggatgttcacttttccatctcggtggaagtgggtgggagagacagaaaggatgcagccgagaccgggcgcaggcggggaggctggagcatcctctaagggcacttcgcagcagcaccaactccagggggtcggtggtgccagccggaggagggagggggcgcagtcggagggaaaggaagtgagaggagcagggggccgacgggtggatccccaggcattagtgacacagtcttcaaatcgcttcttttcctccccacggctgcgctctgcccctggctacctagatcaccagtccctgggctggggcgggccgccgcgagggaggggaacaggagagggggaaacagacgggcaggcggccacgcatcccacccggggaggcagaaaagggctggcgaggcaggcgcccccgacccaccccacccccacggcggccggccgcccggagcccccggcccaggtgaggacgcgcgggccgccgcggccgcccctcgccgctcccgcccgcccgaagcggccggcacggggacttaccacagtgactcgaggtcccattcctggagcagggctaagtcgaagctgtccatggtgggaggtgtcagcgtcgccgccgccgctaccgccgccgccgaggctcgggccgcccgcgcgctgcaacgaaaggcgccgctcaaggtgcatcccagccgcgccagagcggccgccgcccgcccaccgcccacccccaggtcggggctcccgacgccccccgcccccgactccgggccggccgggctggctgcagcggccggcgcactcacccgctccccggcttgcgcgcaggcacactcaagagagagcagcgagctcgccgcgccgccgccgccccccgcccccggccctgcgcccgcccctcctcccctccctcgcggcggcccggcccgctgctgcagccgccgccgccgccgccgccgccgcggtgctctgcgcccgcccgcccgcctctttctcctccgggaggcgcgtgtgcgcgggcgaggccgaggcgcgcgcgcaccgtgagccccgcgccgcgcccgccccgcgcgcccctgtactccccgcgccgctcctcggggtcccgcggcgctcgcaggccgcgccgccctgccgcccctctctcgtggcttttacggcccgcccgcccctcagcagccctggggtgcccggggcggccctgcaagcgggagagagcggcgaggcggcggcgccgagtgcggggggatgcggagccgtgcccggccctgtcgcatccctcggccgcccgcccgcgcccggccccgcccggccttgcccgggctgcacgcacttctcccgcggcccagaatccacttgaccctgctgggcgctcccgcgggcggcggacccgggtgggtgcgggggaattccccggccgcccaggcgcggggagagtgagctgtgccgcccgcagcagcgccccaaacaaaccgtttaaggtctctggagcccgcaagttcagcgaaataaagcggcggcgcggaggaaacctcttccacccggacctgctctccgttgcggtttggcctccagtggtggtcccacccaccctctagctggccagccctggaaaccaacctcctttctttttatttctcaccgggaagggggacaaactggcctctgggtgtcgacttcaaacttgccgcccgtctccggtctggaaaggcaggtgatcagctagaagggtgataagagtatcatcgtggctcctaaagagtaataataatctccctcattgtaaagacagctcttccccctggcttacttttttagacatgctgagaagcgcatgtctccatcagggccctacctctgcttctccacagttggcctagaaccggaagcccctccaaggccccctgactctcctgacctcttggccacagctccggattctcaccagggattccccagaattcctagagagcagctcagagccctgcagttgtgcctcaccacgcgaaccaaacctcgcactccccgccaaaagggagtcccttccagcactctcccctttgttcctttttctgggcaagaaccgctgactggggctgccagaaatgtaaaccctgggtgcaagtgacgggatccctccagcgtcaagccgaagagtcatcctctcacctcacccacctccgaatgaggattaacaaactcaattcaggacacaggtagaagaccaaaaggccaatgagacttctttcctatttgagatcggatttgagaatgctcagcctggctcccttcttcccccagctctgaatcaatcctttcttcattagcatccataactaatgtgcaaaatgtaaaacgctaaattaagacagagttggcatcaacatagtctgagaaaatgaaattgttattttacaagctgataactctcagccctcaaaaacccctctcattagctgaaggtagcaagtagcaagaagattaggtaaaaacatagagaatatgaatataggaaaaagtacaggtgtgaagggctggctgcccaaatcccaatgcacagtgtatttggaaaaagaaaaaaaagaaaaagaaaatctgtctttctaatatccccttagcatacgccttgttggaaatgtttgctttggcgaaagtgagatcgagacattgagacagcattcccaggaacaaaggctgggggtggagggtggaggagggagcaggaacagcccctgtctggaagaactgcaagttctgaggcctgaacaagaaatgtgtcctgttcccgtgctcctggctgcagctgggaagcttcttcagaaaggagacctcccggccctcaccgggatctggctttccttcccttcccaccacatctgtttatacaaaggagggccgctgaaggacaaacataaccgtgtttactgcgagtcccatgctgggcctggagctcagatacagatttgccctcaccatggaggctgaagataaatagatgatcccagaaaaggaaagagggaaggccctgggatggtatagagctggttgaggggtttactcatgaaaggcctctcccaaaaagccatgtagtaacgggcagatttacgtttgaatttaaactctggtgccttgtgttaatatatgagagtgtgtgcacctaaagcaattgcaaggcgggtatttaaaaatgtttctttaggaatagccatgattttctgtttggggcctctaacatggggatagttggattgattatttccagtgttatgttttcatgtaatagtgtcttggagaatgaggacttttgaggaaacccaaatagtagttgcagatcctgttttttactaagctgtcatggagataaatccaaaatagtttttacaagtaaaatgtagaacagttagtgagagcctttatgggagatctttattatttatctggtttatgaagatgttcctattatcctccagcctctgggtatgcaaaccaaaacaagcacttaatctagttgtcaaaattttaactccttaatacaaagcaaaaaaagggtttggacttttggggattagaatgtcagaactaaaagggaacttttttatgtaaaagagaaagagactctctaaaaataaaaatgttagagtgatgttttctatgaagctgccttagcttttgctcatcctatagtgcttgtgacctgagggtcttttctccccacatggatgc

SEQ ID NO: 2536 - DNA, 4001 bp, Homo sapiens
gctcagatacaataacaaaatgtgtgtaaaatgccgagcaccacgtctcacacctgagaggcactgaatgcatgttatatactatcatttggatgtcaccgttccatgtgcctatttcctggtttgctgtacaagatgtgtatgagtacatgtcatcaagcccacagagctccagaacatgttcctctcacaagcaggcctcatagggaggggtgttctgtgctgttcctctttcctgctcactacttgtctgtagctacagtgtaaggactgtaatgtcactgctctggccttaagtgtcaccccccaaacccattttacacacaccacctcccacctttcacctttcccaaactcttaccatgtcccttcaagtttgatggcttaattgtacaaaaggtagtgatgatgatgatgatgatgatgacaatgataacagctgctaatacttactgagccctttcaatgttccaggcacttgtctaagcactttacatgtattagcttatttaattcttaagaggaagggattactatctactattgtacttgtgttacagatgtgggaactccgatgcagagatgtatagtgacttgcctaaaaccatcatgttagagtgggaatttaaaccttgaaatctggaaaataagcaatgtatatatttttctattttctaaatgcaaatcaaatatacatatgcataacaccactaaacactaagtgcagttacgcctagaacaagggaatagcagttgacagaaacacaaccaaaactaagaatattaaatgtctgtattactttcactgtaatcacttcacttcaacagtgagatgggatagccctaggtaaaggaaggtgctcttgtagttagaacattcttaaattttgcaccaaggaacacatgcttttaataatggcagagacaacattttttgatggattatttagtttgtacgatcaacattcaaagaatgagtttaccaccactttgttattgtaaacacttgacctttagctacctgaatgatcccctctttgaataaaaggaattatgaaacacatgtgtagacatatttcatttttatatatgtgagactcgaatagcaaggaaatcacatattaggaaaaaaacccctttgtcttgctattagttctctttggtttcaaaaatctggtcactgtgtatattgcattatatcatatgtgtgtgtacatatatatacacacataaacacacatacacacaatgtcatgtgtataaatacatgatgtgtttatgcacatacacagacacacacacacaaatacacacatatacaatgttccatccaagaaatacaaatatagtgctgttagcccctaacagtgaggaggtcattattccaagtcatttctgcagaagtgacggtggccttaggtggaactgcccatgatctctccttgcaagctcactcactggggccattgactgggatccagtctgtggccatgtcatggtttctatttttgaggttatagctaatgagcaacatgaggttaagacacacttttcataaggccccagccagcatcataaatatgtgtgtgagcatgttcacactcaggttatgtcttctttatgtgcaccctctaccacacacacacacacacatgcacacgcacacacactgacggcttcagtgaccaactttggtcacatcccatctcttccttctcaatccctctggctgttcaccagggcctggaccatctcggtgaggctgaccaagaatgctccccctgccctgaccagcggagcatgggcacagctacttagagcgccacccttcaggacacaaagtcggggctacctctcttccaggcaaggcatcctagagggcccgcacaccctccagtttgatcttacctctcagctcccgttccttttctttctctccccagtaagtcgttgaacgtctttcttctgaggctgagcgtggagctctcttctcgctggcgagctttctgaatggcactttctgtacaaacaggaagagcatgtgtggtcacaacccaagtgtgcaggtgttgatagaggatgtgaaagtgtggaggcgagtgactaaaccagatacccaaccggccaactctcacttgtggcagggcctggtctaccagaaggctggaagcaggaacctggactctactctggggagaccaactgacaaaagcagaggatggtggccctggaggccaagggagaaggtctctttgactcctgtgctttctaaccctatgcagacccataaaagaatcccaggaacattttggaatctcttagatatatgattatcaagaatgttgatttcaatgggctgcttaacttgtccaaagctctgctggtttcccaggctgtctgggcctccaagagatcaggaccaaaggctcatcctgcattggaactgtgacaagtcttccagacctttctagaacaaagctacaccaggaaagaagagtcttaggcaaggaatcagatgtcctaaggctgctctacatgacctacatgatgggtgttacctcctcatctcccattcagtcaacccacgggcactggacttcctgcccgacacccttccctctccccattcatgcctggaattattttcactaatgacaccagggattcactaatggatgctttttcagttcctgtcctatttgtctccactggcagtgtttgacttccctgtagtgttgaccatttctttcctcccagaacttctgcctgggccgccatgactccatactctcctggtttttgtcaggcggtctctcacactggcaggcttccattctttggtcttaattttcgccctcctgcaagctccactctccgcctcatggttcctgttctccatgggtggcctcttcccagctccagatggaacttgccaagcccacatccatagcatcacacatttctgctgttctcctggaacatcccccagcacctcccgtcagactcgccacaatgaaaccctgctctgtcctctaccccactcattacttaccatgtggcctgtgaattccctcctgccttgtcccagcttgctcctcaggtctctacccccttctgagtttaccaccttctgatctctcactttgcctctgctaatctggcttcttcaggtttgaccctccattatcctcatccaaacaggcccgtccttatcctgagaatggatacctagaaacttccccacccagtcctatcccaagccctgggaaattatcccagtattgtctgcctcatgtccctggcaaggagaaaacgtttctttatcttatacccaaaccagaaatggggaggcttcccacgttcttctctttgctgaatactcttcaaccttccatcaccaagccctgcccattctacctcttcagtcactcctcagatccttcttcccgtccgcatctccacagccacaccctccctccattgcctctcatcactgccctaatccccaaggggtacgtgcacccagggcacaccagaccgttcactgaaggatgagaagaaaggaattgaatgtctatctacccacacttgtctggtttttgtatttaattaagactcacataccataaaatgagccgttttaagatggggaatcctgtggcattgagtacactcacaatgctgtgcagccaccacctccatcgagttcccagacttacatctatttttacgtcatgtttttagtgtttacattttgtgtatgtttcaaggcatgcaatgtgtgaatacagttgtattgtatatcatttgtgaataatcatacatctgctcagaataggcggcaaagacttttttgctgaagaagatacaaaattagaaaagtggggacacgtgacctcctaactcatctctcacatgtcaggctctagagtgttttccaaactgcctccaaattttctctgcaaaagactacaaaaatgatgacagtacactcccctcac

SEQ ID NO: 2537 - DNA, 4001 bp, Homo sapiens
ctcaaatgtcactacatttctgaactagtttttcactaaatgtaagcagaacaaatgaaaatgtaaaatgatgttttatgatatgattcacccacactatacaattttcataacgaaaactggattcggcaagatgtatcaaggctattaaggacatattatccttgttgtgatacgggattattttttaacagtctctaggtcaaaagatcagcaaacattaaaacttaaatgccctacatattatgtgaattgtagtggatttttttccagaggtttttgaagatttaaaaatatatgtgtactttgaagatcaactgatatatctaatttaatccacggaggaacaactagagctaatgaatatctgctaggtgccatttactgggctagatgttttacacaagatctgtcttttaatccatgtgaaatatctttatgaacaaaatttaggagactaccacagatactttgtttaaacaaatatacctctgcgaagtgttaaaaatgactactaaaaaagccaacatttaaactggtaaagcatataaaatgtacgtgactgtgttaattatattaacataataatgttgaaacatttgttgtccctagagtttagcatatattttaatgtctaagaggttaactgaaagcaacaattaagtgtagcatcaaagataaactctgtgtctcccctccaccaaataaaatcctcggaataggaggtggaaggaagacttacactgtaggaaaagttgaaaaccaaagttctactttacttctcctaaagtgagaactttgaaacggaaccattacttttgtttcatccccccgcccagtaaaaaatttacatgtatgagtcagttcttccctcggccccaacagaaaagattcagtataaccaagctataacttgcacaaagcaacaaggaaaaaaaaaccttgctatccccattactttcctaatagagcaaggaccctaccacccctcactccatactctgcctctgccccaagcaagacgcagcacctgccaaaccaggcacttaaggaatatggtccaacttttcaaacgcaaactggagaggagacgcagataatttcttgaagagtgcaagaagacagcagaaaaggtactctgaggaagggatgcgtgagctttggggctgtcccctctgcctgttggaggattccaaattcgcttgcttcagagacccttggaagcagcacactcaggtcgcggccagcctcgggcctcggtgaaggaggcagtgtttacacctgtcacgagggagggggaaggagagcgaagaagcccaagcaaagccccaaacttctgaacagctccctggagaacgcagccagcgcggagctttgggaggtggaagcaaaggggcagggagagccggcggtggccggggagggaaggactcccacttacccggccggtgcccgggatggcgaggagggggccgtgcgcttcgggcgccaccagcggcgttcccgcactcgccgcagaagagagcagagccgggagcccgcaggcccgcagagccagctccgtcctcacagctcccggctccgcggcgggcagatgctcccggcccgggtgagggtctggctgctgggccgggcctggtccccgcaccctctttccccggcgcagctaggggagcggagcggcggcgcttacctggctccttcggggcggctgcgatgggcatggctcaggggcccggggaggaactgactccccggggaaggaccgtctattccgacgcggaactggtgagagcggaaggccggctgctcacagccctgtcagcgcagcagcaccatggacgcccacccggagtttcaccgctgccgcgggacccccatcccactaccctccgccctcttccgccgccgccgccgcctcctccacctcctccgcggagaccccccgcccactccacacactctcccatcatgcagcgggggaaccgctgccgccgacacgtcacttccgggcgcaggtggctaggtcgggaccgggcgctggtgggtgctgtggggtgggggaggacactccaggggaattggtgtcacagaacgcttatccctgcgcaggcgctgtcgtgcagagcgccgaccgccattttgggtgcgggcaagctgccctttccttttacttccttgcgagtcatagagctgtagggggatagacgtcttcccgcactcaggcgccggttgaggctgcgctcctggcgaaggacaggtgctcctttcagccggttaacgttcagctcaagaccggattaagtctcttgctctccaaataaaattgtaaaggtttggaaatatagaaccacatttttaccaaaaacctactagagagcattcgtcagcttgcccttttcgccccgaaaaacgactttttcattcacagcctgtctcttcctctttttaaatttatgccgacagaggaagaagctgatatttaacaaataacaagaggttgcgataaatagaatttaaggtgggaaagcagccgccaaactgacaaatcgtcttcgagaccgacaagaaaatagtagtccggaatttggctaatggatggagaaggtggtcgtttttcatagacccttacggagaatatctagtgaagctaaagagatcaccataaacttatgcattcaaacgcatttctggaacagaggtcgtaaccgattttgtttccatcatcagtcctgaacagttgattatttatataatcaactgttatttatataaaggtaataaaaatattacctttcctcctcctttacaatgaatatctgttagaacacctgccagtgtaacaatcagactacaaggctacaggattatgattactgtctcggatgatgagcccggggtcctacaaatcatgacccccgccggcccctcattctgcccatatttgccaaacgtctgcatcagtaatttgaataatttaaaatagttccaaaacagcaaagctcagcagttacgcaaagaaacaagaatggaaaacatcccctcaggcacagagaagtgtccacccctttgggtggaggaattatacaaatcaggagaaagataaggacaatagcagttcatcacgatttatcccgcctctgcaatgttctagacaaattaactcggagcgctccaatggacccgcatttgtctctttactattcaatcgctgtaagatatacggagactgcatcactttaaatgggagtatcaattgctttgtggttatgctggattttgtgttattgctcagtcactaaagtaagaaaaatctatatggcttgtcaaatttatgcctattgtatttcgccccctgctggtttagctcgtgtgcaagcttgaatttgtgtgtgtgtagaaactagaaattgattttaaacgaacacatgcttgttttcattttacagctctactaaacagaaatatcaaaataagaacatatgactagaccttaaagcagaccctacactaagaacatgtttaaactaaatgaatttaaactgcactccagcctgcgcgacagagtgaaaccctgtctaaaaaaaaattaaattaaattgcacaccccccatcagcttacaattttgtaatagggaaattgagtacctatttggccaactaacttgtaattggtaatcttacatgtaattccgaagacagtgccctaatgctcatgacattttattacaaagggaaagtatttgagtgtttttaaggtgataaatctgtgggaaatataaagtccatttcatttggagtcaatgatagtattgtttttatttaccttttaaaaattatggccataactgcattacctaagatttggcatcaagaaaagaagaagaaaaaaattaccagttaacatttgttgtatttacttctagtttttttttcctgtgcgtactttttacaaacttgtaatcataatttaagtagattttgtgtcccttttgtgttgt

SEQ ID NO: 2538 - DNA, 4001 bp, Homo sapiens
aaagcacttcggggttagtagttcagactacatagtgccaaggcaaagcctctctgtgggctgataccctctccctcacagagggaggaggctgggcaacgccagcaccaggctttcaggcacattcctgccggctttgggccattctcaatgttcctcaatagaggtcttaccggccagtctgtattatggacaagccactctgcaggctttttaccatcactggccaacagcgctgagaagggagaaagtgctgatcaactgtggctaagatatgactccacactgtccacgcacatgccacctggtgccccaggtgagtcttggccggaccaaagggatgaagcaagaaaataaatcagcagcctggaaacagagaaatgagagccaccagaaatccagagggcacagccccggaaggcagactgctgctgtagctctcctggaaggccatggccctgcctgacatgcagagggaagcgggtggggattctgcccaagcatcctgcccctcttaaaaccacagcaccctccacttcagtggcctccaactgcagacatatgaaagcgagacccttccgctggaggacgccctgccctcctggtagggttcttcctctaatccaaccccggacttttggttggtacaaagcacactaccggttccagcgtttgcacaggggcacctggacacgatgctcccgcggctagggctggctctcggcatccactaagttcaactgcacccctgaattaagcaaacacactaaggagggcagccctgcaccgcccaaacacgccggcccgggcctcgcccccagcggcagcacttctcagaacacgtcttcaacgtccagcaagacgcccaggcctggcctggtaacctgtcaggggtcgggtggcgccgaccccgccggctgcccccaggcgtctgctgggccgggacgctccggcagcccaggacgcggaggcaccgagccactttcccgcaggagagactctattgtccacgatcaaattaacgctgacgatctatcttcctggcggagctcgcggcgcggcggggcgcaggcgacgctcgcccggccttgcaagacaagcagcgccgcagtgctccctcggcggagcagccgcgtgccccggccggcgtgtgtggacacccgcacgcacacagcgcacacccccgccgcgccgcgggcgtccgtgccttcccgaggccccaaggcggcccggccctcaccttcgatggcgatgacgtgctcccggatctggttctgcagcaccggctcctccacgcgctccagcagctcgtagatggagtagatgttggggtggaccgactcgaagcgctggatctcggcccggatggcagccgagttggccagctgctgctggtagttcatggtgcaggcgccgcgcccggagccgcgcgccccccgccgccgccgccccgcgccccggggcccgcgggccgccgagcccggggcgccgcagcccccggggagccgggcccgccggcggcgggcggaggaggcgcgagaagaaaggcgcgggcggagcaggcgcggggctggcccgcgggctcagttcatggccgggacgcgcggccggcgagcgagcgggccccggcgtcccgggtcagcgggccgcccggggggagcgcgcccccatggagcgcgccgcggcgggtgcggccggccccgaaggaggcttgctcgggtgacttcctgagccgcagccgccttccagccctaggcgctgctccgcggagcagccattaaagcccaggcagccgccgcgctccgagcgccggggccgagggccgacccctgggcagtgtggccgcgctgctctgggctcctggccgtggcgtgggtccgcgcgctgcgtactgcgccgcccggcgcgccggggcccccgcgcgagcccgccgtgcgccgcccgccgacctgggaccgagtcgcaggcgccttgcaagccgcggagcccgctccgagcgccgcccgccgcctgcccggccggccccctccctggcacgcagggctccggcccacgtcggccccgcccccgccttcgccctcgcccgcgcccgcgcccgcgccccgcctgcccgcgcgcttgccgccctccggccgccggcgctgcgtcctcctcggcgcttcccagcgcgccggatcccggggaattgcgccaggccccgccccgcgcctgcctctgggcttcctgggacttgtagtccgcgcccccggcgggccgggccaggggggtgcgcggggtgttcacactgggccggggtgcgggaccctcccgccggccaggccccgcgcctgccagctcctgcccgggttctcgcggcggcccccgcgccccggcacgggggaggctgcccgggagttcgcccgccgcgttgttgtttgtttccaagcggctggctccaggagcctctgcgactcgccagtgtcccacggcctcgcttggttggcgagcctccccttcccgcgtttggtaactttctgcctcctttctcaaagtagcacacgtgctttcccttaatacatgcgatttctttccaaaggcgaagcgcctcctgagcccatgcggcgtgggggtccacactccacgagtggactgaagtttagacaggggtgcgagatgcgacaaaataccacagaggctttcgaggcatccttctcccttacaatttttaaaaatcgagccgtggatctcaagctgctgcctcctgagcgccgctgcctgctccacggggttccttagcccctggaccgtctgtcccaccgcaatccccgatttaggtcatccccggggaccccccgcggagctgggaccgcactgcagcagcgcttggaaggctcgtctcgccgctttgaggcaaatgggacccttcagatttgcggaagcactggctgccgggcggtcccacaaggtcctggattgaggacactggctgagtccctgcccccagccatcggcgtggtctttctgaaactcagccagccgggccggcatccccgtttaaagcctgctgagccttcaccggctcacatgcagtttgctatggcctaagcaccctggtatccagccgtgttggcttactggctgggctccacaacttcccaaagatgtgctgacatttttaccattccggacctgcttgtcttctccttgacacttaggcacaggtcatcactccatgcctcgggctgtccacgcataagtaactctagtaaccaagaggcaggcatgtggcctcaccaaacctgacctatcagcagcagctgatcacttgcgctcctggaaaccccttctcccagtgctcaccagggcttcctgctgtgtttctggcttcactgtcccttttgtggttttcttctactcccctaacctctaaatatggagggccccagggcttatggttaggcctcttttctttgctatttgctgtgatcgcccctgtcttatggctttgaatatcatacacaggttaatgaagctcatatgtatctccagctgtgacctcacccctgaataacaaattcacatccacctgcatcctcaacatttcctgaagcctagctggtgtttaagtccagcatgtcgccagctgaactcctgccatcccttccggctacatctcctaaaaatcttctccatcccagtcatcggcaactccaggccaccatttgcttaggcgaaaaattcagtgctgtcctttttgcttatcattctctcatatcccaaatggtgtcagctccaccttcagaggatccagaatcccacgacttctcaccactcggctgaagtcaggatcatctagctggaccatcactagatctaacaattgtaatagctcactgcttcctacctggtgaaacttacaaaacctacgtccggacttgtcatgccttttctcaaaaccctccaatgactcccatctggcctcgccccacaggcatgagctcttatcaagagctgctcagggg

SEQ ID NO: 2539 - DNA, 4001 bp, Homo sapiens
tctctacttttagcacccaagtctttctttcctcctcatggagaacttacctcaaaggtgggccggtctcgaatgcgttcccagcgtggccgggtgggcagtgtgcgcacaaagggggccatgccctgggaatacagcttgctctgcttgttcatgttcataatgttgatcttgatgagttttcctggcattcctccccggacgctgaagtagaaccatgacctgaggaccagagtaagagagaggtcattacgtgtggaagggttggagatatggtctgtgggagagccggagccagccaaactgggaaagggctatttggcaaggagaaaggagggacgatgggtcagaaatggacagggagtatgctgggtatgaacagataagtcagagggctaactgaagcatgggtttggagcctttttccaccctccatttcgttccatatacctgttcccattctcaaattccgtttcagcacagtctggtcgggtccacacgttgaattcatagtcaggggaagaggcaatgccactggtcagggctgacgccccacctcctaccccttccccatcactggacaaagattccaccttctccacgtgggctagattccctgaatcaaagcgagaactgaacagcaatcccccacagcgcagctccatggtggggctgggaaagcatcctcctgccccgctctggccctgagagctgggggaaaacaagggttaggttaaggaggaaagggaagacaaatcgaagagttttctgggtatctcttgataaataagagctattcttagggagtgccctatgaaacaaaaggctgtctccctcttagaaaacatagaagtggtcttccagcaaaggccaagagaaagcagcattctgtaccccaacactaagggttgtaaatgacctaaagggaccccattttactttagcttggctgttcccaaataaaactcagtggcttaactatgttgaaaaacactaaactctcagctgctttgcagcccaaagattagagaatataatcagagaggtcagattttccaaacctagccaagatacactcaccaccatacatggccacctttagagatgggccgttctggatctctggctctgcactctccagcacagagcagagagaggaatcgaggttctgagtgtaaatgggtagtcctctctccagcctctgtcctcacaagtactgagcggacattctggtgttgctcccctgagccctggaagggctggttcttccttttttgttcctaccttatgcctagtatggagaaaaactataacagtggtgcctctgccaagccaaaggctactgggctcacctagcgactggagctcccttccagccagggcatgggtctgtttccatccccctccgccccgtaagcactgcaccctgagaaagctaccctagtagctgtggatgagtaatgggtgttctcagcacccctaaaagaggtgggctgctagagtcccactcgggggaaggaggctggcttctccaccctcgactcgcggggaaccgtcacaccgagcgggcttgccctgggcagggtgggactgggaggcatggaaggggtcgagacgggctcccgcggcaggggattaggcagggagggcctaggagtcagaggtgaggccacggagctgggcggggtcgggaccgcgtaagccaggtcgggagcggggtgcggggtggccttcgaggggctcgggctcaaggggctgagagaagggggcggggccggggctggcggggccggggctggcggggcccgtagtccgcgcagagcccctcacctctctccgggccggtgatcccgctccctctcccgctagcgaggccgcaccttgggccccggcacccgggccctccacccgggcccccaaaaacacccgagcgccgcggtgccgggaccccgctctgccaggaaacaagaagtctctcgcctattggccgtggctgcagctggcgacccgcccagtaaagctcgctaccattggtcagctctcagggttcctcgcacgttagtgggtacctgagcgagtgtcgttcggggacgatggcgggcaggagcggccggagggttctagcagcgtcttccggaagacggttaacggcctgcctgccgggaggcgggaaagataaagcggcagaaactgggactcaactgcgaaataaaaagacatcgtgtgaaactccttatcgcttaacagtcttgtgtctctaaaatgaaacacgtagcccactgcgccgggaatccctcccgttttgtgttctgtagtgtgacggacgcaaaagctgagtggaggatgcgggcatcgatcccgctacctctcgcatgctaagcgagcgctctaccatttgagctaatcccccgcctgctgcttagttctttccctttgccttacaggttcactgcactgttcactgaccagtggatcaaccacagttcaggacatttatttagcagagtacaatacagtggcatccatgtgcaagattctaaaaatcaagcatataatcgtgtgcttaagcagaaaacattctaaaacacgttaccacatgtacattgaacgcagaaagagcgttaccgtatactacatactacggtgttccctatggactgacggcagtacgaatgctaagtcacaggaggcctccaagcctttccccttatgggataattgaattaaattgaggttaaaaattacagacgaagtccttcgagccggaatcgaaccagcgacctaaggattgccacgccctatccactacagtcctccgctctaccaactgagctatcgaaggctccgctgcgataagatgctgctgatagccctctaatgcttaccgcaacctcatccagccatgacccccgctttctccagctgaaggaacctgccagggcaggagacccatgggacctcacagagctgagaaagccggagacccaaaggcaaggaaaagaagctgcccaaagtccgggttctcaggccagaacggaggccacaccggccctgagcttcccggctttttaacaaaatgttcccaacaccccgcggtggtttctcctggaccgcgaacgccgagcccgccgccgcctcctggagctccggggcagcgcttgtgccgcggtacctgcactcacaggggctttgcgaccgcgacgcgcaaaccctgctcgagagccgatgggccactttggctgctcctgctccacatttcccttggcttctccggacgtgctctcctgacgcgaacgacattcgctcggccaattaactcaggttttgtcaggctctattcgtcctgaccagtgcaagagagacggcgaccgcggggtgctgcaggcttcggcgcggcgcattatcgggctgtgccgaaccccccgggccgccctgggatcgcgggcctggcggcgtggcccgagggctcggggagagggctacgcgccaggagagggcggcggggctgcagtacaggctttcctgccctcggaagcgctcgcaagcctgggggattcccctgcggtagacctgggatggtgggcggcgcgcggccgggtaggtccctgcagcctccgaggcccacgtgaggtcggggtcggggcggctgtacagtgcccagcacaggccactggcctcccttgtgggtctttgcacaggtccgcttactctcggaaatcttgggttccccagggccggggaagggtcttctgcctggtctggggcccctcccccgacactgtggatgtctaggtgtcccgggtggggtcaaggagtgaccccacgggttcccccatctttgtccctatccagctcacaccttcgcctgtcttttgcatgtgttttttccacaaccttttgttcaccgggtttttaacaacagaaataaacctaacccccaactcctctgtgaagccctgcttggtcgtcctgtggggtgggtgtgccggaagacctggcct

SEQ ID NO: 2540 - DNA, 4001 bp, Homo sapiens
actcctttttctgtaaatgaaatgcatgaaccaggctacctccttgatatcacctagctctgtgattctgtagtaattcgagaatattattaactggcaacttctcagagtgtctccctggccacacagcctaaaagtaaccatgagcactctcctatcaaacaattttcatgttcagcatagtacttgcccaagacatttttcttacttttgcatccccactggactgtaagaaccaagagaacaagactttgctatatttactggcacaccccagggccttacacaacctaataggcaccaaaaaaaatgtctgctgaagaaataacactcatgtaatactaataatgcctctttgcccaactttaaaaagcaaatagtacatactagacatgttctgcattttctaagttttaagaaatcaattttcccacataaagtattatgtgctttgtattaatcttacaagcaaaggttttaaaaatacttagtaactgccacgttgttagtaactttaaatacaagataataatataaaagcattttatcaattccaaaaccacctgcaaattttccgaatgaaattgcacggcaataaaaatctttatcaaaataaagcttaatgaagcaaagaacaacaaacacaaatcatcccagtaactcaggacggtagtgtctttctgaaatcatggtgacttgctagctctcctcatttctgtgtacagccagggcactcgggtattgatagcgagatacagataaatctcacagataactccatcatatttagaatcacacagctcctagtgggtaccttattgccattaaaactttcccccaactcctcaacactctcttcggaccataaaactaaaatcccacagcttcaaatctgctcctctgcctccccctcccgcaattaatcctttcgaacttttcccaggggattcacatctgccatcaagatgctttcatcctgctactattcctaagtgcctgcttcctcccagttacgtaggtactctcgacccagaaaaaaggcacgggcgaggcaggcgtccctccctcccaccccagcttctccccgacccccagcaggagcgcccagcaggtgcctcgctccgcaccgcggctcccgggccgctgagaggcggggcacacaaaggacccgcatggacctcccccccggcctcctagcgtcttcccccaccccccacagcccggcgccccgggtagctggagagcgagggcggcggccgcaggctcgacggagaccagggacgctcgccccggtcgccccctccctgaccccaaccccgcccacgtcccacccacgaaggctgcccagaacgtaaaccctcgcccggcaaaaccgaaaacgcatccccagcccggctgcccgggccctgcgcatccagcccgcagcctcccacgccgcgcccgccagccggcgcccaacggccgcccccgaccgcctcccacggcacccggctctttcccagccccggaagggtcccggtcccgccgcccgctcccccacctcccgggaagggcccgacacccgcccggccgccccgcactcacaggctgccggagcaggaggtacacacgaaggagccgaccgtcatgttaacgtaggtggggccgcgctggtcgcagtcgaagcactttcggttgtgcgggaggccggtcatgtcccgcagcatcttcaggtgcttctcctcctgcttccgcttcgcgctggccgccatggccgcggcgccaagggaggaggccggcagggccgggagccgggcagcgctgcgccgggggcccgcggtcccacgggccgccctggccgcggccgccgccctccgtctgcgcgcgccgcccgcgccggacccggccgcagcggcttggctgtactgggctcgacgcggcccgggcgctgtggtacgcgggctgacgggccacaccaaccggcacagccgggacaaccgccgccgccgccgccaccttcccgacttctcctgaggggaaaagacgaggaaggggacggcaagaggaggcccgccctgggcggccggtagccaagtgtccgctggcgccctctgctggccaggaggagtcactgcggcctcgctgaggcatgggccgggtctggagccaagtagggtagacacaatggtgataataatattaataatagacagtatttattgagcgcttatatatgcaaagcgtttcacatgggttaccttccccttctgtttaaaactcttcaagggctttccactgctttgagtataattccaaattcctcaccgtgccgtaaaaagtgctccatagtctagcccagtctacctcattcttcgtcgtcctcactcagccacactggattttgagttttctgaacacagcaagctcctttctgactcctgcaggacctttgcccttgctcttctctctttatctttgggccagctaatttgggggggcttggggtgtcctgtgcactgtaggatactgggcggcgttcctagcctatacccactagatacaagaacaaaccccccaattcccattgctggcaaccaaaaatccccagacattgccaaaagtggagggaactttagggcggtgcagtcacctggcttgagaactgctgcgtgtggaaacccggatcatccatagctgacatcctctaagtcaggtggggctcagatgtcacctcccccgccagactgtcccagatcagccgagttaatgttgcagctcacctttctcgaagttgctctccatcaaattgctgcgttgtattttcgtctcagttctagctatttgaaatactgcatcttatttcgtgtttaccatgggtgatctggactctccctttaggcgctaaacagcctggcccccgtattttctgtgccactccaccccattcccctcgcagagctggagactaggtgttcaatgttgacggaatgaatacatgaaatcgttcatgtaatcttcacaacaacccttcgaggtgagcgttattgttatttacattttacaaaacaggaagatgaaaccctgagggattaagtaaatttacccaagggtacctatggcgaagctcaattccaacccagacagccagactgcaggacccaaatccccactgcaacaatcaacttcgtctctcgttttccaaaggagtacagggagacccagagagctgaagttctcaaatcactgggctgttgaatggattagaatctacgtttcctaacagccaagaccaacctccacatctctcatgaaagggattgggtgaatcaacaaagtgagacttcatattaatataatactactaataataattaatgtttttaatattaaaagaaatggacagatagattggccaatgaatgtttttaaacttttctattatggaaaatatcaaactaccatgagcccatggaccactttcagcaatgattaagcccatggctaatcttgctttataaatacctcaaccctccatcccctctcctattattttaaagcaaattctaggtttcgtaccattcatctaaatggtacatagttccatttgtatccctaaaaaataaaaactttatctctttcaaacttagccatgataccgttagcatatctaaaaagttaacaataggctgggcacgatggcgcacacctgtaatcccagcactgtgggaggccaaggcaggtggattacctgaggtcaggagttcaggaccagcctggcctacatggcgaaaccgggtctctactaaaaatatgaaaattagccaggcatggtggcatgcacttgtagtcccagctacttgggaagctgaggcaggagaatcacttgaacctgggaggcagaggtggcagtgagccaagattgtgccactgcactccaacctgggcaatagagcaagactccgcctcaaaaaaaaaaaagttaataactcctaaagatcatcaaatatcgcactagtgtttaa

SEQ ID NO: 2541 - DNA, 4001 bp, Homo sapiens
ccgtttttacaaatgacggtgactgaaactctcagaggttaagtgatttgcccaagatcatagagctgtaacggtgtagtggaaattgaaatccaggtctatgttcccagccattatactgccaaaatgctcaactgtcttcaatttgctcccagtgtgacctttatcaaaggtaaatctaatcatgtattgccccacgtaaaatcctgtaaacaagattcacctctccagtcttcgtcccctgtcattctcaccctctcctactacacttgagtctcagcagttccctaatttgtctctcacttctttacctgtgaacatactgtttgtatgccaagaacaatttccccctttggcaaactattagtaatgcaaacatccaaaatttactcagacaatctttactttggaacatctttgcactaacaaacacaaacccaaaactgggttaaatgaccaggtggtatagttcccagttaagtttcttataacgctgtattataattttacctactaagctattccttccttaagagtaaataccgtatttttaaatttctgtattgctggtacagtgtgtattttgtaaagactcatgtatgttgaattaattcatcagaagcaagtatagcttaggaacttggccatgaagtcaatttgatgtgctttcaaattctaacctgtcacacagcatatctgctaagactccagcagacttaatttattcatctgtaaaatgggagaaaaccgcacatacctcatagcttgggaagaaacaaaggatttagcacactttggcacacttaaaagtacactttaaacattagctacttatttttttcactctcggtttatccatttatccacggtgacaaagccacacgtcagaaagtagcttctcctaatagccttcatcagagattgaggagatcgagaccatcctggctaacacggtgaaaccctgtctctactaaaaatacaaaaaaaaaaaaaaagatttctccaaaaacatcgaaagtcaagatctcttacaaacatccctcatcggttagactcttgtcttttagcttctggttacacagagctcagtagctataccaccacaccttaaaccactagctagtgtttgcagtttatggcttcttaccattcatcggtttcctccctcaaagtcaatacatcttgatcctaagcaagtggaacttaccccacagaaaccagtcagcacctttttccagggcaccaccagtttcccccacagcaggctttcgcgaatgagagagattcctatgatctatcatctagtacaaatttatatctcctcggagaaaaatagaacctctgctacccattccaagacctcagcaccaaaagtattaattcaagataaaaaatgaattcctggcactaaaagctcaggaaaaaggaatcctttaaacccttctccaacgagagttcttcaagcctgttaccctcacatagtgaccaaaatccaccatcccatcccgcccccttcctgacagaatccagggtctagtccactctctcgaaagagaggtgggtccctactttcagggaccgggatgccttccgcccacccgtgtcacttcccttcccacctcgcctgtgccctcctgcagcacaggcccggcctggtccctcgacgctaactccttccacataccgctactcaccgcttctttgggatggtgcccgactcctgcgcggcgggagtggccgtgggcgctgccgtggccgccgacgcggctctccgcgctttgcactcattggtactcagagcctcccggggccggcccagcagatggccagagagaacccgcagcctccgcccggcgcggtccgggtccgggtcccggtcccggtccgctgcagacccgtagctcgcgcccgcgcccaagccagtcccacccgctgcagccgccgcctccgccatggctaccgccttgtgctgccgcccggaaccgctgggcgcgggtgaaaggtcactcagagcggcgcccggcgcgaccattcgctgcggcgcatcccggcagccaccgcggcgacttggcggcgggtgccatgcgtctggagcttcacattctctgccccccacccaccgcgccggcgctcccttgtcacgcctcgggaagcgcgcacctgccaagcaggtgagttcgagctgactcccggttggcccagcccggtccagctggaccgagagccaaaccacgtccgccctcgaggtgtcctagaaccctgggtggtgtcctcgggtgtggcctgggggctttcgagggcagatgccttggagcaggagaaatgggcagtgctactggacctgatggatccagcggcatccttttcctgaaagagattctaatgttccacctgtgctcttcctccctgcggggtcaccaaagtaactcaaagctgaccatcattgcctctaaccattagagcaaatagctctatcattttcttatttctcaccacctatttcgtgcctggcactgtgtttaatgctagatcacaagtaagtacagaaactgagttgcaacttaagttctcatttcattcattactggatcctaaccccttcctaactttaatagagataaagtttcttattgctacagacaaaaattacccaagagctgtgaagacatctcagttatttacagattgaattcatttctggaagatagcacgtgaaaagtgctcctcacctgtttcagccggtgtcttgcataagaattagcttagacaaaaactcacatacactggccattgtcattctccatcctgtcaccactttcacatcatgctttcctaacaagaaaaatattggcagaggaatctgaagaacaccacatccatgggactagagactaacaattgctctcttgggtgttgccagcttctaaaattgagattatgcctttagagtgaacttccaaagaggcccagactggttaaaaactctcaattaagggctaagcaaattgctgttggagggccagctctagtctgtggcctgtttttacacagccctcatgctaatggtttttgtatttgagaagggttgttaaaagaaaacaagaaattttttaaaagaatatgcaacagagaccttatgtggtcccagaagccccaaaatatgtattacctggcctttacaggaggtccgaatgtcttctgaaatttatatacgaagagataccaaaccattgaaaacagtccaaatgtctagcaacagagaaatggttagtcaatatgttaaaatacttttgcagctattaaaataatttagtacagttgtagaaacaagaaagaattaggaatttgttaaatataaaaaatggccataacctaggcatcttatacgtatctatttaatcaatctttgcagtaacacaatgacacagttttattatccttattttatagatgaaggctcaaggagagtaagaagcttttcttaaatagctatattttatctcaaatatcatatacttcatgttattgtccttattccaccattagagtttggggccattaacattttacgttaaaattacttacgtaggcttggggtttttgttttttattttatagattctaaaattgaactttctaaaataaattttcactttaattataaactatactcctggttcttaaggattgagttctgggaagaatttcagagattgccaccacagctatcacgacctcattcatgaggtgcaagaacatgaaacacatatagcactttcctaggtatttatgactgaaaaaagagaatctttagttgatcttgtaaaattaaatatcaaagcctgcaagccactagtttctggcttttgcatactttgttgcctaccctcacaacaaagaagttgcacctgattgacattttcagtattcaactgatgaccagaaaagtggctatatgctcctacatgtttgataacagaagaaaaatcctagcttccttt

SEQ ID NO: 2542 - DNA, 4001 bp, Homo sapiens
ctcctcccggccctgacccccaccccgggtcccctacctcctccacctcctgcagtgtgtagtggcctccagggtccttggtcatcgggtgcactcgggctcctgggtgcaggacagagtgggccgtgagtgtcccgcacacactgtagaagccagtgttgggcacccgtggccctgctgagcagggccctgtgagggctggaccccacccaccgtggcaccctggctgcctgcctgaagaggagggtggactctgcccaatgagagcctctctgtgtgtagagccagggccatcttgacccccctgctgttggagccaacgctcctggggcactcttgacagagctcagctcaaatgccctttctcaggccacactgaccagtgcctccccaagcagagagtgagctcccgggagtcagggctgcacctggcccagggctggcacaaagagtgtacctggtccagggctggcacaccacaggtgtgatggatgacagactgaaggatgaggggtgagtgaggcagcagccttgacctctgttggagctggggactccaggaatcaggccctcaccccctccctgtctctgccctatcctgtgtgctgttcagggccaggttgtgggaggggaagaacctgcggccaaggggacagaatggggaaaagggaagccatataccacaggcatctgagcctgcgtgccctgatgtccacttggggtcctggcctctgccgaccctgggtccccttgaaaagtttgtggacttggggttgggaccctcttggctgttgcggtcgcgtattaaccagcatggccattgtggagctcaccaagctgatgtccctcaatgccacaatcaatcattaaacccagggcacactcctgctcctgtgtctctcccagaaaagtgtactccggaggcgaatactctgcccatacctccatattttgtgtatcacatcaagattccagaaggaaggctgctgagatttgaggggaggcttcagcttctgaaaccccaccctgtcacaaagcagagctggtgcctggggccctggacagcggccggggctctcaggagtgtgtgctgggaccagaggcttccctgtagttccgtcctgcacatgctccagaaacagctcaaggagactggggggatcggggcacctgtgctgctcccagccctatcagagtcaggcctcatgagtgcccgacaccgcctggaggaggcagtgggctggcaggaggttcgtgcgcacagggccacaaggtgggtaagcgctcacccaggaacgggggctgccagcttcaaacagagggaggccagggaggccttgaaggatggatccagggccatccccacctgggcctctcccttacctatgcgctccccgatgtccacggctcgctgcccccaaatgccattggccccaaccaggaaggagtccccaggctccagcacattgaccagggcggcctccagggcacagtgtcccgagccagagatgaccagtgtgagtgggttcctggtctggaacacgtactggatgccttccttgatctcgtccatgatctgcatgcgggtggtatagggtgagacccaggctccccgcctccccaagtgaggaggcagtgacccccttccctcgtccacgatctgtgggtgggaacatgggtgagacccaggccccccgagtgacccccactcctacctggtacatatccttgctcatggacccgatcatctgcagccccccggctgccatgatgcgaggaggcaggttggaaggaccaggccccagcaggagctggttggggatggagaggggcttgagcagggccttggggggggtcaccagcagcttgtgagaggccatggtccgcacccaacctgccgctcgggaacctggggctgcactggccttggccaaagcctggaatatttcccagcagggcggacacagaggtgagaggtgaggattggtggatgggcttccgtggcagccctgccttttgttccctgaggcttatctgtgcttgtgctgcgggtcacggccaggcagcaggggacgaagccctcaggcagagggagcccccagggctgagtgacagaaaaacagagtgtgacaaagctgtcctcaccccagccctcctcgctcccactctgagtcctgcacgtccagcccctcttattctgcttagctcaggggtgagagaagtgtttcttaaagggtcggagcacagataattgaggcttggcaggccctgtggtctatgttgcaacaactcaaccctgctgcgtgcttgcaaagcagctgccagaggtgtgggcgtgttcctataaaactttatttacaaaaagcaggtggcaggccagattgggcccatggactgtggtttgctgaccctggcgcagctgatgggaaggcttgtaaaccaaaaataaaattcgaaggccccccagcaaccatctgaatggggttccctgtccgccagggtgctctaaactttaacccggaagacgttcaggccatgccacatcataacccccagcattaacatcgacatagaccttaagtctgataggaagcatttaccatctattttctctctaaatcccgctacctgaaggcatcatctgctccctgcaacccctatttcataacccagacactcctttctgctgataataattcttcagtcagttgccaatcaaaatatgtttaaatctacctatgacctggaagccccccaattcaagttgtcccgcccttccagatggaaccaatgtaaatctcccatgtattgattgatgcctcatatctccctaaaatgtataaaagcaagctgtgccccgaccaccttgggcccttgtggtcaggggtgcacccttgagcttggcaaggatgtcctccctcctgaggctgtaccacgggtgcatccttagccttggcaacaaaaactttctaaattaattgagacctgtttgaggtactttttggtttacaggctcaatttagcaagcaaacctgcatggtatacagacacacacaaggcaggggttgcacagtgagtttcagcatgctgcattccagagatgtatagaaattctagttatgtataagttttaggttgaaaagaggcctggaaccaggtgccaactttagataatagggaagtctaattcattctacatttctcaaataaagaggctcccctccacccaccccacctggggcctgcttgatggtctccaggtgatctttgctgtcctcattttccctctgacaaatatcttggtgaaatctttgacccttccttttctgccatgctcatgtccacctgcttcctgttggggtctcaagaaaggggaaacggcacagtgaagaggggtgtccagtgcgcctgactacttgctgctgaaagggagttcaggggggtaggtcacgtttttccctttcttgctctcggtcatgaagggaataaagggtcatgaaaacttgtgcacggaggcacgtgatgggattccatcaagaagccccacgtaaatgggagctgcagttgcaggccggtatttccatcaagaagccccatgtaaatcgagctgcagttgcaggccagtgttgggaatgcatagccttctgcaggtggaattgttctcatgtagaacatagaaaagcaatcagagcattaaaaaggcagggaccaaatattaaaagaaaaatgacagaagataaaggtctaaggaatgggggaagccaagtgattttttgaaaaccaatcagtaaaagttttggcccagtcttggttgctttgggaaagtgtgtgtagccatttggcttgtttgatgatttcttgggcatcggtttccacttctccagacacataaatgtaggtgcaacgggtcctgttgatgacagcacagacccctccttgttcagctaggaggtaatccagaactcacctgttaccagacaccaaaatcctgcttgtgagtc

SEQ ID NO: 2543 - DNA, 4001 bp, Homo sapiens
acaagggcctggtagaagagggcccagctgacagcaatgagctctaagcagctgcgagtgctgcgagaagggaaatccccatccttcttggcccatggaactcaagtgtggccagagtgtcaggatctaccaacgctgattcaggagccagtcagtgtgccaggcccatagcaggggctgtaaaaacattcgctgaatgatgaacgcactttgtccccagccccactagtaccctgaggcccctgttacctttccagcccagtttgatgttccactcatagaagaaaatcagctttcctttgcggctgctgcacgaagcctccccttccacctgcttcaactcgttgatctcgccgcggccagcgtcattctccacaacgatgcccaccaggagctcctggaacttccctttggacaagctggtggcatcccgctctgtcctgccagggaccagaaagtcgtgaatggaagccccagctgggatccacctgcctgggtgccagggtcacgtccaagcccagcccagatcggcccaagtcctctcaagcagcctcgaaacctgccaacctccaatgtgctcctcaaacctgctttctatcaaattcttttcatcctgctcagttctttaagatattattgtccactatgcaagtagtattctgtcttaaaaacactggcttatttaagggaggaggatctagctagctcgcccactggaaataggcaaagcctaggccacagggaaagtagcagtagtgaactaatcagaatcatgacaataccagctatcaagtgtcttcgcatatacatcgtctaatgtaatcttcccaggcaatattctcactttaggggacagaaacgagctgagagaaatgacatgtccatcgggccaaggctaggacactagaaagtcagatctagctcacgcctgtaatcccagcactttagtaggcccaggcgggcggatcacgagatctggagttcgagagcagcctgaccaacatggtgaaaccctgtctctactaaaaatacaaacatcagacggacgtagtggcacgcatctgtagtcccagctactcatgaggctgaagcaggagactcgcttgaactctggaagctgaggttgcagcgagccaagattgcccatgccctcagagctcctccggaccagccaagtcatgctcctctggggaccggcctcagcatcccctcgacggcctggagggaccacagccccggccagaggcgcagggcagaggacatcccttccggaggttctgcggcggagggctgccgacctctccccacgcgccaggtgaggcgcgtaaaggaaggggagcttgtctcactcacagagggcccggctcgcgggaggcgcctgcggggtgggcgcgaactgagatccaaatttctgccctttccactacgttccatacccccgcccctaacacagtctctcaatccagctcccttctaactccccgaaacatccagaggggtgggcgggaggagaagggaaggccctcaggccacagacggtgggagtggaaaggtctgtcggaagtcactcttggggcccaacccaactttcaaaaagaggcagctgcaaccctcctagccggtctccgtactcaaggactctcccgagccgagaggcgaaggccgagccctgcgtccagcagctgagggggggcggccccctgaccccctggccccgcggccccgcacagaccccagggcagccccggctcccgcggcccggccctccccagatcccggaaggaggccgccgccagccgcgccagcgccagttgttcacgttggtcccgtcctcccgctcctccacgatccagtgggggttcccctggccccacttggccatggcggcgtggactgggcggaaaacaaggaaaggccgcggcgcctaaggctccgaagccagcgtttccggccgccgagccccggggcggcgcgttcgcagctcccagaaactgccagaaggccccgcccccggccccgccccgccctgccgcggcgcgcccgggagccccagccgggatctgggaggcgggtcgcgcggggacgcggggacgcggggacgcgcgggcggggaggggctggggccgccggggttccgctgcgcgtctcctaacgctagggcgggacggggctgtctgggccgcctgcgaagggcggagggcgctgcaagtcccgcggtgctggcgggctcgtgattcccggcgccgggaagcagggcgctgagtagcgggtgcctgagagtccaaccggcagtgtagacgcgacaccgccgtcaggtggcctcggcaggctccctatagctctcgaggacacgacctcgaacgcccaggtcgctgtaagaccggcctttggggccacagcgcgcacacgtcacaccgtttgcggatttcgcctaagagcgagtccgcgcccagttgccgcgctgcggttttttccgcgacgcagtctctcgccctccccccttcccggcacctttccaactagtcccatgttactgcgggagtatttccattttattcacgtaataatcctttagagagaacgaaagaatgtgattgcaaacgcatgttactgcaaactgatgcactttatcatggagtattaatgattcctttcacgaattttcggcttctagctaaaactttgcacgaactatttggacaatgttactggggtgttctctgctaactacatgggtagttagcacagaaatgggtagaacagtgaaaaggtggaagcatctgactgttctcttcccctgtgccgacctgtcctttgcctgcggtcatccacgaaatacactcacgagtggagacattttctccatttgcctaccggagctaccaccttccaacattatcttccagaaagctacaacagtcatgtaaacacactgcttaaaggcgttttgacctcaaaacaaaaagacgttttgatttcacctttcacacttcactaaagcagctataacagagtcacatgaaggagcagcgtggtggggttgcctgatcttaagaagcctcatttccgctgctaaggagcttgcacttggccatacaggcaatgggcaaccactgaggcaacctaaatggagaaatgacacgatcagatgtgttctagaacaatcagtcttggccgggcgcggtggctcacgcctgtaatcccaacactttgggaggccgaggcgggcgcatcacgaggtcaggagatcgagactatcatggctaacacggtgaaaccccgtctctactaaaaatacaaaaaaaaaaactagctgggcgtggtggcgggcgcttgtagtcccagctactcgggaggctgaggcaggagaatggcgtgaacccgggaggcggagcttccattgagccgagatcacgccactgcgctccagcctgggccacagagggagactccgtctcaaaaaaaaaaaaaaaaaatcattcttacggacttttggacaatggaccagggtaagatggaaactggaaggagggggacttctcagggtggagaaggggtgacaaatattcagggatgagaggtgttcagaagtggaatgtaaatgcgtcagacactggggtgcagcagagaaatacgttttgttcagcaactgggacttgcaggttggttagtagccgcaccctcagaggctagaatggaaagaggctggaatgaggcttgggctataactctgggaaaaatcagcaggtaagaggtaggcagggaagagggggcctgcaaagagcgactaaggaggaggaaggcaaccacaaaggcatttaatcagggagccagggtgcacggtagaagcagtggccgtcatcaagtgtggaaaagtatgagtcggatgataaaggtatataaagatatgtattgggtgtaacaacacagaaggtacttgagccttttgcagagagcagtttcagtgaacgatggggcagaagctgggtcacgggtaacgg

SEQ ID NO: 2544 - DNA, 4001 bp, Homo sapiens
gggcaatagttttgacatctactactaagcttggaacctggaagtaatcggggcatttcaactgtcccggggcccaggaagaggggcgcccaattttgtctcggacagcgtataagtccagagaagaaggcgctctgccaagagtatgaaacttttcccccaacttggttgctaaagaggaaggaagacccctgaactgcgttcagggagaaaacaagaaactacggtctgattcgggaaggaggtttgcgggaggaaggagggcgatgaagcagagctgaggttttagaaagtggggtggaagtgaagattatttaatggttgcatatcaatgtgactaaaaacactaaatcccggcacactcaggcgggagctgctcaccagtcccgaagatctggaagagaaggcggggctgggaggcgcgaattgccgcggacagccttccctctctgcccacttccgacgccttcttctcgggcatcaggcggatcctcagtcgcccttcgccttggcgaatccaccaactgaacagctcgctgagattgaactggagcagccccacagccgcctccccggggggcccgacgcaaccctccaagatcgcctcctcgcccagctccagcaccaactgcttggcacgccggagcttgcgcacggagccgcccttcagcaccctggacagcgtccgggcctctgccggggctggtgaaccggcggtccaggagacccccggcgccggccccagcaacctgagcagcggggcgcagtccagagctagcgagccgcgggcctcgggcctgccagccttcagctccgaggaggatggtggcagcagtaggtcccgggcgtagacacggaagagcgagggcaccacgaagtcaactgccagactcttcctctgcaggcgcgagtagctgagtggctcccggggctgcagcggcggccccgcagctggggagcccgcgcgctggccggtccccatcccggagcccacagctgccgtggaaagcagcagcggcaggagccacaggagcccgatggctcccatcccgccggaggaggccgtttacactgctctccgggcccagcctcacccttcgctctccccgagatgggaagaggctctgaacagtccttggtacccagcggctccttccacctgatctccagaggactgtgcgtgcgcgcaagtctcttgctttcccccaactgcacggaggcgagcaggagtctaaatgaaacagacctggaagctcaggggcgagtccagagacactcaagcacactgggctcactggctgggaccttgagcctcccgctctccgcgccgagtgccgcgcccccgtctgtagctcgctgcgctcggtacagaggaactactatggttgaagggaggtggcagttgggtaccgtcctctcctgccccccgcagtcggagctggggtctgtcccctctcggggcagcctccaatctctgcaacttttaaggctgagaacggcggctcccagctgctgcacgctgtcctggccgccttttgcgttccttttggctcctccaagctcttctgcccggtctgggcgggaaccgagggcggaggctgccgtcttgcgcaccctcaagctatctctccgctgcgggaaggcttcggactgtctgcctgctgaacttctgggcgtgaatcccagcccccgcgctgcgcaagtttgcagcgtccttgctctcaccggcgcctcggctcctcagagttcgcaggcactggagcggccccggcggcagcagctgagggcgttcagggcaggggcgcccgaaatcttgccgccccctcctcacccatcatcagcgcccgcggctttgggtggccgaccagagggcggccggaaagcacctcggtgccccgcgaccctccgaacagaggcggcgggaggtaccagctgctaccaccgctgccgcccccagagccgctggatcgcatctgcctgggcgcccgccacttgcagctggctgagccgcgcgagcgcgcgcagggagggggcggggcccggagggggcggggctcacaagccaactccgcgctgctgcccgacccacgcagtccggcctcgccccgccccacccgcaccctccaaccaatggcgtggctcgatcggctcctatgcaaatctgcagaggcctcggcattcattgagaaaaggagtgagcccgccccaccctccctctgttccctctccagtctcttgttcttcccctcctctagattccctgccctatttctctgcagtgtgaaagggagcaaatgtgagaactggaagaggcctttgcaatcaagcactctccctaattatacatttaagagattaaacgggtccgacttcggaaaaacaggttccagaataaaactggaggagaggggaagggaggggggagtgggaagggaggaggaagtggggagagggtggcagcgcgacactggcaaatctgagaacagcttgtattaaggccctgagacagaatattttctgacccatctattatttgaatgcattcctgggagcttaggagtcctgccgtccacacaggagaatttgggaataggggggcagagagggatggatggtcttggtctggcagagttgttctgcagctacaacaaatacctttcagacccctgtcagtcgctctgttttctcagaatggtgtctgaacatgtgtaacctcccctagtctctgtaaggcaaacattttaattccagatttacagatgcagaaactgagttgcagagcatttaattgtttgcccacaatcttgggaatgagggttcagaaccttaggccttttttactcacctgtaatggctgtacctctcctctccctttcctttcgtctctcctgagctgccaacacagaactcataatagctgtttttataacaagtggttcactagatcctcagacaaaactaccatctttgggtcacacaaatccccttgattccttcttaaaggctggttgtcaggccttgggctgactgttgaagctaagaataaggcaagatcctctctggagctcacggcctgtcgggtagcacaggagttttctcacaggatcagagcacagtgtcacattgaacctccctcactgagctcctgggggccgcagtaacttgcctaccaccccacaggagatagtggccaggtggaacctctgttctcctaggagctgggcctttccagctttgtggcaatgccttggcaagtggaagacccagtaacaaaggaatattgattctcggaatggctttcttcctgctctatgtttggcaactcacttaatttgacaggcatctgccctctctctggaagtcacactggatacactgactttacaagtttcagggcaaagaattatctcacccgagaagaaaatatgctcctatcttggtggaggaagggtggaaaagaaagaaaagagggaggaaaatgctatggtagttaatactttcctggtacaatatatgtttgattttcatcagatttttctgacatacctactggaagaggaatttttatttgaaatatgaaaaaagactaaaactccagcctttccctatttctctatacaattcttgaccaaaggcattactgactccagttaatttgtcagttaactgtgaatcgtctgctgcacccaatggccactagggggctgcagagacttgaaactttaaatgagctgccagggtttaacgttctctaataatacccctgtccattgcttttgcacctcatagacacaagagtctcaattaattctcatgatttatacattgtctcaaacttttcccaaggaaaaataagtgcctttccctgtagattaaatgacactaaatctcaaaaaatttcttcttttttagataatttttttttaaaggaggcaggaattaatactgatagtctaccaggcacgaatgtatgcatctgtagacatgtgggtgtctaacac

SEQ ID NO: 2545 - DNA, 4001 bp, Homo sapiens
aacaagcagctctcaccagactaacagaggaagaaccgtctcaccacctccagaacggcaccaagccattcatgagggatccgcccccataacccagactcctcccgctgggccccacctccaacacgggggatctgattgcaccatgaggtttggggggacaaacatccaaaccatagcaccccacaacctcaaaggctgttatgtgaaaagtctccccacccctaagataaaaaaatgtgagaaaggagagaccgtttaaagctgggcctccaggccacagcacaggcccaaccagtgtctgctgtgaaagggccgtgacatttgtctttcctaagtttctctcctcagccacaaatcccagaagtatccacagtggcctgtgctgtgcagggccccgtggaggttcccgagagattccaggcagccaagagctggcggtataaggggccgttctcagccctggtggaggtcacagctccacgactcttgcgccatgagcttgctgagctctctgctcactggtccctgccgtttctgttgataaaatagccaaggtctaggcaagaaaggaaggagccacgcgacctcggctgaggccaccagctcagcagctcacagtgctcagacagcctgtggcagctgcttctaagctcattgctgcaacccctcccactgcctgctcaagggagctcttaaatacattttctgctgtggctgagaccagacccagggtcagctctgatgtttgaggaacatgctaaagttttacctgcaaatttcaacttaatcaccgcaaatgaggagcattgtcatgggttacggcaaggcgatgaggcaatgactctctaaaatagagtcatgaaatttcaggcagtcaagtggtgctcacactattttttcttttgagattagccttaaaataagaaaaggcatgaccaggcaagtctaggaagcacaagaaagagagacctccctctgacaagcagggaaggctgtgctgatggaagagttactccctcgtaaagaagaaaaccttcaggggctttgtcatcgctgtcaataagttccgaagaagcctttggccaaaagtatgagatttatggtgaaataataaaagtggtttgttcaaatttgggacaaaattagagtgaccttgagcagggactctgagcagcccaaggtcaactgcacgagactcctgactaccggcaactcttggtatatatttacatttagttctactttgtgactcttgttttgaatataggtttacttcaccatggccttagttgtttaggtttttttttttttttttttgagacagggtctcactctgtcatccaggctggagtacagtggcatgatcttggctcattgcaacctccaccccaatcccatcccgggctcaagcaattctcccatgtcagcctcccaagtagctgggaccacaggcacgcaccaccatgcctggctatttttttgatttttggtagaaatggggtcttgccatgttgttcaggctggtctcaaactcctcaactcaagcaatccacccacctcggcctcccaaagtacagggattacaggcatgagccaccatgcccagcctctttagatttttttttaagaaggccaaagtcacatgatttgaaaccaaacagagcagtgaccagagcccagaagcctgacccacctgtggggcccctccaggtgtttgggccacgcccggtaccaacacagttcaacggcacaaagtggtgtctgtcaccatctaccctctgtcaccttccaagtgtcgagggttcgttgcatgactgaaattcatctctgtcaccctattcttttggcaaagcccaccttaaagatagcaaggtatttataaaccacactccagctcacccagcagtcagaaatcaagtattcataaatggatctcttgctccccagaagccagccaaggtcccacggtgcttgagtgccagctcagagagaatgtataggggcctgaggtagagacagaactttgcagagattggctgtgcctgtatgatgtcacaagggttgcagagaggtggaagtaacagggggagcagcccctccccggagaagccaagcaggcctctgcaagaccctcgcacaaggcccgaagccagacatggtccctgctggtcccagggcccttccctgtccctaacaaagctgcctccggccactggcctgggcctgaaacccccaccttcctggtccggccagtaacctgacttaaagttttatctctagacgtcacctattcactaatcatcattaactcagaaaacactgagcacacccagcagtgggtcctgacctactagagaagacaggggcccttgggagggtttggctagagcccctcagccccagaaaaagtaaatacacacaaaattttcatggaatttaaagaagcccacagatgcttaagaaagggcaccttgccaagtggatgctaggcctgtggcatacaaaacaacacgtgccgcctgccttcaaaggccccactgtctgcagaagaactttccatgcagaaagaaacagctgagcccggcttcgacatgcagtaacagacgttgccttgcttcaccacagccaccctgcggggcaagctatccactctgcagatgaatcagctggggccttgaaggcaggaaagccacccgaggtcacctgcgcagggagggactgagctggaaccagaacccagcacagcagatggcgcgcacaggggcccttggggctccagaaagacaacctgcgtcccagggagatccatcacccacacgctcctttttccttcctgggttttctttccccagggcctgaccggccttctcctcctgaactccagctttcccagaggaaagcaaagccatttgaaaggccggctcaaggccacctccaactgagaaccccacccccaaccccagcccgtctctcagccccgccacccagccgtagttaggatgcgtccagcgcctgttgtctgatctcagctcgcccggcctttgagtccatgtttacacatctgtctgcccatccagatgaaattctttaagaacgaaaccacatcctatgctgccttccatagctgactgtattttaatgaattaatgcacgtggcttcgtccctggcagttcttgtcagccgtgacttccccgccacagcagtgcagtgcccccgctcgccgcctcggatcagtcacaaagctcacggtgcggagaacagaagggcctatttttatcctcgtggtttcgctaagcctaggctgtggcaccgataaagccatggaagaaggcaccctgacccctgccctccacaccctgacctctgccctccacaccctgacccctgccctccacaccctgacctctgccctccacaccgagctggctcctacaatctaatgtgcttccaaatcacctacgagctggttaaagtgcagattctgacgctgcagatttgagatacggcctgaggcttgagatttctccaagctccagggcgatgctggggctgctgggccatggccagaggttgagcacagggctctgccagctagctgccccatccgacgtggcagccactagctatgctaaattcaatacttctctaacgctaaaatcaacttaatttagtgaagttaaaagtttggatgctctgtcttatgaggtaagtttctagtgcccaacagccacatgcggcagaggcgacaggctgggctgcacagctacagaactttccatcgtggcacagcagacgtcctgtggacccatctgtggggcgggaggagaacaagagctggcagagaggtggtcccagagcagtggcctgagccagacgtgaggctgttctcggagctccgtaggggcttcaaccctcctgccttggtcctgccaagacatgaggattctcatggaaagggctggagcaccctcagaataatgccgccatccccggcctc

SEQ ID NO: 2546 - DNA, 4001 bp, Homo sapiens
atcacagctgttccacactctgctatacacctgacctttctgaaacacctaacttatcatacatcccctcgtttcaaatattttcttcaactccccaaagctccagagataaagcccctaaatccttggcatagcacacaaagccttgcagtctgtgctcaaaccacgttggcttctgggtcctggaaaatgccatgctctctctcatcaacagtaccttttcatgtgtttttccctcagctagacggctctttccctcccctttgcctgattaaccttaaactgtcttcagatatcagctctatcataacctcctcaagaaggctttcccaacttcactgacaaggccagattatcttactttatgctttcatagaatattagcacatatattagtttcactttatgtgatcatctgaaatctgtctgcctccctgtctagaccatgaacacaaggaaggcagagaccaaaaatgtttgggttcaccaagctttccttagcacccagcacaatgtgtggcacatggtgaattctaataatacatgttcaatgaattaagtaccccctggaatattcaccagacaaaacaacaactactgctcattagtgacaaaactctacaccttcactgtctgtgatgatggaactgttccattatctgctctgtccaacatggtagccactagcctagtgtggctgctgagcacttgaaaaccggtaagaacagacgcatggaatttttcatttaatttatttttaactcttactcaaaactataatagttttctctttaagatgtaaaaagccacacgtggccagtggctactgtactgagcagggcaggtcttgctcctcgaaaagcagtaagttaaaaaaaggggggtaagggcagcaaattaaatggagagttattttcaaaatgatcttcgggggtctaccatgaaatcggctttctccattgtgtattatctgtgctttgtagttttgcagactgtttggagccgcatcacaagcctcctgcattccaagcccctcctatcggctggggaacccctttattgctacaaatgatggtccaggggaggaaaacccgcggggagcctctccagactaagtgatcgcgcggtgtacattatccacattactccctcaggggagtcctgcaattcagtcaagctcatctgttcactgtctccccaacaagatgctccccaggcaaccactcgctccggtcctacaccgccttttccctccttcaaggctcgacacacccgtggtcctctctcagcgtttctcacggggaatgcaggctcccctgaacgtctacgggagttcaaaaggcccaggacccaccgagggggaggaaacgagaagtctttgccacaaagcctgggagacgcggagcagccggccggcacctgggctggagtctgggccgcctactagcctcagctgcgcgcgttttctccgtcaggcggcgtgacctgcgggcgggcggagcgctcggggcccagcctccacccccaactcgccgcggctccacacccctccccggcccgcctcaccttctccagggaggtccgctcgccctccgagtagcggtgctgcgggggcgacagcggaggcaaaatcctgccggggtgcgcctgcagccaggccttggcctcctcgtcctcctcgtcgtctatactttccagatgctggggcccgtagtgagagtcggagtccaactcccgccccgcctcttcctccacctcctccacgaccactacgtcgtccacgttcgccgccgccgccgctgcagcctcctcctcttcctcctcctcctcctcctcctcctcctcctcctcctccagctcgcccggccatggcagatcctcgggctccatgttggtgtctcgctctgggcggcagaggaggaggaggagggggggagggaggggaaggggagagccctgactggcggttgtggcccagcttaggcgcagtgccgcccgcctgggcggggccggaagaccgcgcgcgcgttgctagggacgccgcgcgaggcccggcgggaacgccttagggcggaggtttgctacaggcgacgttgccgcctcgccgccgtcaccggccgggaccttgcgaactgtactgtaagctcacaataaaccgggactgggcgccttccggggcgcagagggccccgcgcaaggacagtgtagttctcggctggggtcgagtttcgcccctgcacagagaagagatcaaactctaggacgtacccgttataatcacacatgcaaattataaagttttaaaggttgagtatctcctaaagtgtcaagctgtatggtgggcgcttgaacctaaccgtggaaaagtgtcacgggttgttagagggattaagaactgggcactggcatcagaaagatcggagtttgaatcctggcatcaccacttaaagtggtgtgactttgtgtttataaaacgatgataataggccatcgcataggatgggtgtgataattaaaggaaataatcaatgtgaaggacttagtgataggttggttattgtacaataactcattagatgctcacggttctgtgagacaagtattactatttcatgtatgaagaatctgaggctaaaaaaattaatttgcccaaagtttcttacctagtaagtggctgactcagtatgccatcccaggtcctctgttagtgtaggaattgccctggcctagaccaaccagctgttaaaggataacagagcaaatatttatactgatagtacatatgttttggtggttcgtcaatgactttggagtgctttaaaaacaaagatttcctgaccgcttcaggaacctctacgaaatgaatggcaaattaaagtatcttaagatgccatgtaaccagacaccacctgtacccccaataacctatggggaaaatttttaaattaaaattttaaataataattataatcttgagatgcttcactgttaccaaaggaaatagccataattaaagtggagtccagcaaaaagtcttcatggtattacccacaatagtagagatacattgataatgatgctgaaccaatgttggtggggcaattttagggttattgccaaggatgtatgtcctgcctacctgtcaatgacccaatcctggcaaaactttaagggtagaacatgaactggagcccagtcttggagttctgttgaacacctctaaatggactatgagtacattagggttatttattcttaaggggtttaggggttctccttgccggagacctattactgtaatagtagaaaagaatttattaattttgtattcctgaatgtgaaatctcaatgtttatctccagtaagaggacacacatttcactgatattaaataactgtaaagctttacctttttagaaactccgctatctttttgcatccacaaatttcaggaaagataaagagaactaatagaattctaaaaaatagctttcaaagttctctaacttccatctaacttccaaagcccaaagtacttctatttgccttgatggcaataaggtcagtccattctaaggcccataagttatctccttctgagttaataacaggcttcctcatgtatttgtgaattacttccaatactagatgctactaatataagctgttatcactaattgctgcaggagacttctaagattaactcctgctttatcaacaacagatggaagctgcattctcaaagcacccacctaagcagcttctgaagttagagatttggtcttctgaaaaagcattagaaaacaatttcccttgagcctcaatgcaagaaaaaaaaatgtcaggtactatcaacaactgacccaggagtaaaactagaagacattgatccctggattcatattacacaactaaaaagacatgcatcattttctcctggctaccggacatcccatactattggaagacctcaaactgaagattcctgggacttccccaga

SEQ ID NO: 2547 - DNA, 4001 bp, Homo sapiens
agaggtagaagccgcgggggttcctgctcagcaggcgcagggcagcctctgtcatctccatcagggaggggtccagtgtggggtctcggtggatctcatatttcgtgtctccgggctcaaagaggcctgtgggacaaggagcttggtggtgattggcaggctgtgagcgggagggtgctggcaaatgggcacacaggctcggatggcaccctctgaggttgtctgaggaatgccagggcaggaagggggtcattacccatgagatgggtcacagactggtccagggacgcctgcatgagctcagtgcggttccacacataccaggcaccctgcagggacagagccaggcttcagcccacagccctgagacccacacacttggcctccccctgccgtgcctcccacacccaccagcccccatcacctggtgctttgccagccattcctgcaccaggttcttcccgtccagcctgattccattctggctggcatcagctgggtactcagggtctggggtccccatgggaaacatgtacttgcggcctccgccaaggatcacctgaggacaatggatggggcaggtggtttgggggcctggctggccccgtgccccctcctcatgcatagcccctggctcccctccccagggctgtgggaatggcccagcctgtattgcacattctacatccccaactccacctccagaacctgctgacccagatcaggcttttggttgcctggatctgagcctgtgccaccttcccctctgcccagccccagcccttggcccgggggtcgcacgtcaatgtccatgttggagatgagctgagtggcgatgtcctggcacccctcctggcgggctgaggcaggcatgtcagcatctgagtaccagttgcggttcactgtgtgtgcgtaggtgccggctggcgaggcgtgctgcacccgtgtggtggtcaccactcctactgactttcctgagggtgacagaggtcaggatcggtgaccgagatcttgggcctggtcctgaccccacagcgggccccagctcacctgcttgcttggcccggttcatcacggagatgacctcattgccgcgtgtcgtgttgcactggttaaagcgggcggctgcactcaagccgatggtctggaagttggccttgaccccgcacaggtaggccgtggctgtggctgcgctgtctggcacctgtctgtccacattgtatgtctgcgaacggagacaccctgagctctacttcggggcggacacccagaccccaaccaaggacctggttctggtcctctgggatcctaactgctcccagctcctaacttaggccccagctgtcctggctccctccctcctgccacactccatatccttgatccctctcctctgcttggaggactctgaggtggcccagcccttaccttggacagagccaggtatgggaagcggtccatggccaggggcgtctcaggccccagtttgccattcttctgcccctttaggatcctggtggctgtcaccgtgggcacccccaaccctgaaggagcagaaatgtgtgagtcctgggccccagggttgtcctggaaccactgaaggtcccgggtgccggggctgtgaggactacggggctggacaggccttgctcactcaccatcgcccaggaagaggatgaggttcttggcgaccttctggatgggctgcagcttcttggcagcatccagggcctcagctgcctggcggttccagaaggccgggttctcctcctcagctggccagggggagagtagagatcaggtcagcctggctgagggggtgccctgtgtgtggaacagcttggggagcctcattacctgggatgacgcccagggagagctgtagcctcaggcccagcagcagcagcacccagggcccctgcatgtcttgggggcagcaggagggaggcgaagtggggacaccaggaaccggctgcagcgcaggctgcctgggtttaaatcaggggaggactttgcccctggctgtaaatgctccacgtccctccccacacccctggtgtccatcttgaccccgcccagtcctgtgacctgaagccaagcttgctgaagggaagggactgggtgtggctcacagtgtcttgtgggagacgcgttgccactccttcattcacctcattcaaggtgtgaagagaggtgagactggaaacacacagcctaggccagggcccgggttagggctcgtaatgtcacgagccccagaggagtgtgaaaggaggcacactgggtggcctggctgccctagaacccacttggtgtatatgggtgcccacacctatgtcctgaggacgcaggctgggaaggggccagtgctctgggtcagccagacctgggctgggtcttccagagcagcctgtgcacttgaggttgacccctgttcccttgcacaggtagatggagcctggggtgagtctgttttccatgggccccggggaacacccagaagtgtagcctctgataaggagttcagagagtttggtaacctcaggctgagttcaaaagtattgcttcagtccagacatcccactctgagtgtgtagccaaaggaatgcgaactagggactcgaacagataactgcacacccatgttcccagcagcattatccacagcagccaagagctggaagctacccaagtgtccagcaaaagagaaatggagaaaccaaacagggtgcacacatacaatggagtatcacgcagccttgaaaacaaaggcgaccctgacacctgctacaacatggatgaaccttaggacattatgctcagtgaaatataccagtgcaaaagaacaaatacgcacgaacacacttctctgaggtcccgaggggagtcaaatacatagagacagaagtggaatggaggttgcctgaggctgagggaggaggcaatgggttagggttggggttagggttagagttggagtttaatagggacagagcttcaaggttgcaggatgagaatgttctggagatcagctgcacaacactgtgcgtgtactcaacactgccgccctgtacacttgaaaatggtgaaggaggtaaacttgatgtaccgtgttttgtagcacaattcaaaaactggttcaagaagaaaaggctcctccagctccacccaccccagcccaaccacagcagccccttctccactcgagcctgtttacctcaaaccccaggcttggccctcagaacccaggggacctcacctgctgcccagcctctgcctgccctgccccactccccaccacgcctagggcctccctcaggccgagctttcccgggtcctcctgcctgcgccctcctggcttcccggtggtcgtcctggggctctcagggaagatgtcgctctcataggtccttcttgccccctgcttgttgcccccttagtttcctctacctcctgcttcatcttgctgagttaggaacattcttggctgaaagtcagaggagactcactaatgggtctcctcaattaattgattgattgattccaaagtcaaggtgagtcaggaggctttatagccaccctgagtttcatgtttaagttggaatttttgacagaactatagattcacaagtagttgtaagaaataatacaagctgggtgcggtggctcatgcctgtaatcccagcactttgggaggccgaggtgggtggatcatgaggtcaggagatcaaggccatcctggctaacacagtgaaaccccatctctactaaaaatacaaaaaattagctgggtgtggtggcatgcacctgtagtcccagctacttgggaggctgaggcagaagaatcacttgaacctgggaggtggaggttgcagtgagctgagatcatgccactgcactccagcctgggtggcagagtgagactctgtctcaaaaaaaaaaaaaagggaaataatacaagaggccctacgtagtggctcacccctgcaatcctagcactt

SEQ ID NO: 2548 - DNA, 4001 bp, Homo sapiens
ccaggctcaaagagacctgtgggacaaggggtcctgtggtgactggcaggctgggggtgggcgggtgctggcggatgtgcacacaggctcagaaggtgccatctgaggccatctgagggatgccagggcaggaagggggtcattacccatgagatgggtcacagacgggtccagggaagcctgcatgagctcagtgcggttccacacataccgggcaccctgtggggagggagagagccaggcctcagcccacagccctgagccccacacctctgccctccccctgctgtgccccctgcacccgccagcccccatcacctggcgcttcgccagccattcctgcaccagattcttcccgtccagcctggtcccaccttggctgtagtcatctgggtactcagggtctggggttcccatgcgaaacatgtactttcggcctccacctaggatcacctgggaacagaggatggggcaggtggatttggggccctggctggccccgtgccccctcctcatgcacagcccctgactcccctccccaaggctgtgggaatggcccagcctgggctgcaccttctacgcccacaaccccacctccagaccctgctggcccagataaggcttttggttgcctgggtctgagctagtgccccctccctgctactctctgcccagccccagcccttggcctgggggtcgcacgtcaatgtccatgttggagatgagctgcgtagcgatgtcctggcacccctcctggcgggcggaggcaggcacgtcggcgtccgagtaccagttgcggttcaccgtgtgggcgtaggtgccggctggcgaggcgtgctgcactcgtgtggtggttaccactcccactgacttccctaagggtgtcagaggtcagtatatgtgaccaacgtctgtgacctggccgtgacccagcagcgggccccagctcacctgctttcttggcccgattcatcacggagatgacctcgttgccgcgtgtcgtgttgcactggttaaagcgggcggctgcactcaagccaatggtctggaagttgcccttgaccccgcacaggtaggccgtggctgtggctccactgtctggcacatgtttgtctacattgtatgtctggggacagagacactctgagctcttctctggggcagacacggagacccagaccctgatctctgtcctctgggattccaactgcctctaactccttactggagccccagctgtttagggtccctccctcctaccacactccatagccaggattccccttctgtgcttggaggactctaaggtagcccagcacttaccttggacagagccacatatgggaagcggtccatggccaggggtatctcaggccccagtttgtccttcttctgcccttttaggatcctggcagctgtcaccgtagacacccccatccctgaaggaacagaaatgtgtgaggcttgggccccagggctctcctggaaccactgagggtccgggcgccggggctgtgagggctgcagggctggaaggcctggctcactcaccatcgcccaggaagatgatgaggttcttggcggctgtctgtgcaggctgcagcttcttggcggcacccagggcctcggctgcctcgcggttccagaagtccgggttctcctcctcaactggccagggggagagcaaaaatcaggtcagcctgggctggggggtgccctgtgtgtgtgttgtgtaggggcagctcggggagcctcattacctgggatgatgcccagggagagctgtagcctcaggcccagcagcagcagcagcagcagcatgcagggccccagcatgtctggagggcagcaggacagtggcgaggcaggaattctgggcatggagtatgagctgcactccaggctgcccgggtttaaatcagggagaactgtgtcccggcttctcccctcgttgccaccttgaccctgcccagcctcttgacctgaagccacactggctgaagggagtggcagggtgtggctgggctgggccgggctggggctggggtcctgagaaaggcagctcaggttgggaccaggtgtcccccagggaagggtgcggtattgagtacagatgccatttgggtgagtgtggtgtgcctcccgcagccaggagcccctcccccaacccctgctcactgtgtcttgtgtggaacaagacaccctgtcactggatcattcacccatttttttctatatttcccagaagctggggccaggctgtgttctggtgtcgagaggaggggaggctggaagcacacagtctgggccagggcctgggttcagcctcctgatgccaggagcctgggccctgtgggaaaggggcacgtggggggctttgctgccctggcacccccttgctccatcatcttaccttggcctggacaggtggggctggcaggaatctgggcccagagctctagggctgtgggcagctgtggggccaatggtgacagcactgagtggggccggaccagtcctgcccattgctcacatgttgtgtgtgattgtgtatgtgtttgtgtgggtgcactcacactaatgtttggacgacgcaggtggggagtccaccccagcccaaccacagcagccccttctccactcatgcttgctcgccccgagccccaggcttggcccccaaaacccaggggacctcacctgctgctcagcctctgccttccccgcaccactccccaccacccccacgggcctcccctcaggccgagctttctggagtcctcctgcctgccccccgcctggcttcctgctggtcgtcctggggctctcagggaagatgtcaccctcatggggacattccttcctcctgcttattgcccccttagttccttctacctcctgcttcatcttgctgagttaggaaatttctgggctaaatttcagaggagactcactaacaggcaggcccttaattaattcattgattcactctaaagtcaaggccagtcaggagcttttgccgccaccccacaattatttttcgagctggaatcttttggttttggagacagggtcccattctgtcagccaggttggagtgtgatgcctgagttacggctccctgcagcttcggacctcccaggctcaagcaatcttcccacctcagcctctcacgtagctggcaccaatggcatgtgccaccacacctgactcattttttattttgtgtaaagacatggttttgctatgttgcccaggctggtctcgaacctccacctcagcctcccaaagtgtctggatttacagacatgagccactgcgctcaccttcctcttttttttttttttttttttttgaggcagggtctcatttgtcaccaggctggactgcggtggcatgatcatggctcactgcctcagccttagcctcagcctccccagtagctgggcttattggcaccagccaccatgcctggctaattttttttgttttgttttgtagagtctcactgtgttgcccaggctgctctcaaactcctggcttcaagtgatcctcctgcctcagcctctcagaccactgggatcacaagtgtgagccactgggcccagctgggtcttgtcgtttggcaacaacattcgttcccagcccctgccatgctgtcccctgagtggcaagggctgttgccatatttcccagtgaaatgccctggtaagatctggagggcaggaggcaggcagaagccattcatccgtggttggcagtagctggtgagggggcgaattcagccctgcccggccactttgggaggccaagacaggtggatcacctgaggtcgggagttcaagaccagccttaccaacatggataatccccatctctactaaaaaatacaaaattagccaggcatggtggcgcatgcctgtaaggtgggcactgagctggaacatggtctggactgcacagagcttggtatccccaagggcatcaggtggtagagggtgcta

SEQ ID NO: 2549 - DNA, 4001 bp, Homo sapiens
gcaccctccacgaagaggaagaagccgcgggggttcctgctcagcaggagcagggcagcctctgtcatctccatcagggaggggtccagtgtggagtctcggtggatctcgtatttcatgtctccaggctcaaagagacctgtgggacaaggggtcctgtggtgactggcaggctgggggtgggagggtgctggcggatgtgcacacaggctcagaaggtgccatctgaggccatctgagggatgccagggcaggaagggggtcattacccatgagatgggtcacagacgggtccagggaagcctgcaggagctcagtgcggttccacacgtaccgggcaccctgcggggagggagagagccaggcctcagcccacagccccgagccccacacctctgccctccccctgctgtgcccagcacacccaccagcccccatcacctggtgcttcgccagccattcctgcaccagattcttcccgtccagcctggtcccaccttggctgtagtcatctgggtactcagggtctggggtccccatgggaaacatgtactttcggcctccacctaggatcacctgggaacagaggatggggcaggtggatttgggggcctggctggccccgtgtcccctcctcatgcacagcccctgactcccctccccaaggctgtgggaatggcccagcctgggctgcgccttctacgcccccaaccccacctccagaccctgctggcccagataaggcttttggttgcctgggtctgagctggtgccccctccctgctactctctgcccagccccagcccttggcccgggggtcgcacatcaatgtccatgttggagatgagctgcgtggcgatgtcctggcacccctcctggcgggccgaggcaggcacgtcggcatccgagtaccagttgcggttcaccgtgtgggcgtaggcgccggctggcgaggcatgctgcacccgtgtggtggttaccactcccactgactttcctgagggtgatagaggtcaggatatgcgatagaggtctgtcacctggccctgaccccacagcgggccccagctcacctgctttcttggcccgattcatcacggagatgacctcgttgccgcgtgtcgtgttgcactggttaaagcgggcggctgcactcaagccaatggtctggaagttgcccttgaccccgcacaggtaggccgtggctgtggctccactgtctggcacatgcttgtctacactgtatgtctggggacagagacactctgagctcttctctggggcagacaaacaagaccctgatctctgtcctctgggattccaactgcctccagctccttattggagccccagctgtttagggtccctccctcctaccacactccatagccaggattccccttctctgcttggaggactctaaggtagcccagcacttaccttggacagagccacgtacgggaagcggtccatggccaggaaggtctcaggccccagtttgtccttcttctgcccttttaggatcctggcagctgtcaccgtagacacccccatccctgaaggagcagaagtgtgtgaggcttgctccccagggctgtcctggaaccactgagggtccgggcgccggggctgtgagggctgcggggctggaaggcctggctcactcaccgtcacccaggaagatgatgaggttcttggcggctgtctgtgcaggctgcagcttcttggcggcacccagggcctcggctgcctggcggttccagaagtccgggttctcctcctcaactggccagggggagagcaaagatcaggtcagcctgggctggggggtgccctgtgtgtgtgtgtgtgtgtaggggcagctgggggagcctcattacctgggatgatgcccagggagagctgtagcctcaggcccagcaggagcagcacccagggcccctgcatgtctggaagcagtcggagagcggcgaggcggaaatcccaggtatggagtatgagctgcactccaggctgcctgggtttaaatcagggaaaactgtgtcctggcccctccccttgttaccaccttgaccccgcccagcctcttgacctgaagccacactggctgaagggagtggcagggtgtggctgggctgggctggggctggggtcctgagaaaggcagcttagggtgggaccaggtgtcccccagggaagggtgggattttgggtatagtgcagtgtgcatcctgccgccaggggcccctcccccaacccctgctcactgtgtcttgtgtggaactagacaccctgtcactcgttcatccaccattttttttttctgtatttcctgggagctgggggccaggctctgttctggtgtcgagaggaggggaggctggaagcacacagcccgggccagatactgggttcagctttctgatgccaggagcctgggcccggtgggaaaggggcacatggggggctttgccgctctggcacccccttgctccaacatctggccttggcctggacaggtggggctggcaggaatctaggcccagagctccagggctgtgggcatctgtggggccaatggtgacaacactgagtggggccgggccagtcctgcccattgcttacatgttgtgtttgattgtgtatgtgtttgtgtgggtgcactcgcactaatgtttggacgacgcagtgggggagagtccagtgccctcggccagacaggcctgggctgggtcttccagagcagcttgtgcacttgattgtgacacctgttcccttgcacaggcagagggtgcctgggcggactctgttttcggtgggccctgagcatgcccagaactgtagcctttcacatggggatcagatgttttgatagcctcaggctgagttaaaaagtatttctgcagttcagataccttgccatcatttttttctttctgttttattattattatttatttatttttttgagacaggggctggctctgtcacccaagttggagtgcagtggtgcattcacgccacacctcctaggctcaagcgatcctcccacatcagcctcccgtgtatcttccattatgtgaagctaattttcaaaaatttgtgtagagtcaggatctctttctgttacccgtgctggtcttgcactcctgggctcaggcgatccttcaacactgctagggttccagacttgagccaccaatctgggcccacattcaggagaaatggatttggagaggaaccagagtgctcaagggtgtgtgacatgtgccacaatcgtgggcaaaacagacctctgcccttgtggagggcacaatctagtggaagaggaatgtttttagagatgtacaaagtgctggccatcaaattgtggggagttgctggaataggacaaggggcctaggaaggcctttcctagaaaatgtggtttgaaggccgggcacagtggttcacgcctgtaatcccagcactttgggaggccgaggcgggtggatcacaaggtcaggagatcgagaccatcctggctaacacggtgaaaccctgtctctactaaaaatacaaaaaattagccgggcgtggtggcaggcacctgtggtcccagctactcgggaggctgaggcaggagaatggtgtgaacccggaggtggagcttgcagtgagccaagatcgcgccactgcactccagcttggccgacagagcaagactctgtctcaaaaaaaaaaaaaaaaaaaatagaggaagtgtggtttgagctgagaattagggataactgggagttaggctgataaaggaagggaagtggtgattggaggagaaatcctctgtccttgtctgagattaccctgtgttagggcagtggctgacccttttctgggatcacccaaaatgggatagtgggtgggtgagacatgtggactgtcaaaactagtagattctgaatcctgtctctgccatgtcctgctgtgtggccttgggcaatttacttgtctctctgttgct

SEQ ID NO: 2550 - DNA, 4001 bp, Homo sapiens
aactgaaatttggagagaagggattcctgtttatattgagtacatttaaaaagtaaatggcctgcataatgccactcaagttttgtttttttcccaaaattatcggtttggtatttcatttttctggatcattacagtttcaaattttaacactgttaaacaactttgacgttttcttgctataattatgaattttaaatctgctaatactggtcatagtttagaaactaataaattcaaaccatgtatagattctgtcagtatctttttcacattaaaatgtccttatggaacaccaaaattactacagaacaacttgaaatcatattttatagctacttccttaaaatattcagttcccttccccatcacttaagaaaagagtcagtttggatcatgatgtagtgggaggaattaattataaaaacagctaatatgtattgaatatttaccataaaacaggcactgtaataaatacgatacatgaaccattacacgtaaaggtactgttatcaggaaaacatttttatccccaatttagagacaagagaactgaggcagagagattaaataacttgcccaaaatcaaagatgtaaatggatgtgactctgggtatgttcagatacaaagcctagaatcttaaccactatgcttatgttatcaaggttaaaacaccgtagtttactgcaaaaaatttttcactgctttaaattattcattaactcaaaggtcaaccggtcactccaaatcatatgataaatgggggggaaaatgtgggaccaataggtttgctgaagttttgtacctgctcagaataaacatatcacacaattttattccatatagccaaatataagggtaactgagtaaagatcttcacttgggtacagcagtcagttccttctccatcctaaaccagaaagaaagcactgttcttggatatgccacttcaacaagagtgttttttctcttccaccatcaaagccttaagcaatagaacgattctaccagtctactgttgcctgtctccaaagcagccctattatccgaggacgaacaccagcgtcaaggacctgtgttatttttctggcttcgcttctcaaaataacttatcttctcctcttgatgaattacttgataggctcaaagacttgcctaaactactaattcttattatcaaagctattttctttctccgcaaccgccttttcaagtagcccttggtccactcttcaacgcgatttgcaccctgtggcaaggccgccagggacactcagcagggttccaggccacggaccccagtttatcagctcagcgcctagtgtgggcattcaagaaattctcgtgaatgaatagctggaaggcagcgtgggtggaggcgggaagagggggcttgaaggaatttcacgcagctgagaccactgcagcggcgcccagtctggggagggagagaccggggcaagtgggagaacctggggccaaggcaggggccgcctcgggcgctgctggaccggcaggagcagtcgatcgcacccagagctgggaaaatgcgggcgccgtctccgcaggccccccgcagggcgctctccggcctcgaccacagcctccgcctagctccctgtccccggccttccgcatacaaggggtcccagccgataagccctccttagccaatagccaacccgggacccacactcgctcacctgaagctccaccggcagcaccgcgctccgcatccggcgcgagcttggcaacccagtgggtccgcgggatcagctgattcatggagggcggggcctccggacagggcggggctgcagggcgactagcgaaggtaaacgagggcgcgggcggctcttggaatccgagctcctgggaattgttcttgggagactgtcgacggcgtctgttgggggtcaaaattgctgagaatgcgttaggcactgcaggctacgtacttgggagcacagtctctcccttagtttagggcggagctatcagtcctgagatgcgctttgatgatgacgtagaatagagtcgtccaagcctagctacccgagcgctcccatggtaacaggcggtggtgaaagtggttgggagcagcagtcgtttgttaccacctcaaactgcaagggccggaagtataaaagtaaaaaggctgaaatattttcaaattgcctttatggacagtaccctaacagtggtcgcttctcccccctactcccgcgaatgacgtcatcgcctcgcggccccgtttcgccattgtatcctcaatgtgtaaacttactggttagttgcaaccccaaaagatggggtgggataggagaaaatgaagtggcctctccagtgattcccgtagtactccccaatatacaatcagtaaaatcagctttcttgtcccgcgcacagtttcataacactgtttttcgcagccacagtcccaccccacccagcctgcactctcaagtcctcccatgattttatgattttccagagctgccactcatgtcgcacagtgggtgcaaaccttctgctgctaggcattgtgccatcgctggacctgcaaacatgcaaatatttagaccatcaacgacagatgtgtagtcgggttctgaaactcctatatcctattcaccaacaccctcaactcaatttcctccctgatccttcgcccacctgcaaaactgttagtctgcaacagttcaaccaaccttgctcactcctgcatcggtgcagaaaatcacacaaccctgagaattggcaccactgcgaacgaaaagtgtccaacttcagtcgggacttccacgtgcgactacgcaatattgctgagcctaagacagtcacatttacacattgctactcagattatctcctattcccctcccctgctgttcccagccctcacgctcttctaacctcttactgaactctactcactcacccgctttggtaaaaataaaaataaaaaattttgtctcttacatctctgaggaaagtgagaccactagaggtgaatttccttaaatcccaaatcccatcagccactaccacaaaacctacctgcaaccagttttgatttgttttgttttgtttagagggagtctcgatctgtcgcccaggctggagtgcagtggcgcgatctcggctcactgcaacctccgcctcccaggttcaagcgattctcctgcctcagcctcccaaatagctgggattacaggtgcccgccactacgcccggctaatttttgtgtttgtagtagagatgggatttcaccatgttggccagcctggtctcgaactcctgacctcaattgatccacgtgcctcagcctcccaaggtgctaggattacaggcgcgagccaccgagccccggctccttttcaccgagtccttttcttctccctctttcttcttagaagatcctgaactcaggatccctaatctccccaaaggaaagactttgttctgttgatgaaaaaagacaaactttataaaatatttgaagaggttaaatatactctgatcgaaacatgagtaaccatggcctgggacacagcctcaagaagtcctgagaacatgtgcccagggtggttgggttatagcttggttttatacattttagagagacagaagttataggcaaagacatagatcaatacatggggggccggtggtgctcacagattataggtggattcagagactttatgatgggttgaaaaagctaagcttttcctaaagagttgaagttagcagaaagaaatatttgagttaaaatgaagggggttatagaagccaaggttcttgttacgtagatgaagcttccaggtagcatatgttataggaccttaaaatgtgtcagactcttggttaaatctctcctggatcaagaaaagacctgaaaaaggaaagtgattctgtataaaatgcaaattccccccacaagagacagctttgcagggtcatttcaaaatatgtcaaagaaatatattttggggta

SEQ ID NO: 2551 - DNA, 4001 bp, Homo sapiens
ttcttcacagaattggaaaaaatactttaaagttcatatggaaccaaaaaagagcccacattgccaagacaatcctaagccaaaagaacaaagctggaggcatcatgctttctgacttcgaactatactacaaggctacagtaaccaaaacatcatggtactggtaccaaaacagagatatagaccaatggaacagaatagagcccccggaaataataccacacatctacaaccatccgatctttgacaaacctgacataaacaagaaatggggaaaggattctctatttaataaatggtgttgggaaaactggctcgccatacgtagaaagctgaaactggatcccttccttacgccttatacaaaaattaattcaagatggattaaagacttaaatgttagacctaaaaccataaaaaccctagaagaaaacctagccaataccattcaggatataggcatggccaaggacttcatgactaaaacaccaaaagcaatggcaaccaaagccaaaatcgacaaatgggatctagttaaactaaagagcttctgcacagcaaaagaaactagcatcagagtgaacaggcagcctacagaatgggagaaaatttttgcaatctatccatctgacaaagggctaatatccagaatctacaaagaactgaaacaaatttacaagaaaaaaacaaacaaccccatcaaaaagtgggcaaagtatatgaacagacacttctcaaaagaagacatttatgcagccaacagacacatgaaaaaatgctcatcatcactggccatcagagaaatgcaaatcaaaaccacaatgagataccatctcacaccagttagaatggcaatcattaaaaagtcaggaaacaacaggtgctggagaggatgtggagaaataggaacgcttttacactgttggtgggagtgtaaactagttcaaccattgtggaagacagtgtggcgattcctcaagggtctagaactagaaataccatttgacccagccatcccattactgggcatatacccaaaggattataaatcatgctgctataaagtcacgtgcacacatatgtttattatggcactattcacaatggcaaagactaggaaccaacccaaatgtccatcaatgacagactggattaagaaaatgtggcacatatacaccatggaatactatgcagccatataaaaaggatgagttcatgtcctttgtggggtcatggatgaagctggaaaccatcattctcagcaaactatcgcaaggacagaaaaccaaacactgcatgttctcactcataggtgggaattgaacaatgagaatacttggacacggggggggaacatcacacaccacggcctgtcgtgggttggggggagggaggagggatagcattaggagatatacctaatgtaaatgacgagttaatgggtgcagcacaccaacatggcacatgtatacctatgtaacaaacctgcacgttgtgcacatgtaccctagaacttaaagtataataaaaaataaaaaataaaaataaaaaaaaggaattgctataaacgaaaaaaaaaaggattaaagggttcaatgtgtgccaattgaagggagatgcaattggcacacattgaaccctttaatcctttcaccaccctccaggtgccctgctggccccggtcctccaggtgccggccaggcccccgctcactcacgttcagcagccggtgcccggtgccctcctggttcttgttcttaggcagggccgtcgtgccctggttcagggcgtaagggaccgaagaagcctccgaccctttaatgtgcatgatatccgggctgctgtagggattcctctgcaatagcggggtggcggacaggacttggacctgcccgctgcggttatcaagtgtgctgaaaggcctatttgtctcttggggtggctccatctctccatcttctgcggcctgtctgcgcccaaccgacggcccgctactgcgcaggcgcggccctcccgcagcctttctcacattttcccagcgcgtgcgtgccgcctagtgacccactcaggccgggcccatgctgggagtggctggaggcagctttggaagcatgcgtgcttagcgagcctggagggtctgctgcaagcacttgccaggccatttcagtctcctttagaaggaaatcagagcacgctggtggagagcaaggcccctcatggggcccaaccactttagttcactgtcttgtccgccctgtagccctcacgagtccttttctccctgcaccatttctttctagaagatttacagtgtcagtcattacttcctctacactgtcccgtgagctccagacgttaaatatccaacagtctactttgacatctttacccaattgttccacagacacataacacgttaatattcatcttccctcttaaacctctagtaggttccaaactcatttggtgcagcaatgtcatatccacaaaatcttaaacattcagacacattttaaaattctgaccctaaatatctgaatcttacttaccttttccctttatggcacctaatttgggacaacacacacacgagacaattgcaatgatttactcatgggtctgccaacctgctgtcatccatccctttcactgcccccgtattagtcctttgcagtaacgaatggagctgaaggccattatcctaagcagactaacacaggaacagaaaaccaaataccacgttctcacttataaatgcgagctaaacaatgagaacacatggacacaaagaggggagcaacagacactggggcctacttgacggcgaagggtgggaggcgggagaggatcaaaaactaccttttgggcactaggcttattacctgggtgatgaaataatctgtacacccccatgacacaaaatttacctatataacaaacctgcacatgtacccttgaacctaaaagttaaaaatataaataaatgcaaacagaacaaaaccagagaattccagaacttctttattgtacataaaaatctgaatttcttaatatggaaaccaaaggtctgcaaaatgtactctcctagctcaggatcattatttattcctcttatttttggaatctattcttcttttattcaaggaccaactcaaaggtcagcttttagttaactcttatatccccatacacatatcctaaaggcagagttaactgctatatccaagctacttcttggcatatccttgtcagcctaaataacagagagggagactctctgaaagaaaatgatgtttattcaggagtaggcattgcaataagaatacaagtgccacagtaaactatgtgcatatacagggaggtcaaggaagacaacggtttttaaagcaaaaatgattgttttgagagaattatccttggctacaaggatcaataacaaggatgttgccagttggacattggacagggagttgctgggcaaatgtcctcatagaagtattttttgtgtgtgtcaggttgtgatggcctttgtgcaaggtgtggttttgtgcagtcttttaatgatagtcctcattatcagacatctgtgcatgaaaatcgtcctttcacggccttccccagctctatttgttaggatttttaacacaatgaccagaacttgattttgacaactttcacatcctattagtgggctcacactgttagttgctaatctcaaaagatagagttctttaggggcaggaacctgcacctcaccttgtgctcctcagagtacatggcccaatatcccaaggcccttaacacatttgtcattatttcagatttatactatgtggtgtgttaattactgcaccccatgaaacttgctgtccagcagctcactctgttcttagggttcatgttatgcaacataaagtacacagcatcacagatgaagtcatatttttttaaaaaatctaatcaaaccaccagacctaacctccagtctataggaaattcag

SEQ ID NO: 2552 - DNA, 4001 bp, Homo sapiens
cattcaaaagccagaaagcagaggtaaattgtatgggtgatacaatcactcagtggagttttacatagattttcaatgatctttgatgaatgtgtagttgtttccttttcctctttcccatgataaacaatgtcttggtatatattcttttgctcttaagaaaaaaaaaaaagaaggcctcacaggtgtggtggcacatgtctgtaatcccaacactttgagagactgaggtgggagagtcgcttgaggctaggagtttgagaccagcctgggaaacatatcgagactctgtatctacaaaaaattttaaaaatagcctagtatggtggagtgtgcctgtagtcccagccacttggcaggtggtgcgggaggatcacttgaggccaggagtttgaagttgcagtgagctaggaccacaccactgcatttcagcctgggtgacagcacaagaccctgtctctaaaaaataaataaataaataaaataaaaataaaggcctttttctttgaacacccatgggagtgatactcaaaatatttaacaaccagtaagacaaggctattgaataatcaaccagggttggaacagggtcctgggagatctcactcccacctccatgccaggcattaaccccttagttgctgaatcatgaggtggtctgggggtgccaggggaggagttgggacaaccaaggtggcaaggaggacatgcaaggggcttggacaatggtcatctaccaatcaatatgacagtattttatttattattattattgttttgagacggagttttgctcttgttgcctaggctggagtgcaatggtgtggtcttggctcactgcaacctctacctccgaggttcaagcgattctcctgcctcagcttccccagtagctggaattacaggcacccgccaccatgcctggctaatttttgtatttttataacgatggggtttcaccatattggccaggctggtctcaaactcctgacttcaggtgatccacccatctcagcctcccaaagtgctgggattacaggtgtgagctaccgtgccctgcctatatggcagtattttaatatttcagtagctaaaatcagcccttgacttctcatagcttcttaagtgggaactacttctaacagatttttggggcatccttccagaaatgttgtgagtgcatataaccttaaatgttttgcatatagaacttaacctgtagagaagcataatagattttttaaattatttgcataagtgagagcatactttgcacacaatgttgcatcttgttctttttgtgtaacaggatatctagttgatatttccatgtcatcacagatagatctgcatttacagtggcttgacatcatatagctctaattatagaggggtgtgtgagtgtgtgtaaggattttttctcccccttttttccctttcctgcacttctacctgatgattttacctgaggcttgccctaacaatagtcaccagtgagccggcagaggcttcagagaagttactggttagtattaataatcagtagaaaaaataatataaaacatcttttccaaagagcttaccttggactgcccaaagatctgttattctcatgtggcccaagtcaaacatcttaaagaaaccaccatgttagagagaaatggttccccatcaacacagaatcagagtttactttagatcaaaagccactttagtggccattccaagtggttgaaatgccgaaggagaaaattcacagtatatgtactgcgggaagacagacttctagtgaatccaatcaaaggcttttacaaaggctggcctggcacaaacatgaatttcccttctaaagacaaaacagttgaagtttctcagtattgcaatgaaattaaactagaggagaaggtcaccccaccattcagattcctgtgacttgggcctgagttgtgaggtttgcccttgggagatggcaggccaaagtttgtttattttgttgctatggacacagaacagtagctcctcattggctcagggctcttttcttcaagagagaaggttgggagaaacagccaattaaattctccaagacacaaatcagtgaccaccctcaacagcaaagaattcatacttttaacactggatttccactttcgtcatcagtcatgggacaaaaaagtttaagatatatcttcagaggaaatagaattcaacagcacttttaggcttcattggtctatggcaatagttaccaggcaggatctgtgatggatttttaattcctctgtgatctactcacagaaacctaaaactctagacacttttttccctcgagtttaaggctttgaaatctgtgaaagtaaaaatcccccaaggcaggaatcttttgcagtcacaaggttttccgatttttttttttaaataaagctgctttttcttactatagaaaaaagtacttgcttattacaacccagtggctttcattttagttttactgccactcattataagaaatacattttacaaattttgtaataaaaaaatttcatgaaataatactcttattatttgctattctcttctatttctttttcttctttaaattaaagctgattataatccactagattgatttcatgatcctggtgggtcacaacccctagcttacaaaatattgttataaattcatctattcactcaacttcacatttgttgtctactgtgtgccaggcactattgctaggtgtggggatatacctcagttcttatactcaatacaacttagagaccaatgagaaaacagacaataaaaaagctcaataaaagcataattaatttttttttcctttgagacagtagctcactctgttacccaggctgcggtgcagtggcagtggcagtgcaggctgcatgcatagctcactgcagccttgacctcctggactcaagcgatccttctgcctcagactcccaagtagatgggactacacaggtgcacagcaccatgcccagctaatttttttttttttttttttttttgagacggagtctcgctctgtcacccaggctggagtgcagtggcgggatctcggctcactgcaagctccgcctcccgggttcacgccattctcctgcctcagcctcccaagtagctgggactacaggcgcccgccactacgcccggctaatttttttgtatttttagtagagacggggtttcaccgttttagccgggatggtctcgatctcctgacctcgtgatccgcccgcctcggcctcccaaagtgctgggattacaggcgtgagccactgcgcccggccgcccagctaatttttttgacttttagtatacatgaggccttgctatgttgtccaggctggtcttgtactcctgaattcaagtgatcctcctgcttcggcctcccaaagtgctgggattacaggtgtaagtcaccatgcagccacaatgactcatattgagacttgccagaagcagtgggagttcatagcaggagttactcttctagtccagtgagtcaggcagcagtgttaaacagagaagagatctgactagatctacatatcagaaagatcattctgactgcaatatagggaagcaattggaagggccaggaaaaccaggtaaaagtctgtggcagtggtcgtcatgggacctgacgatggccctgactgaggagcagcagtggggatggagagaagacatgatagaacttggtgattgactggatgctgggatgagcgaaaaggagaaggtgatgattcctggctttccagctcgagcaattgagttgaccgtggtgccatttattgagataggaaagtgtggagggataaacaggttctagggagcagattattagttcagttttggatatgttgaggtgcagggagactaatagacaagtggtgacgtctgttagagtttcttacatattttagaagttcagaggaagattctggcctagaagcagatttaggagtct

SEQ ID NO: 2553 - DNA, 4001 bp, Homo sapiens
ttccaggcagagagaacacccttcagaaaggccccgaggagcaagagaagtagaatatttaaggatctgaaagcagctcaagtgaccagagcagcaagccagagggatgaggcctggagatgggctgtacacaccacacccggcctgaggtctcagcgagggccgtgcttttatctgcaagccacagggagccaaccttccagggcaagtgacgggccaattctcactttcaaagatgcaggtgaaaatggacagcggagacacagaggcgagttaggagcccaagcagggtttaggggagagaaggtggtggcagagactcctctgtctgtgcacctcccatcacagtgttttacacggcacacacagacatggatttattgcaaattgggcaaatgaagttattctactggttgcttttctacatgaccaactcaggcttagctgcccagctttttctttttcctttgagaaggtaattccgtggctttttttttcctttcttaacctgaaagtgtcccggtgtttgatttcatggagcaaaataaaaaccctggaggaatacacatgccacagaaacgccttgagacaaaaaaacgtttggctaatagttttggtattttctatgccttccccggtatgcaggaaagtcacagcagtgtgatacaaaggagtgtatggtgataaaaaagcgcaggcccagggacctctggaaactgggctggcggtagagctatggggcaatagcgttctcagtagtaggctgccttgtcatgggagggctggagtgagggccactgtgcggagggaaagcgaccgtgctctggggtgggggtgggaatggggaataaaacagaaatagaatctgcggtgagagcaccaccaagccacccaacccccacactggggagacaaagggccctctggggagggaaggtcctggcccacctccttggagggcgcctctgggcggtcctggcctgcccaggggcaaggagatgggcctcacagcgatattggctctccctcagctcctgcatccgccggcggagggtttctccgcttccctagcccagacctaaaagggtcaccgctcccaggcccctgactgcgccgggaaccgctgggtggagggtgtcgaccctgcttcctgccctcagcccgtccatcgcgccagagaatgcaccaaattccccaatccttgccctccccgggggtccacatccgcggggcaggaccaacgcagcctctcggggccttggcgacttaccgctgggggcccgcagtgcagcagggcgcggccgcgacaggctcgggcaccgcgtcggagcgcgagccgcgctcagcaccacggtcagctcccggcgccgcgcgccgcggccgggagggggaggcccggcgcccgcacccacccaccgcggctccaggggccccgcggggtcgggcaggcgagggttaagccgccagaggccagcgggaggggcgggccggcgctggcgcgcaggggtggcgagggggcgcgccggccgcggtgggggctgctccgccaggctgccgcctccctgcgccgccgctcgggccgcgctcgagccggctttgtctgttcgtatcgccccgtctctgtttctgggtgtctctgcctcccacccggttgcggctgcgcctccctcaggtgcagtcgtctcccctcgcccccgtgcgcacggcgcccccgccgctgtcccctcttccgggagcgcacaggtgtgggagcccctccccctcagcccagagagccagcccagccctgccgaccgcagcactctcggaagggctcggccacccggagcctcgtcacgagtcttacccagggttcggagcgggcctgcaagaaggggcaggccaggctggggctgcaaggcagggtcttcccttggagaagggacctgactctattattaagagaacgaaagaggcacttgccctacaggtactcactgtgtggggtctactggtgctgtgctctgccgcagtcttgagggaggagcagaaatgctgtggggactctgtctccgcagaactgaggacgaggggtctgcacgcgtggttcagtgcctggggctggggtggattaagtaactccaggaaggctcaggcagcagtgccagtagtgtggggcggggttgtggggaggaggggggagcgggagcgcacagtcggtgctggggagaggctgatgccaacaggaggctctcggccgtggtgtgcccaggcggggcaggacgggaggatgcaggagtcccgggtccacgctgaggctaaggctgaagggaaggcagagctcaggtggatgacggaggccaggcctttccctgagcttggtgggctccctcccggtcaccttgtctgagaacccaggacacagagtccccttgctttggactggtttggtttgtcattccccttgacatcgcctcgccccagagacaagaggccccttcatcctccagccaagaccttccccacccttgggtgacctaccctcttgcattttttagatttgagccctctttctatgcagcgactaactcaacgtgaccccagaggccccctcgcccatgttgctggtagtcttgaccttttttggcagatcctggctgtgggagttccctgtctttctcttaggtaggacagaaggcagtttctgcctcgttgccacatacaccccaagtcaggggtaggactcccgcagaccccacagtcctcctcttgttaaaattagtaagcattagccttccttattaggctctccccgcttttgcatttaaggattttttaatgtgtcttataaaatcatgtaattgtgaggataattacagattcagcttcttccagtgagtgacaattgctcattttcgatgctcacatggtcatcgttcggccactgcaaactgttccaacccttctactttgtcatttcagacagttttcaaacacccctaacttttgggtaacatgaaaatatatatttcaaattttttatttccccaagatgtgggatcaggtcttccccagggactcctggaaaaatcttttacactaggctacccagttcagataccactgaatgatttttcttaaatattattctaatgtgaacttacattttatttttacaatacactgacttacacgcctgtaatcccagcactttgggaggtccagacgggcggatcacaaggtcaggagatcaagaccatcctggctaacatggcaaaaccccctctctactaaaagtacaaaaaaaattagccaggcatggtggtgggcgcctgtagtcccagctactcaggaggctgaggcaggagaatggcgtgaacccaggaggtggagcttgcagtgagccgagattgtgccactgcactccagcctgggtgacagagcgagactctgtctcaaaaaaaaaaaaaaaacaaacaaaaaaacacacacaaaacactgacttagatttctcatctgtgtttttgagcagtggctgtaaaccttttctttcctggaactagctttctggtcacttggttgtccccagggtctcagaccttctggccacaccaccccttgctttcttggcaggccaaagagttgactgtgggcacaaatgagtcggccatccactgtgccagtcacgtcagctgcatttgtggggtaccatcagacctactgctttgagctgtttctttttcttttaaaattttcaatatttaaaaacttttttatttcatatttccaaacagtgaacagttggtttctttttcttaaaaaaatttttatcttattttttgagatggagtttcactcttcttgcccaggctggagttcaatggtgtgatcttggctcactgcaacctccacctcccgggttcaagtgattctcctgcctcagcctcctgagtagctgggattacaggcatgcagcaccacgcctggctaattttgtatttttagtaaagacagggtttctc

SEQ ID NO: 2554 - DNA, 4001 bp, Homo sapiens
cctgggttcaagcgattcccctgcttcagcctcctgaatagctgggactacaggcacgcaccaccacgcccagttaattttttttttcttaattttagtagagatggggtttcatcatgttggccaggatggtgggttttttgttttgttttgtttttttgatggaatctcgctctgtcgcccaggctggagtgcagtggcgtgatcttggctcactgcaagctccacctcgcgggttcacaccattctcctgcctcagcctcctgagtagctgggactacaggcacccgccaccatgcccggctaattttttttgtacttttagtagagacggggtttcaccgtgttagccaggatggtcttgatctcttgaccttgtgatcctcccacctaggcctcccaaagtaccaggattacaggcgtaagccaccgctcccggcctatgtgcatcattttttaagacagcattgacaccaggaccctgggctgagtctttcatctctaagacgaacttgcaagttccatgggaacagggaccacacaatgtatttacttaattaattctgttacagggatgtgatatttaaaccaaacttaaaagacagaagaggacagccaggcaaaagacattggacacatattccaggcagagagaacacccttcagaaaggccccgaggagcaagagaagtagaatatttaaggatctgaaagcagctcaagtgaccagagcagcaagccagagggatgaggcctggagatgggctgtacacaccacacccggcctgaggtctcagcgagggccgtgcttttatctgcaagccacagggagccaaccttccagggcaagtgacgggccaattctcactttcaaagatgcaggtgaaaatggacagcggagacacagaggcgagttaggagcccaagcagggtttaggggagagaaggtggtggcagagactcctctgtctgtgcacctcccatcacagtgttttacacggcacacacagacatggatttattgcaaattgggcaaatgaagttattctactggttgcttttctacatgaccaactcaggcttagctgcccagctttttctttttcctttgagaaggtaattccgtggctttttttttcctttcttaacctgaaagtgtcccggtgtttgatttcatggagcaaaataaaaaccctggaggaatacacatgccacagaaacgccttgagacaaaaaaacgtttggctaatagttttggtattttctatgccttccccggtatgcaggaaagtcacagcagtgtgatacaaaggagtgtatggtgataaaaaagcgcaggcccagggacctctggaaactgggctggcggtagagctatggggcaatagcgttctcagtagtaggctgccttgtcatgggagggctggagtgagggccactgtgcggagggaaagcgaccgtgctctggggtgggggtgggaatggggaataaaacagaaatagaatctgcggtgagagcaccaccaagccacccaacccccacactggggagacaaagggccctctggggagggaaggtcctggcccacctccttggagggcgcctctgggcggtcctggcctgcccaggggcaaggagatgggcctcacagcgatattggctctccctcagctcctgcatccgccggcggagggtttctccgcttccctagcccagacctaaaagggtcaccgctcccaggcccctgactgcgccgggaaccgctgggtggagggtgtcgaccctgcttcctgccctcagcccgtccatcgcgccagagaatgcaccaaattccccaatccttgccctccccgggggtccacatccgcggggcaggaccaacgcagcctctcggggccttggcgacttaccgctgggggcccgcagtgcagcagggcgcggccgcgacaggctcgggcaccgcgtcggagcgcgagccgcgctcagcaccacggtcagctcccggcgccgcgcgccgcggccgggagggggaggcccggcgcccgcacccacccaccgcggctccaggggccccgcggggtcgggcaggcgagggttaagccgccagaggccagcgggaggggcgggccggcgctggcgcgcaggggtggcgagggggcgcgccggccgcggtgggggctgctccgccaggctgccgcctccctgcgccgccgctcgggccgcgctcgagccggctttgtctgttcgtatcgccccgtctctgtttctgggtgtctctgcctcccacccggttgcggctgcgcctccctcaggtgcagtcgtctcccctcgcccccgtgcgcacggcgcccccgccgctgtcccctcttccgggagcgcacaggtgtgggagcccctccccctcagcccagagagccagcccagccctgccgaccgcagcactctcggaagggctcggccacccggagcctcgtcacgagtcttacccagggttcggagcgggcctgcaagaaggggcaggccaggctggggctgcaaggcagggtcttcccttggagaagggacctgactctattattaagagaacgaaagaggcacttgccctacaggtactcactgtgtggggtctactggtgctgtgctctgccgcagtcttgagggaggagcagaaatgctgtggggactctgtctccgcagaactgaggacgaggggtctgcacgcgtggttcagtgcctggggctggggtggattaagtaactccaggaaggctcaggcagcagtgccagtagtgtggggcggggttgtggggaggaggggggagcgggagcgcacagtcggtgctggggagaggctgatgccaacaggaggctctcggccgtggtgtgcccaggcggggcaggacgggaggatgcaggagtcccgggtccacgctgaggctaaggctgaagggaaggcagagctcaggtggatgacggaggccaggcctttccctgagcttggtgggctccctcccggtcaccttgtctgagaacccaggacacagagtccccttgctttggactggtttggtttgtcattccccttgacatcgcctcgccccagagacaagaggccccttcatcctccagccaagaccttccccacccttgggtgacctaccctcttgcattttttagatttgagccctctttctatgcagcgactaactcaacgtgaccccagaggccccctcgcccatgttgctggtagtcttgaccttttttggcagatcctggctgtgggagttccctgtctttctcttaggtaggacagaaggcagtttctgcctcgttgccacatacaccccaagtcaggggtaggactcccgcagaccccacagtcctcctcttgttaaaattagtaagcattagccttccttattaggctctccccgcttttgcatttaaggattttttaatgtgtcttataaaatcatgtaattgtgaggataattacagattcagcttcttccagtgagtgacaattgctcattttcgatgctcacatggtcatcgttcggccactgcaaactgttccaacccttctactttgtcatttcagacagttttcaaacacccctaacttttgggtaacatgaaaatatatatttcaaattttttatttccccaagatgtgggatcaggtcttccccagggactcctggaaaaatcttttacactaggctacccagttcagataccactgaatgatttttcttaaatattattctaatgtgaacttacattttatttttacaatacactgacttacacgcctgtaatcccagcactttgggaggtccagacgggcggatcacaaggtcaggagatcaagaccatcctggctaacatggcaaaaccccctctctactaaaagtacaaaaaaaattagccaggcatggtggtgggcgcctgtagtcccagctactcaggaggctgaggcaggagaatggcgtgaaccc

SEQ ID NO: 2555 - DNA, 4001 bp, Homo sapiens
aggtctcagcgagggccgtgcttttatctgcaagccacagggagccaaccttccagggcaagtgacgggccaattctcactttcaaagatgcaggtgaaaatggacagcggagacacagaggcgagttaggagcccaagcagggtttaggggagagaaggtggtggcagagactcctctgtctgtgcacctcccatcacagtgttttacacggcacacacagacatggatttattgcaaattgggcaaatgaagttattctactggttgcttttctacatgaccaactcaggcttagctgcccagctttttctttttcctttgagaaggtaattccgtggctttttttttcctttcttaacctgaaagtgtcccggtgtttgatttcatggagcaaaataaaaaccctggaggaatacacatgccacagaaacgccttgagacaaaaaaacgtttggctaatagttttggtattttctatgccttccccggtatgcaggaaagtcacagcagtgtgatacaaaggagtgtatggtgataaaaaagcgcaggcccagggacctctggaaactgggctggcggtagagctatggggcaatagcgttctcagtagtaggctgccttgtcatgggagggctggagtgagggccactgtgcggagggaaagcgaccgtgctctggggtgggggtgggaatggggaataaaacagaaatagaatctgcggtgagagcaccaccaagccacccaacccccacactggggagacaaagggccctctggggagggaaggtcctggcccacctccttggagggcgcctctgggcggtcctggcctgcccaggggcaaggagatgggcctcacagcgatattggctctccctcagctcctgcatccgccggcggagggtttctccgcttccctagcccagacctaaaagggtcaccgctcccaggcccctgactgcgccgggaaccgctgggtggagggtgtcgaccctgcttcctgccctcagcccgtccatcgcgccagagaatgcaccaaattccccaatccttgccctccccgggggtccacatccgcggggcaggaccaacgcagcctctcggggccttggcgacttaccgctgggggcccgcagtgcagcagggcgcggccgcgacaggctcgggcaccgcgtcggagcgcgagccgcgctcagcaccacggtcagctcccggcgccgcgcgccgcggccgggagggggaggcccggcgcccgcacccacccaccgcggctccaggggccccgcggggtcgggcaggcgagggttaagccgccagaggccagcgggaggggcgggccggcgctggcgcgcaggggtggcgagggggcgcgccggccgcggtgggggctgctccgccaggctgccgcctccctgcgccgccgctcgggccgcgctcgagccggctttgtctgttcgtatcgccccgtctctgtttctgggtgtctctgcctcccacccggttgcggctgcgcctccctcaggtgcagtcgtctcccctcgcccccgtgcgcacggcgcccccgccgctgtcccctcttccgggagcgcacaggtgtgggagcccctccccctcagcccagagagccagcccagccctgccgaccgcagcactctcggaagggctcggccacccggagcctcgtcacgagtcttacccagggttcggagcgggcctgcaagaaggggcaggccaggctggggctgcaaggcagggtcttcccttggagaagggacctgactctattattaagagaacgaaagaggcacttgccctacaggtactcactgtgtggggtctactggtgctgtgctctgccgcagtcttgagggaggagcagaaatgctgtggggactctgtctccgcagaactgaggacgaggggtctgcacgcgtggttcagtgcctggggctggggtggattaagtaactccaggaaggctcaggcagcagtgccagtagtgtggggcggggttgtggggaggaggggggagcgggagcgcacagtcggtgctggggagaggctgatgccaacaggaggctctcggccgtggtgtgcccaggcggggcaggacgggaggatgcaggagtcccgggtccacgctgaggctaaggctgaagggaaggcagagctcaggtggatgacggaggccaggcctttccctgagcttggtgggctccctcccggtcaccttgtctgagaacccaggacacagagtccccttgctttggactggtttggtttgtcattccccttgacatcgcctcgccccagagacaagaggccccttcatcctccagccaagaccttccccacccttgggtgacctaccctcttgcattttttagatttgagccctctttctatgcagcgactaactcaacgtgaccccagaggccccctcgcccatgttgctggtagtcttgaccttttttggcagatcctggctgtgggagttccctgtctttctcttaggtaggacagaaggcagtttctgcctcgttgccacatacaccccaagtcaggggtaggactcccgcagaccccacagtcctcctcttgttaaaattagtaagcattagccttccttattaggctctccccgcttttgcatttaaggattttttaatgtgtcttataaaatcatgtaattgtgaggataattacagattcagcttcttccagtgagtgacaattgctcattttcgatgctcacatggtcatcgttcggccactgcaaactgttccaacccttctactttgtcatttcagacagttttcaaacacccctaacttttgggtaacatgaaaatatatatttcaaattttttatttccccaagatgtgggatcaggtcttccccagggactcctggaaaaatcttttacactaggctacccagttcagataccactgaatgatttttcttaaatattattctaatgtgaacttacattttatttttacaatacactgacttacacgcctgtaatcccagcactttgggaggtccagacgggcggatcacaaggtcaggagatcaagaccatcctggctaacatggcaaaaccccctctctactaaaagtacaaaaaaaattagccaggcatggtggtgggcgcctgtagtcccagctactcaggaggctgaggcaggagaatggcgtgaacccaggaggtggagcttgcagtgagccgagattgtgccactgcactccagcctgggtgacagagcgagactctgtctcaaaaaaaaaaaaaaaacaaacaaaaaaacacacacaaaacactgacttagatttctcatctgtgtttttgagcagtggctgtaaaccttttctttcctggaactagctttctggtcacttggttgtccccagggtctcagaccttctggccacaccaccccttgctttcttggcaggccaaagagttgactgtgggcacaaatgagtcggccatccactgtgccagtcacgtcagctgcatttgtggggtaccatcagacctactgctttgagctgtttctttttcttttaaaattttcaatatttaaaaacttttttatttcatatttccaaacagtgaacagttggtttctttttcttaaaaaaatttttatcttattttttgagatggagtttcactcttcttgcccaggctggagttcaatggtgtgatcttggctcactgcaacctccacctcccgggttcaagtgattctcctgcctcagcctcctgagtagctgggattacaggcatgcagcaccacgcctggctaattttgtatttttagtaaagacagggtttctccatgttggtcaggctggcctcaaactcccaatctcaggtgatctgccctcctcgcctcccaaagtgctgggattacaggcgtgagccaccacgcccggccggtttctttttctttattgtggtaaaatatacataatatgaaattta

SEQ ID NO: 2556 - DNA, 4001 bp, Homo sapiens
acaaactagaaatataaaggaaagatcatgccacgccaccacctagctcactctaatgggagtatgaaaaacaaacttgcctttgcatatttaaattattttaaaagggaacaagcggaaaaacttcatcaacattaggaccccctcatggaagtagaaaaatacaaatgaaaacacacctacatcccaaaatcctagcacatgcctaaaatcaaaaactacaacgatgctctactctaaatatgcccaagataatactcactgaaagcagaaagtttgtattgccagaggaacagctacaacagaggaggggagctattttgtctctggaatgaattttcttccttccgattccattccttcttcctgtacctaagacggaaatgcaggtgcagtgaacaaacacccaggtagtgcagaggtaagatagatacggtttctgaaaaatcacaactcgacagagcaatttcgggggggtggggggcacagcaaatagctagagaacaggctctccttatttcaaaaccttgcaaactctaaatctgaggcagccgtgaagtcccatgccctgaatcatctcatccttagcgtcatcagcaagaagggaggacactgagaatcaaaggttttatttattgaactcgagcatgagacgcacattaaaacttccccaccacagatgcagagcaaaagttgctctcaggccagaagagaccatttaaaagctctccgccggtttcagaacacaaataaatttcccaatcctctgcaaagacagaactgaagaattactggacagcacgccagaggcagggacctgagggcaggccatcttgctatgccgggaggagacggtcactgttgctaagggtcatccatccttagtctcgaagaaatctcttcctgatctcttcaccaactctccccactactagagaattgagctactcccaaagatgtaagtaaacaggagactgtttacatctcctgtgggtgggagaggccccacccactctatcctaggagagggcagtgaaagaggataaggcccagagggataagggtgagggagcatggcaaggagaggagttcagatcaggacagggaatgtaggagggcaaggagtgaagggcacaacccacagcctgggaaagagaggcatgaaacccagcgtgtcaggtggacggatcatggaatggggggccagcggaggttaaggaaggagggcccaagagtaggggtgcgaaaaagagaagaggaggaggagaaagtgcgcgtgtgaagagtgttaagaaaacgacaggacagagcggggaggggaaaagcgggccgagggacagggtgaaaggtgagaaacgagggtatgaggaaagagggtccggggcgctggggagttggggagacgatggagcgacgggtagagcagcttgggccgagccgcgggggtggaatccagacgccgggcgggggagggggcggcggggcggcgggacggtgggtgggggccaccaggcggcgccggagaccaccaaactttacagcgagcgagcctgcttcctggagggagtgcagacaaggaccaggagcgggagccgagcctcgcggcccggggcacggcgccgcccgcccctccccggcagtgcctcccgaccccctgccctccgctgggacatggcctgaggccccgcccgccgcccgggactcctcccccccgctgcccccggaccctcgccccaggaccgcggggtctcttcccggccccgccgcccgccccggcgagaacaggcccggcgggcaaggcggcggcggaccgagggaggcctggcccggcagcggggagaagggtgcggcgcagcccgagtttcccaccttttctcctggcccagacgcggctggggcggacgggacctctcgcgctctgcctcctcctcttgcttcatggagccatgcgcctgggtgggggctcccgagagaagctggcctgcgggcgggccggacgcgctgcgcggacggggcggggcgaaggaggccggcgggcggaggaggaagcggcggggcggcggcggcggcggcggccgggaagaactagaggtattccccgggcggctggaggactgagtcgagccgggacccgagtcctccggtatcccagcagccaccggaggcagtgaggtaatggaggaagaatgtagggagtcctccagtggaccacactccttctagcgagccgcggaaaccatagagatcagggctcagccggagggccggcccactgctgtcacgtggcctccatccgtgcgctttattggctggtgctggctttacggggttgaattttggacgctgcctgccattcgtgggaccgagtttcaggcagctggaataaagagagacatcgggggaaagccgcgagaaggccagcgtccctggctgggagcagagctagccgagtagggcgcccggctgtcaaaactggccggcgcagtgcacgctgggccgccccggagcggtcgcagagcccgtcgggagtcgtagtccgggacgggcccgcagcattgtccgcgacgcagctcgggatccgcgtcgggttgtcggccgggttgctgccaggcaccgtcgagcgttagccacccagcattgagctgccagcggctgttctccctaagcaccctcgctcacgtcgcctcgcctcgcctcgcctgaccggccgcagccttggataccagccttaaatcgagccgactacggcccagccccgcccgcggcgaagtgcgcggggttcggtgccagccgctcgcccctggccgggccagcctcttgatgcaccggggacgggcgcgcccatccgactcttcgaggggcggcagggccccatctgtgtctttcgctctcgagcccccagctagagttggcttcagcggaatacctactgtgcaggattattcaacaagccgattgatcacattcttcagctctagcagtgcaaaggcttcactgaaaaagaacattacaaattttttttgaaagaaatttgggggtaaatttaattttaaatactgatttttgataacatttgatcttatgacagcatttgtatttttaattacagataggattacactaaaagtcatttctgacctgctcccttacccttatggctaaaataaactgctaggccctgaagcaaaggcgagccatgttctagagcaatgtctttcttgtattaaaatacggccccatgctcacatataggctgttttgtgttttgcttttctgttgatgcacaaaggaatccttgatatgtttgtcctcaaagaccaaagacaagtatctagtaaaaaatgcaaatcatatctaacagtgaagctttccagcaaaaaccttctgctctagaatgcataattatgcgagcataagatctactactctagacttttagcataattacctataggcagcaaaaccctagtcaattgagtgtctggtgcctcttggacctggacttctccaagagaatgggcaaggaggacgaaaaggaagagacagctatgctttgtgaaacaggaggtgacttaaaaaaaaaattctatagcagtcttcttaattcctgttacagacttgatacgcttatctgctgttgaggacacggttgccagtttctaaccttctctgtctgcctgaaaaactagaaattagatgatcatatggcctagagccagaagtgcaggaggcagaaagccaggggccagtttttttctttttgtttctgaataagaaggccaaatcctgacttaaaataatcaaaataaattttacggagtgacggtctttccagctgaaaaccttaaaacatggcatctggaagaaggccttagtctattgctcccaggatggtactatatagtcattaaatagcccacagataagggagttattgccccctcgttattgggctgccaggaattaaatgatggaactaagtttcacttgaaacattccca

SEQ ID NO: 2557 - DNA, 4001 bp, Homo sapiens
agttttgggatttacacaggcatgagtgactgtgcccagaattttttttttttttttttttttaaagagatgaagtcttgctatgctgcccaggctgaagtggctatttacagggctcaagcgatcctcctgcctcagcttctcaagttgctggggctacagatgcacgccaccatgcctggcaacaattgtttttaagctttatagatttttaaaaacataaagaactgcaaatttcttttctttttttttttttagacagagtctcgctctgtcgtcaggctggagtacagtggcatgatctcagctcactgcaacctccacctcccgggttcaagcgattctcctgcctcagcctcccaagtagctgaggactacaggcacatgccaccacacctggctaatttttgtattttcagtagagacggggtttcaccatgttggccaggatgtcttgatctcttgacctcgttatccacctgcctcggcctcccaaagtgctgggattacaggcttgagccactgcgcctggccagaactatacattttcatttcaacttagcttaaagaaaaacatgtacctaggagtcaaaactcttttcacctcccctctgttttctatgtgacctgtagcaaggtgccacatttttctgggcctcagttctttcatttgtaaaataaaaacatttatcccctgtgtccctcagaggggctgggaggcttcaccaagaagtgaaacactctgaaaactctctcctaagtgttagcatactatcattaatcaactcaagagggcacagcagtcataatttttccccagaactttgtttcaagtttacagtgaaaaattttaattatcttcaaatctgtgatgggattttcaagaaaatatcttcactattgcaaatttaggacaaaatgttccaaaagtctctcaggactgaaactatagaaaagagaaccaataattgactttgatcaggaactgcattaacctctgagttaattaccctaaaacttaagacaacctctttggttgtattgagaaactcatttgggaagggtgaggagccagaccttacaaactagaaatataaaggaaagatcatgccacgccaccacctagctcactctaatgggagtatgaaaaacaaacttgcctttgcatatttaaattattttaaaagggaacaagcggaaaaacttcatcaacattaggaccccctcatggaagtagaaaaatacaaatgaaaacacacctacatcccaaaatcctagcacatgcctaaaatcaaaaactacaacgatgctctactctaaatatgcccaagataatactcactgaaagcagaaagtttgtattgccagaggaacagctacaacagaggaggggagctattttgtctctggaatgaattttcttccttccgattccattccttcttcctgtacctaagacggaaatgcaggtgcagtgaacaaacacccaggtagtgcagaggtaagatagatacggtttctgaaaaatcacaactcgacagagcaatttcgggggggtggggggcacagcaaatagctagagaacaggctctccttatttcaaaaccttgcaaactctaaatctgaggcagccgtgaagtcccatgccctgaatcatctcatccttagcgtcatcagcaagaagggaggacactgagaatcaaaggttttatttattgaactcgagcatgagacgcacattaaaacttccccaccacagatgcagagcaaaagttgctctcaggccagaagagaccatttaaaagctctccgccggtttcagaacacaaataaatttcccaatcctctgcaaagacagaactgaagaattactggacagcacgccagaggcagggacctgagggcaggccatcttgctatgccgggaggagacggtcactgttgctaagggtcatccatccttagtctcgaagaaatctcttcctgatctcttcaccaactctccccactactagagaattgagctactcccaaagatgtaagtaaacaggagactgtttacatctcctgtgggtgggagaggccccacccactctatcctaggagagggcagtgaaagaggataaggcccagagggataagggtgagggagcatggcaaggagaggagttcagatcaggacagggaatgtaggagggcaaggagtgaagggcacaacccacagcctgggaaagagaggcatgaaacccagcgtgtcaggtggacggatcatggaatggggggccagcggaggttaaggaaggagggcccaagagtaggggtgcgaaaaagagaagaggaggaggagaaagtgcgcgtgtgaagagtgttaagaaaacgacaggacagagcggggaggggaaaagcgggccgagggacagggtgaaaggtgagaaacgagggtatgaggaaagagggtccggggcgctggggagttggggagacgatggagcgacgggtagagcagcttgggccgagccgcgggggtggaatccagacgccgggcgggggagggggcggcggggcggcgggacggtgggtgggggccaccaggcggcgccggagaccaccaaactttacagcgagcgagcctgcttcctggagggagtgcagacaaggaccaggagcgggagccgagcctcgcggcccggggcacggcgccgcccgcccctccccggcagtgcctcccgaccccctgccctccgctgggacatggcctgaggccccgcccgccgcccgggactcctcccccccgctgcccccggaccctcgccccaggaccgcggggtctcttcccggccccgccgcccgccccggcgagaacaggcccggcgggcaaggcggcggcggaccgagggaggcctggcccggcagcggggagaagggtgcggcgcagcccgagtttcccaccttttctcctggcccagacgcggctggggcggacgggacctctcgcgctctgcctcctcctcttgcttcatggagccatgcgcctgggtgggggctcccgagagaagctggcctgcgggcgggccggacgcgctgcgcggacggggcggggcgaaggaggccggcgggcggaggaggaagcggcggggcggcggcggcggcggcggccgggaagaactagaggtattccccgggcggctggaggactgagtcgagccgggacccgagtcctccggtatcccagcagccaccggaggcagtgaggtaatggaggaagaatgtagggagtcctccagtggaccacactccttctagcgagccgcggaaaccatagagatcagggctcagccggagggccggcccactgctgtcacgtggcctccatccgtgcgctttattggctggtgctggctttacggggttgaattttggacgctgcctgccattcgtgggaccgagtttcaggcagctggaataaagagagacatcgggggaaagccgcgagaaggccagcgtccctggctgggagcagagctagccgagtagggcgcccggctgtcaaaactggccggcgcagtgcacgctgggccgccccggagcggtcgcagagcccgtcgggagtcgtagtccgggacgggcccgcagcattgtccgcgacgcagctcgggatccgcgtcgggttgtcggccgggttgctgccaggcaccgtcgagcgttagccacccagcattgagctgccagcggctgttctccctaagcaccctcgctcacgtcgcctcgcctcgcctcgcctgaccggccgcagccttggataccagccttaaatcgagccgactacggcccagccccgcccgcggcgaagtgcgcggggttcggtgccagccgctcgcccctggccgggccagcctcttgatgcaccggggacgggcgcgcccatccgactcttcgaggggcggcagggccccatctgtgtctttcgctctcgagcccccagctagagttggcttcagcgg

SEQ ID NO: 2558 - DNA, 4001 bp, Homo sapiens
cagagcaagactctgtctcaaaaaaaaaaccaaaagcaaaaaaaaaacctctagaccttaactctttggggaggctgacttgaagtttcctcagtctcctagttcggtggccctgcaagtaaaacactttatctgctgcaatccccgttgtttccgtgtattgacttgctgctcatagggcaagaatcctatatggttacacaaacagccaaagcctatgtagttcctttgcagctcctccaaagccacaaagttattttgctgtgaattaaatgttattcttggccaggcacgatggctcacgcctgcaatcccagcactttgggaggctgaggcgcgaggatcacctgaggtcaggagtttgacacaagcctggccaacatggtcaaaccctgtctctactaaaaatacaaaaaaaaaaaaattactcaggcatggtgtgggcgcctgtaatcccagctacttgggaggctaaggcaagagaatcgcttcaacctgggaggcagaggttgcagtgagccgagatcgcgccattgtactccagcctgggggacaagagcaaaactccgtctcaaaaaaaaaaaaaagaaaagttattctggatataattatgtcacaaaacatgacacaagttttgttcttcctcctgctagaaataaatgagtactgggacacttgaacttggaacacaagtaaaaagtgccttataaaacttacaaggggcagggcgtggtggctcacgcctgtaatcccagcactttgggtggccgagacgggtggatcacgaggtcaggagttcaagatcagcctggccaagatggtgaaaccccatctctactaaaaatacaaaaattagccagacagtgatggcgggcgcctgtaatcccagctacttgggaggctgaagcagagaattgcttgaacacgggagccagaggttacagtgagctgagatggcgccactgcactccagcctaggagacagaacaagactccttctcaaaaaaaaaaaaaaaaagaaaaccccacaaaaaaaaaaaccttaaaagaaaacaaaattcagctggtcttcctatattttattcaacagaataaccaacatcaacgaacttttgactttatgaaactttagttctgcaattttataatgttattttcttataactttgagagaaaattacagaattgttaaagaattatcattttgtaccgattaatgccacatatttaatactttttcagtaccccaaacttttagaaatgtttttacttgttaggtgcaacataaacagctacacgtaaaaatactattaaatttatatgctataaataacagtatcagcaatgattcctacaaacactaccctgccaaaaaaaaaaaaaagagacccaaatgcacactaacgggagcttaagtctccacaagagcttccccagcctttctagaggacggtgaaaacaggctgagagcccgaggctcagaaaaacagctcagaggggctggaggccagtctgaaagctgaggctgcacatgggatgctacgcacagctcaggaaagaggttggcaagcaggagccggaaggagcaccccagcccgcaggccaggagcgcccgcaggccccctcagccccggagcacgctcaaggccctccctcgggttcccagtaccccgggtttccagacctacggccaccaggggaggctcggcctcgggacgggtgcgagagtcacgcggcgcgcgacagaccaccaagtgctgcggtacggcgcccgcacctgtataactcgggacgcgtcaggcgcggcgagccccggctgctccccggaggcgcaggggccgaggaggcccgagggcagcggcggggtccttcacagtgactcttgggccgcagcagcttctcattccctctccctcccctattctggaggaagaacgggcaacagcagcgggctcgagtgctaatggcaggaaggcgtgcgagacgttcaaatggacgcgtccatcttgactttcccgtcttgcctcgcgccggggcggggcatcgcgggaggtgcgcggcgtcctagcagtcctggcgcctgcgctgttgagggaagaccgcggcgggttacaacttgggggctatttccaccttccgtgcgactgatgcgaaccccgaagccggactctgtctgctacagtcctggcgtccaagttctctttagctcatgtcactagggacctgaactgccttatagatctcagggttttttcttctggtttcgcttccgcctcctgaccccacgtggaggtaggcacctcaggctgagggtggggagcaggggttgctgattttctctacgtgcagtgaatgctctatgcctttttcggtccatactcttcgaagagtggatgaactgtgtgaaggtcctcacagaaacgttgcttgcaattcccagattcagagacacttcttaaggcgattcaaagacccaagttaagaaccccagcggccactcgcgcctgtaatcccagcactttgggaggcgaggcgacaggattgctggagcccaagagtttgaaaccagcctgggcaatatagcgagaccctgtctccacaaaagaaaaatttttttaattagcctggaggcgtggtgcgcacctgtagtcccagctgcttgggagtctggaggatcacttgagcagggagtttgaggccacagtgagctatgatcgcgccactgcactccatccagcctgggcaacagagcaagaccttgtctcaaaaaaaaaaaaaaaaaaagaatgggttataggagaaaggttagaaacaaagattcatgaaacagttaaatacaaatatacctaattgatattttaaacttttgtttgtgtgtgtgtgtgtgtgtgtgtgtgtgtgtgtgtgtgtttttcttgagacagagtctcgctctttcgcccaggctggagtgccgtggcacaatctcggctcactgcaacctccgcctcccgagttcaagcaattctcctgcatcagccttccaagaaggtgggattacaggcgcccgccaccacgtccagctaacttttgtatttttagtagagacagggtttcaccacgatggccaggctggtctcgaactcctgacctcgtgatcctcccgcctcggcctcccaaagtgctaggattacaggcgtgagccactgcgcccggccaatattttaaacttttttaaaaaaaaaaagtttagcaaccccatcaaaaagtgggcgaaggacgtgaacagacacttctcaaaagaagacatttatgcagccaaaaaacacatgaaaaaatgctcaccatcactggccatcagagaaatgcaaatcaaaaccacagtgagataccatctcacaccagttagaatggtaatcattaaaaagtcaggaaacaacaggtgctggagaggatgtggagaaataggaacacttttacactgttggtgggactgtaaactagttcaacccttgtggaagtcggtgtggcaattcctcagggatctagaaataccatttgacccagccatcccattactgggtatatacccaaaggactataaatcatgctgctataaagacacatgcacacatatgtttattgcggcactattcacaatagcaaagacttggaaccaacccaaatgtccaacaatgatagactggattaagaaaatgtggcacatatacaccatggaatactatgcagccataaaaaatgatgagttcatgtcctttgtagggacatggatgaaattggaaatcatcattctcagtaaactatcgcaagaacaaaaaaccaaacaccgcatattctcactcataggtgggaattgaacaatgagaacacatggacccaggaaggggaacatcacactctggggactgttgtggggtggggggaggggggagggatagctttaggagatatacctaatgctaaatgatgagttaatgggtgcagcacaccagcatggcaca

SEQ ID NO: 2559 - DNA, 4001 bp, Homo sapiens
gaactaccatttgatccagcaatcccactaccaggtatctacccagaggaaaagaagtcactatatgaaaaagacacttgcacatgcatgtttatagcagcacaattcacaattgcaaaaacatggaaccagtctaaaggcccatcaaccaatgagtagataaagaatacgtggtggccaggtgcagtggcacatgtctgtaatcctagcactctaggaagtcaagatgggatgatcatatgaggccaggggttcgaggccagcctgttcaacacagggagaccccatctccaaaaaagaaaaaaaaaaaaagaaagaaagaaaatatatataccatgaaatactactcagccataaaaatgaattaaataatggcattcacagaaacatggatggggttggagaccattattctaagtgaagtaactcaggaatggcaagccaaatattttatgttctcccttataagtgggagctaagctatgaggacgcaaaggcataagaatgatataatggactttggggattctagaggaaaggtaggaagaaaatgagggataaaagactacacatggggtacagtgtacactgctcaggtgatgggtgcaccaaaatctcagaaatcaccactaaagaacttagccatgtaaccaaaaaccacctgttcccccaaaaactatcgaaataaaatttaaaaattttaaaaatggcattgaataaaaataattaagaagtggccaggtgcagcggctcatgcctgtaatcctagcactttgggaggcctaggtgggtgaatggcttgagctcaggggttcgtgaccaccctgggtgacgtagtaagactctgttccaaaaaaaaaaaaaaaaaatttaagaagtgttaaattctcttacctgctgaactaaactctgaaaaaatgtctttatttgtttgaggttttccatcaggatcaatgtccatgatggcacgccacaattcagagaatctagctcgtttttctttgggcatatatattccatgccatagtgctttcagcatgtagtcaatattgatcagaatttgcccaattctggtatcataataagctggaggtaattgacaagaagaactctgatcataattagcttctaaactgatggaagggatttgatttaggcaataaattccaatagccaactctcttatcatttgatggacctctctatagtctaagagggcagtagggtccacgggagtcagtaggattgcagtggagaagcctacgttattcatttgactcataattccacatgggaggtctacttgagagcgcacatcctctttggcagacaaccagctaactagtgcagtagttagtaactcttgtatttcactccgatcatatttttcaaaaaaagcagatgcatttctttgtattgctaaattttccaggtaggtgtcttcatcctgaacttgctcaaatctaggtaatccttttttgggcaatcttaacatttctaattaaatctagtgtgtcctttttgaagcttctgcaatgaataagaaggaaaagattatcaataaaatctgacatgccaatgaaactggatttgtctagaaataaatctgtacctttcacctacataagattaatttttcatggtcaaccattatagttttcaaattaaaaataactgcagtatatgaaaactgaaatttgaattaaaataattaaaattataaaacctttatcattaaccatgttctgcttttcaaagaattcaaaagacaagaagatgtatgtcaaaaagaaacgttaagtttatctgtgagaagctactgttacatacctattttgttgttggagaggcattcttttgtatatgttcgtgttagtctgtttgtgttgctataaaggaatacctgagactgcataatttataaagaaaagaggtttatttggctcacaattctgcaggctgtacaagcatggcaccagcatctgctcagcttcttgtgagaccaagcttacaatcatggcggaaggggaaggggagccagtgtgtcacatggtaagagacggaacaatagagagaaaggggaggtgtctactcttaaacaaccagatctttcatgagctcagaggtagagttcactctgccaggaaagcaccaagccattcatgagggatccacccccataatccaaacacctcgcaccaagccctacctccaacattggggaatctattttaacatgagatttggaggggataaatatccaaatcatatggatatttattttgttttcagttttttaaagcaagactatactgacctgcatgaaagaaaagaaaagggtggggcgcagtggctcatgcgtgtaatcccagcactttgggaggccaagtcgggcagatcaactgatgtcaggagttcgagaacagcctgacaaacatggagaaactccgtctctactaaaaatacaaaattagccaaacgtggtcgtacatgcctgtaatctcagctactcgcggggcttgagacaggaggctgaacccaggaggcggaggttgcggtggcctgggcaacaagtgtgaaaaacactgtttcaaaaaaagaaaaaaaaaagaaaaagaaaaggaaagaagcatttgcttaaccttcaatttctgtgccaatgaatgcctgtctattcctgaaataataataaccacaactactatttattgagccaggttctttactatataatggtttgatttatttcatctgattggtctctattatatagtggttctcaaaatttagcttgtatcaaaatcacctggggcttgttcaaatacaaatcgctgaatcccaccactgagtttctgattcaatgagctgtagtggggccagaaaatatgcgttttagtaaagttacaggaaatgctgatagtgctggtttgggcgccacacctgagaccccaggtcagtgagtcagaccttgttatgcccactttatagaggcaaaaacggagaccaggaggttgcaggacaagtctgaggttttacgcctttcagaaacagaacccacgtctgtccagtcaagcccgggacccacgtccaaaagcagctcgcgtcagccatgggcacgggaaaggggaaaaaacaaggaaaggggaggaacctactctagaatggctgttttcttgtccgggagagggacgctgcgtccgcggcgttcccgtggggctgagaacagtcgtcgccgcctcagatggcttctcgcggggccttgaatccgccctcagggcctccgcaagggcgagcgggaggcgcaccggaaggaactgagaggaactttcagggcttttcgccccaccgtggcggcccggccctcctcgcctcgccggccaacactgccgccgcccgggcgcgggtcgaagcggttggtcctccgggccctggggtggctgggctgctcctcgggcggagcctgcgggcgactaggcctggtgcgtcccgcagcagccgcagcgcccccaggcggcgcccggccccttggctggctcagaccccccgcgtgcgcatcatcccaagcccgcttagcgcttagtccagcggcatgccgtgggcactgtgccgccctcactatctgcctctgctaaaacaccgaaacagagtagcagaggagacagcgccgggcgttgaggcagtcccgagttggaataccacctccatcatcattctttcattcaacaagcatttatggaacacctattatgagtcaggcacccagctacaagctggaaaccctagaaaacagggcagacacgaaaccccaaggagcttacagttgaacagatcatctcacagctatatttaacagtgtgccaatattagatggaatgacagcactcgaatgaaagctaacctagcccagggctaggaaaggctgcctaaggaagtgcccttttcccctccgagcctagaagatggaaaagagctacccaagcaaaggactggacaagtagctt

SEQ ID NO: 2560 - DNA, 4001 bp, Homo sapiens
cttcctggcctgtggagccgccttctcattggctccccacatggtagtgagagaggatgggggaactctgggctcttctgcttctcataggtacactcatcccatcatgggctccatcttcaccaccccatctaaacccagccacctcccaaagcccattgttgggaaaagggcttgtgggaaaagggcttgtggggtgcctgcataaacaggccatgaaaatatgggacaataagttgtggaaagccacaagaggcctctgaggaggaaagcctcctaattgccatcatgttcccatgcccagagcgagatccgctctcttatctgtaaacactgtgttcaaggagaaagactctcctttgaagccctggactgtggacagacatgcaggctcctagctaagcccgctcccaccagttactctccgataagttaaaagatatgctgtttgagcacaaaggagattcactgaaaccaatattgctatagattacacctatgacacactgccaccctttcactgtttcgccctgaacatctgcttctcagatctaagtgtgctcaataaacagtgtggagaccagaactctgagccctttgcagcctccattttgcaactggccccctggctccccacctttcaattcttaacctgtctcttctcaatcctttgtccccactagactttgggcactctacgggtggtgttgaggctggtccccaacacccatcacactgggccagggctgggactgagttttggaggcccacaaacagggacaagcacgatggggtgacagggggacctcgtgagatgctgcagtgagactccagggcagcccctggctgtgaacaacagagctgtgaagatggagacagcttgggagccccatctcgtgagggaaacgttccctccctccactaggcggcgacacgggtggcagagtgtgcaggcaggaagggacatgagaaggttccaattaccatctattgtcgttttcctcagtaggttgctgacacagtgttgaggctttcagatttctccagaaactagtttctcagggagtaacacagttcagggatttttactgcttgccttaaggagaatcccggctaaccctgggccccaggtcagggtcggacctccccgctggagggtcccccgcaccttgtggcgaagacagcgtagttcttcagggaccccggctcctcggcagcaggggtctcgccgcccttcccctctagcgggcgttggcggctgccagccccagagacttcgtcctctaagctaagggaggcatgggccccttccatgtctgtggtcttccaacctgcaagcgacgtcaggaccgcacatgtgcccccagggctcccgccgcgaactcagagggcgcccgaggcccggcccgcggcccctgagcctcagagaacccaagcccctccctgaaccgcgccggagcctgggccgccacccacaggtcccggaccaccatccctgggagtcctcagggagacctgtcggaaccatgggtaaacttcacccgcgtccccaggtgtccctgtcccttcgtgggcgggaatcacagcaagggcggtcgcggccacgtggccaggccaggcccgcacccactatcgcccaggaggcgccgctaacagcgggtctcagccacgggcctctgaagccagcgctcgagggtgggctcgggagacgccgcgcccacctaaccccacgcccccagcccctcggcccctccctggggtggggaccgcgagcctggcgcccccccgcacccgccgccccacggagctccgggatccccctagccccggctcccagcgctcctgtcgcgagaccgcaccaagcaagactcgaagagctcgcgccggacagcagggagaccgacgggactgcagccaccgcggacgcccgcgctcccgtcccgactgcttgccagccctgcgcctacggagagcgtcgcgtttccctggagacagccccgccccatgcccgctgccactctccggctccgccaatccccccgccaggacgcacccggccccgcctccgggcgtgcccgccctctgtgacttcaggggcttggggccgacaccccgcgggcctcggtgccagcctcccgcttacccggtcagcccctgggccgagtacccctgggagagaaagcgctaaattcccccaacactcccgtgatgggggcacagggagcgccgtgggacacctgaggaaactgaggcccaagtgttaattaacttgccctgatcacctagcacgtggagccacgacttgctcaagccctgcctgattccagccccggcctttgttcattcagtaaatgtggaaggcgcaagggtaactcgaggcctgcggagggaacgagatgagggaggccgcaagagtcaccgcagagaagagggattggctgtcttggaccctccgagggcctcggggaaggactgcaggagagcggattcttgatggggcttcacaggatgcgcaggagctctccaggctacagagcgcatttcaggaactggactgggatgtacagaggcaccatggtgggaaacagctgggccttcctgcaaagaggggagaggctcttggaggtgcagggcttgcgttttctcaacccagactgcctctgagaacagggcagggggtgtgaagagctgatgccctggccctccccactggctagctttccggggactaaggactaaggctgggccaggattctggggttctaggggctctgcctccacacgccagtgcctgtctgttgagttcacttctctctaaaatctcattttacaccacgacccagtacaaaccactcagaaaaatgtttcattaaaagttcggcatactacatgcatgcactctaatattttcatgtagtctattatttctctaaaaactaaaatgctgatcatgacccacagaattgatttcacaacccacattagttgtgaattacaacttgctaaggagtcagaaccaacatgtagaaaccctctgttcttagcaagcacattctggttacactgtgggggactagcaccaagtccaggagacagaggctggcccagactaagtgtggcaatgagatgcagagacacttaggatgaattggttcccaatccattacctcaatggagtgggagcatgatggttcaagtagcaggctttggagcagaaaacccacctcaaccatcctccaaccgtaaagggtgatgatgattcatgaaacagtccaggaggaggagggacttcaggttttgtttgattcatttcagtggcccaacagtggcatcaaggaccttggctctcccatctcctctgctttcacccaaggctggcttccccttatggccatgagagaacagaggagccttccaaagtgctctctccttcatgggttattagacaccaagctcattcccagagcagtcacgggagtgtggccttcacttttggccagagacagagccaactcctagaaagcggagggagacagtgtcccaacctaatcaatggctcccatgaacgccagggaaaaaaagggaattccactcctccatcctaggaaagttggagtccttccttagggtggaggaagtgggaaacagatgctgataagacctccacggaggtgatgtctggagctgcaaccagggaagacctggctgcagacatatttgagtctttagctcaagagtgaaccccaggctgcaataaagatctgacagttaccaatgctagaaggctgatggacaaagcaatgacgataacccagagagagactgtatgcaactgaaacttcaattgctaaatgtctgtagggctgttgagacagttgcttttcagtgtatccattgcctgaaaattaccagatgtcagaaaaattgaaggagtcttaaatggcaatttcatggacattaagtgatattaaattttttaaagttacaatgctgaccccaat

SEQ ID NO: 2561 - DNA, 4001 bp, Homo sapiens
tggtgtgtgcactgccctaaccccgacctcccactcaccttaaccaggggctcaggtttcctgggggggactctgtgtctcagtcgctttttccgtctttgaaccaagttttccaagtcagccaggttatccagattaaatctggtactgttaaatctttcaagctggggcagaagacaagaccatgccagccatcagccgctggtcaagagatctctctgccctgccgacaggagacaccagctgctcaggctgccccaccagagtccctccaggcctcactgctcagccggcctcagggattagccactgcccccaaccccggcccccgcccctctctcactttcttcttcttctcttcttccaatttcagcttctcccgggccacagcctcttgggggcccctcctccagtcactaggccaggctccagggtcaggaactccatgtccaaatcccaacactttcccttcaactctttctccacttacctgtaggaacaggatatgagtactgagttgggaaaattggaggaacccttagaaaacagagctgtggagtagcagggagctgtcttataagggcagatgtcacaaggctggtgcccgggatgggagccggcctcaaagctcctgcagtccagagtgctggcaagctccctcaccctgtgggtgctgcaggctccgcaactgtgtcatcagctgacacccagggggacaacggatccccgcctaccctgctcctgtcagcaggaacacagctggggggacatgaggccacaacctatttatactgctgggcatttgcccaggtagcctcagggcagatgacaccttagcttcccccatgttgttaagattcctaccagatcatactgactgccacctgactccaagctcagagggacagagaagtccccccggggtaaaattctaaatgcctgggttcagttctcggctccttttgaagctacatttaagctcaaacacttaaggcaattgcctaaaggagttgtgaaggttatgagttattgggacctgtgcctggggcaaagcctccgtagcaaacacccatgcttcctcccaccgggccccacctcaggagttcaggagctggggagcactgaggaatcagcctgttgtggggaaagaacagggtggaatgatagggtaacagatcctaggactttctagtcaggtagaaccatattccttctaaagaactctagcaacctaacacctccctgccatttgcctcccgccagaggctgcaccaggctggggccagcagcccacagatgggcttgctgggcctcacaccctccaggcccctcgtcactcaaaccgacatccctaagagtcactgtttccctcactgcccagggagcgaaagagcacccttccctatccccaaggcagccaggacctctggccatttccagagcaacaactatcatggtgcttaagctgaactacaaccaccacagccacacttgcatcttccaaagtaacctgccatttcctgttcctctttcaccatcactatccagggcaaaactcactgaactcaaggattttcatgtcttctttcccattcgacttccctctcttgctccctaaccccctcaccacctcacatgagaaccgagcagacacaccagaaagaaccgcacgctcagccgggtgtgggggtacacgcctggagtcccagctacttgggaggcccaggtgggaggatcacttgagcgtgggacttcaaggccaggctgggcaacacagcaagactccgtttcaaaaaatacagatttttataaaagaactgcatgcttccctgcacctaagacttgaccctcacaccacagaaagaagctgccagccctctctagccagcctcctcctatcaagccggtcccagggtgcctcccacctccgtcccacatccttaccaactgctgaatgctgatgaagtccatggtcccccctgttcctcacaccccccagtgagaagagctgaactgctcagccctttataggagcgcctggagacgggcaggggtggacagggaaggactggcgcaggtgcaagcccctgggccagatgactctgggactctgtcacaccaactaaaataccagtctgggaatgcagcccactggggaaaagaaaaggagctgtttggagatgagttggctgcatcctcggacacccactcctgcacctctgccatgccccacacctactcaggggccatttaaccaacacactgctagcccagattcgggtgaaacgtgttcccctctcctaagtttagatgccactcctgaagaaagcccagcctgggcctccatgttgtagggccggctgcctgtgaacctgaaagcccagcctaggtggctgagcaaggaggctggaagcctgagggggtggtcgggaggggcaggagcggccagcctacagcctcagccctcatggtggccacgtgaggaaaccgtgatctcccaacttgcagtttcaaggctgcccttcccttccctgtgctgtgggtttctcgcccccgggctcccccgctcctccctcagtgctctgagagcacatggcagctgccccagccccgaagccaagcctggcgcctgtcctcgggcctctggaagtcctccccgcccctctacaagcccctaccagacgctctccagggacggagtgtgcccctccagccacaggaaaggggagactgatccgcgtcaggtcccgggatggaatagtaaccatgaaatccagccgcagagcaatgtgtctcaagccatcagtcacccttcctaattctcaggaagccaggcatgcccttcacccagctgaaccttgaactccgccttggcctttgcaaggaaatcagccagtaaataagaccccaaaatcggagcaacctgagaagacatgaccagggtacaaggagggagaactgtggccaaggatggccacaggccccagatggctccccagctcccaaagaactggcctcttggaagggcttccacattttcagagaactcaggaaaaggcagagctttcttagaaaactcagttcttggcccggcaacagtgagactccgtctaaaaaaaaaaaaaaaaaaaagttttctttttttttttaattttttgagacggaatctcgctctgtggcctgggctagagtgcagtggcgcgatctcagctcactgcaacctccacctcccgggttcaagcaattctcctgcctcagcctcccgagtagctgggattacaggcacctgccactatgcccagctaattttttatatttttagtagagacggtgtttcaccatgttggccaggctggtcctgaactcctgaccttgtgattcacccgcctcagcctcccagagtgctgggattacaggcttgtgctatcgcgcccagctgaaaacttagttcttaggctaaatttagggtgcttttttcagacaaaggtgttccttgcttttttttttttttttctttttgagatggagtttcactcttggtgcccaggctggagtgcaatggcgcgatcttggctcaccgcaacctccacctccccggttcaagtgattctcctgcctcagcctcccgagtagctggggttacaggcacgtgccatcaccctggctaattttgtatttttagtagagatggggcttctccatgttggtcaagctggtctcaaactcctgacctcaggtgacacccagcctgttccttgcttttggttatgaggagggaaagagtcatctaaaatgagggcaaaggggccgggcgtggtggctcacacctgtaatcccagtactttgggaggctgaggtgggcagatcacctgaggtcaagagttcgagaccagcctggccaacatggtgaaaccccgtctctactaaaaatataaaaattagccaggcacctgtagtcccagctacttgggaggctgaggcacaagaatcacttgatccct

SEQ ID NO: 2562 - DNA, 4001 bp, Homo sapiens
gtaaaatgaaaatcacttttttatctaatatgtatatacacatattgtcttttgttaattttttcttataaactggattttttttattttgctaaatcgaccttcagaatgtgtgcttgtgatatttgtaggaatataaacatgcatcaatataagtaggcatttgtgtttttttctgttatctttcttattttgtgcatttaaaatttttaatctacattccataacgaatttatttctgtgacataaaaatctagccagatttctccaaatagttagcaggcacttcatttatgagtaattcatcttttcctactaatatgaaatgtcaccattatccaattctattagattggtgcaaaggcaattgcggctttcgccattacttgtaattgcggcaaaaaccgcaattgcttttgcaccaacctaataaattcttacacatattggtgtgttcctggattttctaacctgttccattcactgatttgttgtttcagctgttagtaaataacttgtggaaattaacagcacattttcatatctagaaaggcaagtcttttttgactccatttcaaaagttttcttgatgtcgtcacaatagtaaaagacagcatgagtaattcaaaaatgttaacactttgataactttatttggattatgtaaaatttataaacacagaaagagctcagaactttagaaaaatgtgtctttctattcaagaacacagaccatcttcccacttcaaagtttccctctaaggtccctcagtgaaaaccaaattgacataggtgtccattgatatcaaataaatattggatttttatccaaagaatttttagccaggaagttgatatattatggaaatgatttctctcattatgcacctttccataatgtatgtaacattatgctttaaaatgtgcacgttaaaaataaaacgctgtacatgctgaattttattagtgaaatcactttaaaatgatttataaagaagcagcatggtgagtgattggaaaccagctgaagttttgtttttgttttgctgcttgtgaaaatgacctgggtgctcgcccccgccaaggtttccacatcccaggtgcggctgagcctgccaggaaagaaagtccagcccctttggtgacaggactcgcccccctcacctctgcacccctttcccccaccccattcacccccacccctcacccccacctccagtcctctatcccattgaaccctcaccccatctccccaccccacaccgtccacgcccctaccccccaagccttcattccgtccacctcagcccattcacgcccccaccccatgcaccccctactccccactcccatcccccaactcactccacaccccgccaccccatataccgccactccccaggccccgctccactcactcccaccccagccgggcaccccctagcccccgtccaaaccccgagccccggaccatccgccccgcagccctcagcctggaaaggggtacttctccacatccacaggcctcctcccgcagccccggctcccggcccccattacctttccttcctgtctctcttattggcgtcataatacgtgagcagaaggtacttcagtttctctagattaccatgtaagacagctctgtggatcctcttcagatgatacggtttaatggggtattggggaaatgcgaagccatccgagcacaagcgctccatgagggtgggccacctctcccgcttgccgtcttccataatcgtcggctgcaaattgtagcctgcagccgtatttcagctcgccttcggggatcgccgcctccgaagagcaacaacgagcaaagcagtctgtccacggacctccgcacagactctcagcgcctcccgcctctcagcagaaacgcccaacagaagggttagaaccagcgagcacgcgcaccttagccggccctgcccaacaggcccgaggcagagaaaccgccctagcagctctcgcgcgcccagtgcaggcggcggttgctgcggaggtgccgcgggagggcggggctccctggagcgcgaggcgcgccctgccccagggcctgtttaactgtcgcccgcgcgctcttctcttccacaggctcccgacgctcggagtcccccgcgctgggccctctgcagcccagggatggggttgagtggtgcttctccgcctggtgccaccgctgggcccacagccccacttcgccactgcgtcgcccccggggtccgcgctgatgggtgcgaggcgggaggacgggatccggggttgccacagctgcagccagcgcaccacttgtaggcggcactgcagctcgggctccggcgggggctggcggggctcccgtgggatggcctcctgggccctgagtgcgcccccatccggccggagggtgcgcgcctcctgcacccccggcggaagcccatgcccggcgctcctgccgcagactgcctgacttgccgcggccaggctggccccggggtccgcgcggctggaggcgcaggcctggtcggggattcccaatcctcggggacccctgctccatgtgctggtggcggctgcagctgcagcgcccgtgggctgacgtggcttcccggagctgcggccggccgcgcccaagggccccacaggctgcgctgcccttgccagctgctcctgacccgcgcccagagcgcaggacctgacgcttggcactctgcagccacggggatgaggctgagcgcctgttttcggcctcgtggcgccgctggggccacagcctgacttcaccaccctgtcgcccgagtcctgtgatgggcaggtgtgaggaggggcaatcggggttcccaaggctgctgcctgcatgccactccgtgaggaagttgaaatacgtgatctctaagattcctcccagttcttcacctcatgagacaaatataaatcaagtaacattcgctattgtgattagaaaagctgcatttacacacgttagccactagatggggacgtgcgattgttacaatgctgaaggtttcccgtatttctttattttttatttggccgctagagggcacgcctgcactgcacttaaagctgactattaaggaaagacaaaggaattcttggatttttccattttcctcatcacctgtgcttatcagagaattccaggggcaagctaccctttccaattcatcactaatttataaacaaaattctaaggagtaaggaatgcttcttacttacttcctataacatatttaagaatgaacgctcaaaataaaagtaatttatttaaaacgtgttgagtaattataactgcaaaatttttgctcatgtttttcatatgctgttcatttgcaaattattagaaatctacatattctgttcatctcagcattatttataacagggaaaaattagacactagccaaaaatctaaaaacagggaacagtaaggaaaaaacaaatggttcttttaatcatcatcactaaaagtgcttgtgacttaaaataatgacataaaagatgcttctacgttgttgagtaaaacatcaagataaatttaaaattctatttcaagcttaactatattcatttaaaaagagaaaaattttagagggtttatcttgttggattatcagatgttatttttctctttttaatgccatatacttttcaaattttcagtgggctggtattacttttgtatttaaaaaagaaaaatataaggaaaaagaaacctgtcacacactttttagtggattttactgatcagtcatctctgtatttctggcatcagcaaactgagccagaaactcagtgcctcccatttctttctttttttttttttttttagacggagtcttgctctgtcgcccaggctagagttcagtggctcaaacttggctcgctgcaacctctgcctcccaggttcaagtgattcttctgcctcagcctcccaattagctgggatgacaggtgcccaccaccgcacccggcta

SEQ ID NO: 2563 - DNA, 4001 bp, Homo sapiens
taaaatgaaaatcacttttttatctaatatgtatacacacatattgtcttttgttaattttttcttataaactggattttttttattttgctaaatcgaccttcagaatgtgtgcttgtgatatttgtaggaatataaacatgcatcaatataagtaggcatttgtgtttttttctgttatctttcttattttgtgcatttaaaatttttaatctacattccataacgaacttatttctgtgacatgaaaatctagccagatttctccaaatagttagcaggcacttcatttatgagtaattcatcttttcctactaatatgaaatgtcaccattatccaattctattagattggtgcaaaggcaattgcggttttcgccattacttgtaattgcggcaaaaaccgcaattgcttttgcaccaacctaatatattcttacacatattggtgtgttcctggattttctaacctgttccattcactgatttgttgtttcagctgttagtaaataacttgtggaaattaacagcacattttcatatctagaaaggcaagtcttttttgactccatttcaaaagttttcttaatgtcgtcacaatagtaaaagacagcatgagtaattcaaaaatgttaacactttgataactttatttggattatgtaaaatttataaacacagaaagagctcagaactttagaaaaatgtgtctttctattcaagaacacagaccatcttcccacttcaaagtttccctctaaggtccctcagtgaaaaccaaattgacataggtgtccattgatatcaaataaatattggatttttatccaaagaatttttagccaggaagttgatatattatggaaatgatttctctcattatgcacctttccataatgtatgtaacattatgctttaaaatgtgcacgttaaaaataaaacgctgtacatgctgaattttattagtgaaatcactttaaaatgatttataaagaagcagcatggtgagtgattggaaaccagctgaagttttgtttttgttttgctgcttgtgaaaatgacctgggtgctcgcccccgccaaggtttccacatcccaggtgcggctgagcctgccaggaaagaaagtccagcccctttggtgacaggactcgcccccctcacctctgcacccctttcccccaccccattcacccccacacctcacccccacctccagtcctctatcccattgaaccctcaccccatctccccaccccacaccatccacgcccctaccccccaagccttcattccatccacctcagcccattcacgcccccaccccatgcaccccctactccccactcccatcccccaactcactccacaccccgccaccccatataccgccactccccaggccccgctccactcactcccaccccagccaggcaccccctagcccccgtccataccccgagccccggaccatccgccccgcagccctcagcctgcaaaggggtacttctccacatccacaggcctcctcccgcagccccggctcccggcccccattacctttccttcctgtctctcttattggcgtcataatacgtgagcagaaggtacttcagtttctccagattaccacgtaagacagctctgtggatcctcttcagatgatacggtttaatgtagtaatggggaaatgcgaagccatccgagcacaagcgctccatgagggtgggccacctctcccgctcgtcgtcttccttaatcgtcggctgcaaattgtagcctgcagccgtatttcagctcgccttcggggatcgccgcctccgaagagcaacaacaggcaaagcagtctgtgcacggacctccgcgcagactctcagcgcctcccgcctctccgcagaaacgcccaacagaagggttagaaccagcgagcacgcgcaccttagccggccctgcccaacaggcccgaggcagagaaaccgccctagcagctctcgcgcgcccggtgcaggcggcggttgctgcggaggtgccgcgggagggcggggctccctggagcgcgaggcgcgccctgccccagggcctgtttaactgtcgcccgcgcgctcttctcttccacaggctcccgacgctcggagccccccgcgctgggccctctgcagcccagggatggggttgagtggtgcttctccgcctagtgccaccgctgggcccacagcccgacatcgccactgcgtcgcccccggggtccgcgctgatgggtgcgaggcgggaggacggtatccggggttgccacagctgcagccagcgcaccacttgcaggcggcactgcagctcgggctccggcgggggctggcggggctcccgtgggatggcctcctgagccctgagtgcgccgccatccggccggagggtgcgcgcctcctgcacccccggccgaagcccatgcccggcgctcctgccgcagactgcctgacttgccgcggccaggctggccccggggtccgcgcggctggaggcgcaggcctggtcggggattcccaatcctcggggacccctgctccatgtgctggtggcggctgcagctgcagcgcccgtgggctgacgtggcttcccggagctgcggccggccgcgcccaaaggccccataggctgcgctgcccttgccagctgctcctgacccacgcccagagcgcaggacctggcgcttggcactccgcagccaccgggatgaggctgagcgccggttttcggcctcgtggcgccgctggggccacagcctgacttcaccaccccgtcgcccaagtcctgtgatgggcaggtgtgaggaggggcaatcggggttcccaaggctgctgctgcctgcatgccactccgtgaggaagttgaaatacgtgatctctaagagtcctcccagttcttcacctaagacaaatataaatcaagtaacattcgctattgtgattagaaaagctgcatttacagacgttagccactagatggggacgtgcgattgttacagggctgaaggcctatttattttttatttggccgctagagggcacgcctgcactgcacttaaagttgactacttttaaggaaagacaaaagaattcttggatttctccattttcctcatcacctgtgcttatcagagaattccaggggcaagctaccctttccaattcatcactaatttataaacaaaattctaaggagtaaggaatgcttcttacttcctataacatatgtaagaatgaacgctcaaaataaaagtaatttatttaaaacttgtgttgagtaattataactgcaaaatttttgcccatgtttttcatatgctgttcatttgcaaattattagaaatctacatattctgttcatctcagcattatttataacagggaaaaattagacactagccaaaaatctaaaaacagggaacagtaaggaaaaagcaaatggttctttaatcatcatcactaaaagtggttgtgacttaaaataatgacataaaagatgcttctccgctgttgagtaaaacatcaggataaatttaaaattctatttcaagcttaactatattcatttaaaaagagaaaagaaattttagagagtttatcttgttggattatcagatgttatttttctctttttaatgccatatacttttcaaattttcagtgggctgctattacttttgtatttaaaaaagaaaaatataaggaaaaagaaacctgtcacacactttctagtggattttactgatcagtcatctctgtatttctggcatcacaaactgagccagaaactcagtgcctcccatttcttttttttttttttttttagacggagtcttgctctgtcgcccaggctagagtgcagtggctcaaacttggctcgctgcaacctctgcctcccaggttcaagtgattcttctgcctcagcctcccaaatagctgggattacaggtgcccgccaccacacccggctaatttttgtatt

SEQ ID NO: 2564 - DNA, 4001 bp, Homo sapiens
actgtagtgaagcggattaacaaatctcacagtttcttttatttgtgacaacagtagctaaaactggcttatcaaatacactcttcccattaatgttttaaagaatgtatttgtttgcacaaaaaaatgaggaaattgtttgcggtaaaaattgttttttatgaaagcaagatgccgggtgcggtggctcacgcctgtaatcctagcactttgggaggtcaaagcgggcagatcatgaggtcaggagttccgagatcagcctgaccaatatggtgaaaccccggtctctactaaaaatacaaaaactagccgggcgtcgtggcacacgcctgtaatctcagctactcaggagaataggagaatcgcttgaacccaggaggcggaggctgcagtgagccgagattgcgctactgcacgccagcctggacaaaagagggagactccatctcaaaaaaaaaaaaaaaaaaagcaagatgatggatacatcagagtaactggcctaactttggataaggcaatgtttacttcttaacagcacaattgacacttacgggccggatgattattgtagcgagctgtcctgtgcattgtaccatgtatacagcatctctcatctctacctactacacgcctgtagcaccctcctgattgtgacaacccaaaatgtctccagatattcaaagtcccttaaagggcagaactgcccccagttgagaactggggtgtttagggagggtctctgaggagatgacattggagctgggatctgaagaaaagcatcagctagcttaacggttgtaggaagttcattctaaggagatgggacagcaagtccaacggccttaactcaggaaaaggtcttgcatatttgagacaccaaaacaagaccagtgtggctgcggcgtagtgattgggggaagaaaagcatgagaaataaaatgaggaggagaagtagaaccggcaggggtgggtctacagagctttgtaggccataacagggaatgatgtgatttctaattttcaaaaagccgctctggctgctatgtgagagtagaaaaccctgtaggaaggcaagcgtggaagcagaaagaccctctgaggcaaccacttcagcagtgcagaggacagcggtaggaggggcggagggaagtaggcaggtgccagaaccacggtaaaggaagagttccatgagaatgcttacacagcagtggcaatcgagggctgcatccgcaagggcagatgacacagcacagtggttcccaacgctcacaagaagcaccctggtttcccgccttcctctgttcctattggcaccataatctctgtataatctgggccaaacgtgttacctctctgggtcccacagatgagatactgtgccctgcctcgaaggctgcccgtgcgaagctcttgccatctttaaagcatgcaggctgcctggcacccggggctaaacaaaggccactgctctccttcaccgcgcagcccccaggcctgcagctccatgcccctcaggttgggtgcaatgcccctggtgcagattctgctccccgggccctctctcaaacacctgagcaggcttgtgtctcccaggggaggtcgtcccccgctactcgggagggttacggaaaccagtgcttccgcttccccgccgcccgcgggacaggtgtctcctggccgagctcgtgcggggccctgggaggctctcagtacacgggaaccgtgggtcccgcccgccttcccgcaccaggccccaagccccaagccccaagctctcggggccccgttcatccgcctctccttggccccacgcctcctccttgggccggggcctggtgagaaccacgagggccgcgcggcagcctcacccctctcgaagtccatctcctccagcgtctgctgtacgccgagcaccgcgctgggatgcgagcagcagggcccgtccgcgcagggccgaggcgtcgccatcccggccccggcgtcagtcgatccgccccgggtctcaggctcagcctcggcgggaggggcggacgcagggcccgccccgcgtccctgatctggccgctcggcgtccgcggctgtcgccctagtcccgccttctcgccaaagctgaccaatcaaacgcctaggccttagctcgagaaccaattgcaacggtagggcggggcttgttgcgcccggccgtgccccgaggcctccgcgcgagggcgtccaaggccaagcgaggactgaggcgctgggttccgggagccgcgcgccgctggagggccgccgggccgcctggccttgcagggtgtggggatgaggcagctgggtccggtcgggagctttcccgttaccttcgccatgacccagccgtccagcgacctcgcagcctcctctctttaccgcccctagtccctagggcagggaggcgccacgcgctccgcggtcttttttttttttttttttttttttgagacggagtctcgctgtcacccagacttgtgtgcagtggcgcgatctcggctcactgcaacctccgcctcccgggttcaagcgattctcctgcgtcagactcctgagtagctgggactacaggcgcccgccaccacgcccggctaattttttgtattttttagtagagacggggtttcgccaggatggtctcgatctcttgacctcgtgatccgctcaccttggcctcccaaagtgctgggattacaggcgtgagccatcgggccggggcgcgctccacggtttttagcccctcttcctggcaccaccccggaccaaggccgaccgcccccggggcagcggcaaagtgacggctggaaaggcctcgagacgcccctccccgtaccctgctcttccttacaagtccagcaaggggcaggtggccacaacttgtcctgcctgtagctccacctcagggcaggggcagggccttggtttgtgcagaaccccctggccccacagtgggcgctgagtttacggaatcggtcttcatgatcaaaacccaccgggaggccgtctgcggaccgcgcaccttcgcagcgtgctcctcagcggaccccagccttctcaattcccagttaaaacccaggcagctgcctgctcaagccacgatcaagtgtacaggggagaccgcctgatcggcttagaaagagtgcatgaacgacagaatgcaggttgggttctgtgccagtccctctccaggacagtggtctggtgcacactggatgtaagttccttcccccgctagttggggcacggaagaccctagcattcctggtgggtagaaggctggaagtcgtttctcctcccctaagcaggttgagaaccccatcctcacacaagcaatgatctcatctccacaaccttccactcctttggcccctcattcccactacccgtcttgagttctgggaaggcaccccccccaccactccgcttctcccctggactcccagtgccctgacttctccttctggccagaagccaaggctggctcccaaggggctatggccatggtctcgttcccagccccgcagccaccactgtgggaaaacactagagctgggctgtcccctcccacaggcaggcagggaccacaaaagtggtggctgccctgggattgtgggggaggcccagtccagcctccctccacccagagagccttccctcttggtacccagaaaggctttagcccaaacatcttagccccatcagagcaatcgtttcattttctccattttatttgtcaatataaaaatactcaaatatttacaacaaataaatacgcggggacacaataagttacactgttaggagccctcctcctagggctggaagagagtatgccattgtccacagcaggcccaccctctcccttctctcccctcacacagcctttcccagccctgtacaggaagaaggcaagtataaaataccactgaaccccggggccaagtgggaggccccacccacccttccccccaaacacacaggaggctccatct

SEQ ID NO: 2565 - DNA, 4001 bp, Homo sapiens
gatctaggaagagatgttttcttgtaacccttacaacacatccaatgagatgatggagctatcctataccaactgtagcagaaagtacaagcacctggaaggcagaagacaagagctagtcccagtcctgcaggcctatagctggcattctttgaggaagacttgcttcacttctccagatctgttttgtcatttagaaaatgaagggtttgggctagatcatccttagagtccttacaactctaaacttctatgtgatgttctttcttatatgtgataacaatacctattagaaccattctttgtactttgaagatctagggattaacagacaagtacagcaacgtgtactagcaaagatgacaggcccaagacacgctaaaactgtaggatttaaaatacgcaaatgtctaacagttggcaaagtatgtgaccaaaaggtgaaggaaatcctgatatcaacttacacttttaaatgctctggaaccaatgagaacaaatacattcatcacaagtaccagctgctcttcttactaaatttaacaataacatgaattttaactcagtgatttccccatcaccaaccccgccaaacacctgtaaatatttaggaaaaacaagctaaaaaaattgaatctaaaaggcaggagaacaaatcattgcaaatcattgtggtgacggactgcacttcagttgcaagatgttctggctggatactaactggagaacgcaaggcagcagatgcaacccatggacaagtttgaggtatttaataccaagggctggcaagtctgaccctgtagtcaaagtcaagattgcctctctgcctaccaggaccccaaaacaaagttcctttcactacccacgaataaacgggggtgggggtagcaagccgtttccttttttcgtggaaagagctgcaaagagttttgtcatgcaacttggtttggtgcctgttagtgtcaatgtaagagcagcagagtccgcgaaggtggctgttaccattccacagacctgcggcgaggactgtcaatccgattcagcaaataaccccacctctccaagccaggactccagagctgccctgtgtggtgtctcagcaaggaaagccaacaaagctggtagacacaggcagaccgtagcccaccgcctgtgagtggaggctccgagccgacttcacctcctcctcagagggaccggcccgatccgaaagggcggtctccaggggtccccatcccgcaccacgcacacagcctggcgcaactaaagaggaagtcggatgtcacatccaacggataaataaagacagcccggccacacaagagccgcattctgggcaggactcctgctaggtttggggaggggtcccagtctgcgatcctttctccctcttcgtgcagcgtcctcctccccggggcccgggccggcggcgcccacgcaacgcggcgcggtgcgagtcccgagagcacctcgagcccccggccccctccccagccccgccgggcccgcggccgccgcactcccgcacgccggctgcccagcgcccacgggccctgccccagactcgggcgcgcagttccgacggcccagggcggggacggcgcggcggaggggagctgccgccgcgggctctcggaggcaccggcggccgcacacagtcctccccttcgccgcgagtaaacagctcgcgggcgcgctccagccgcgcccccatccccccgccgggctccgcgccgccccgcgcccgcgcgtcccgcccgccggcgccgccgcccgctacctggtcggtgagtttgagcactgccattcttccgctccttcgcgcgcacacacatgcaggtccccggcccgcagatgtcacgccgggagccggggaagcggaagggattgccaggagaagggaaaaaatctggctcccgaatttgacagccctccccctgctcctcctccgccgccgcctcctcccgccgagaggctgacactggctagtggggtttgcagccgagcccgcccgcctttccacaggaagtaccggctgctgccagccgggccgccactgacatcaccgcgcgctggctcgctcgccgcccgccgcctgggccgacgctgcctcctgccgcccgcagccgagccgcgcagcccggcccccggcgctgcccccgcgcccgcaccgggccgccgcctgccttccgcacctgcacgcggcgcccggccgggccggccccgggccctgggcggatcgcgggcctccctgacgggtctcacacatatgggtggggaagcccgcggggacacaccccgagggggcaggaaaggctctcactcacatgccgtccactttaaccggggagatggggttacgcccccttcccctaacccagaatcaggtggtggcagcgccccgaagatcccagggaccgcaattatgatgctccctttgtttaatgccaggaggcagcggacacattgtgattctttacagggtgtttgccaaacatttatgggtggagggaacagaagctctggcccttccaccttgttctccagccactttccagctaaacacacacacacatatgcacacacacatactattgttaaattcaaacaccctgggtttggtttttgctggtgggggtggagtggagttcctggagaagcaaagcagtcctaaatcaccgagttgatgggtcttttgggtgttcccaccagtccttactgatctctacaaaatcccaagttaccaagctcttcaacaaatagaagacagctgtcaaacaccatgggctacagatacaacgggcatattcgtaagcatagtagctgttgatagttctggaatttggagcaaacacttattcattgaacagctatgtactgagtccctaccttgtcaggcactggctaggcacgggaataaacggagagcataaataagataacctgctctcagaagatgccaacataaaccgcatagtctctgctaatgaatgtaattacaaactgagataagggatctcaagggaaaacatgcttctgaagtgaacccacaacaaaggaatcagaccagactggtgggtgagggcaggcttccctgagaaagtgacaggagttgagatctggagaagggagaattaagtaagcaagtggagaggaagtgctcccaggcagccccatgtgcccctggcaggccatagagcaaacctgtagggcagcattgaacagctttgaagagcaaactagagctacagaattctttggtcaagaccaaacatctgcctctactgtatattcacaaaccaaatgtccattcttcctccctactcttagaacctcccccaaagattccacatgagacaggagagaaaggagcattaatatcctcacatttaccatccagccactctggttgtcgaagcagctaaatctcaaatttacctttattagtcttatagattataattcagatcatgcagacaagaagaaccaaggaactttgttcctggcttccactcctctgttatcaatgttgcatggaaacaaacaaacaaaaaattctaaggcctttctcagacatacaacagattgtttatgttgcatctatgagtcagttcttcactgctgttattggtatgtctatttactgaacaccctgcatggctttgtaagtaaactgaataggaccctgcattctctacttaaatagagccatctttcagaagagtgataacaaatgacttaatttggaagattcactcaagatccaatttgattcatcgcggacatgcctgcacctaagttcctggggccaaagtgaggaggcagcagttctccacccaatcagaccatcatcctctttttgtaactagtatctttaacactccccttactatcctgaaaggtaatttgtggataatattacctaccaatacaaatttcaaaaaaaaaaaaaccagcaacaatatattgtcctaattgtacaataaaggaaaaattaaagg

SEQ ID NO: 2566 - DNA, 4001 bp, Homo sapiens
ggagccagagtactggggcatagaggttgagtgacttgcctaaggtcctgctgtctgctagcaagttgcagagctgggatgtagactaggtctgttaaaggccaatcttttttttttttttttttttgttgagacggagtctcgctcttgttgcccgggctgaagtgcaatggcaccatctcagctcaccgcaacctccatctcctgggttcaagcaattctcctgcctcagcctcccgaatagctgggattacaggcatgcgccaccatgccctgctaattttgtatttttagtagagatggggtttctccatgttggtcatgctggtgttgaactcctgacctcaggtgatccgcctgcctcggccttccaaagtgttgggattataggcatgagccaccatgcccggctaaagcccagtctctttattacaccatgtggattcctgactgctttatgtgggacccaatccttgtcacctccagcaacccctctgcttgtcctgcatggatttgcctgcctggaagtagggctgtgcccgtgcctgtgcccgaagcctccctcctgaagcaggctggactcacgcattgaggtctgcgcctttctccagcaggtagtagatgcaggggagggccacggtggtgttgtccctgtggatgacgaggtgcaggggtgtctggctattgttggtcagcaggtccacgggaaacttgtactcctctaccaggacctgcaggcatgcaagcttgccccattgggcggcgaagtggatggcagtgaagccctgtgaggttcagagcaggcaggaggaggctgagtgggactgaggtcccagggtccacaatttatataaatttattggggttaccttcactttcttccctgtgtccccaggaatgctcacacccttttgctaattaaccagtgtgtgttcatcagcccacccaacctccctgcccccaaaatggtccttccacagccagaagatgagttaaattaggaagatctacccagaaaaggatatctcttctccaggtgaccactccgagcagcgtagcgggagagggacctcggtctttgccccaacactcaagaccttaccttgtcgtcggtggggatttccctgaggctctggttcagacagaatcgcagccattccacgttgcccacagccgctgcgaacagctggtagtagctcccgatcgccgtctggtcgattgccgtctggtcggactccttgctggggctggggtcagcgcggggcggggtgagcgaggcagggcggcgcggcctggcgagggcagtcgcctgcgcactgaggtggtctgcgaggtcgggcaggggctggctggagggcggggcagtggggaagcgactctgggccacggcccgggcacctctcgggaggcgatccctggcccccgcctggctggtgggcggggcagtggggaagcgactctgggccacggcctaggcacctctcgggaggcgatccctggccccagcctgtctctgctggcttctcgggccgcagcctccgcccccgcccgctccaggccctgcccaccagggaggcgctgggccgggttctcgctccctgcagccgggacaccttctcccgctacccacctgggctgcttggactccgcgtcagtccaggtggccttcaaggagactttgttcgcctgctgcatggagccacttggagttggctgcggccgagcacctctcccttctcccctttctgagtgccagcttccggagcccgcccgccgagcggtgctgcccgcggaggccatcgcggggctggaactcggacccgggccgggcgggctactcacacacccgccggcgccccgcccccgggggccactccttgccagctggccgcggtttcccggccccttccaggccgctagggttcggctgcctctctagctggaggggcagagcccgggggcctccggggaccctgcccgcctgccgctccccacccgccgctctgctcccggtctgagccaaaacccccactcaacctcccagtcctgctgcccgggaaactcagcatcaaacacacaaacaacaaagacacttggcttttgtttccgattatcaaactaataagtagaaaacagaaatattcaatgtggaaattaaaaattaccatcccaccacgcacagaaatcatggtttattgcaatatatatgcatatcatgactattttttgtatctcttttcgtttattaatagcattatattacgagctagcgcccattgtcactccacatactaaacgtacattatgacgcaaccagagcccagcgtcataatggatgtgccattgtttcacatgtgctgccaagaacgaaatggctcaactctggttgttttcttagaatggattcctgggagtcgaatcactaggtgaaagggaatgaatatttttcagctgtcaatatgggcttgcagactgccttccaggaaggttattattcacttccacttccacctgcagtgaagcgggtgcgctgcacatcagcagtgtggcttttggcaagttatctgacttagtttctgtgggcggcaagccacccaggtgccaaggcaagagaccgagggcacaagctgttccagtataataaaatatacaaaacaacaagagttatactagatctagatctagatcatagacgtgattatatatgaatatcgttaatcattagtttgtagcaattactctttattccaatattgtaataatcctcgctctataatcataacctaggaaaaaccaggccatagagagataggaaccaaagggacatagtgagaagtgaccagaagacaagagtgcgagccttctgttatgtccggacagggccaccagagggctccttgatctagcggtaatgccagcgtctgggaagacgccggttaccaagtggaccgtggtctggcggaccctggtctggcggaccgtggtctagcggtagcatcaatgcaaaggaaaagcacccgctacttagcagaccgggaaagggagtctccctttcccagggggagtttagagaagactttactccaccaccttttgtggagggcttgacatcagtcaggcccgcccacagttatctggaggcctaaacatctccctgtgacgctgtacttcagcggtcacactcctgtttcactttcatgttccatcctgtacatctggctctgccttctagatagcagtagcaaaattagtgaaagtactaaaagtctctgatacacagaaataatggcgtaagctgtcctctctctctctctctctctccctccccctgtccccgcccccacccccacccacctcggctgccaagcagggaagggccccctgtccggtggacacgtgactcacgtgaccttatcaatcattggagatgactcacactccttaccctgccccttttgccttgtatccaataaataacagcacagccaggcattcggggccactaccgatctctgccctcttggtggtagtggtcccccgggcccagctgtcttttcttttatctctttgtcttgtgtctttatttctacaatctctcatctccgcacacggggagaaaaacccacccaccctgtggggctggtccctacaagttgctacagcagcaaaatggggataatagcacctactttacaaggaatgaaggaatgcaaacaatgagaacagtgctagcagagaagcactacctgtgaatctgctattactcaaagaagaactattcaaaccattgctagcatcagatattaggattttaagtaaatgttcactaatttggtagtggaaatgatgttctaatgtggctctttgattaccaacaagggttaaacatttaattatcagtggttttgtcttctaggaattcttttactcacatggttctttgagggccttaatgtgtttcttactgatctgtaaaacttattagcatagtgaccctttat

SEQ ID NO: 2567 - DNA, 4001 bp, Homo sapiens
caaatccacagtgacaagaattatattcagagtgtgatatacaaagcagaggaggatacaaaagagatggcatgatactgccttcaaggaatttacactctaatagtcatgaaataaacagtacagcaatcacttaatgcaataaacatgcttctgaaaacatgtacgtaaaatgaatgtaaataaaataaaattggccaggtgcagcggctcacgcttgtaatcccagcactttgggaggccaaggcagacggatcatgaagtcaggagatcaagaccatcctggctaacacggtgaaaccccgtctctactaaaaatacaaaaaattaaccgggtgtggtggcggatgcctgtagtcccagctacttgggaggctgaggcaggagaacggcatgaaccggggaggcggagcttgcagtgagccgagatcacaccactgcactccagcctgggcaacagaacgagactctgtctcaaaaaagatgaagaaaaataaaataaataaaacgaatgtaaataaaaactggccctgggcattctggaaaagaatccgatgagggtaaaagccttggggtcggttaaacttctccaacgtagccctctcccgagatccagcgtctgcaagtcctccccactggctgagtttgagtcttgtctaatttaaattagccaaacagattgtttaggtgaatcctaaagaaaataatttctgttcagtttaaaattatttttcactgcacaaaaactacttcccaaatgctttttaaagtttacatttccaattagtgtacagtttgtctaaggagaggtgcaagaaaagatgtagccaaactaaagttacacaaaacaggaccgacacggtggctcatgcctgtaatctcagcactttgggaggctgacccaggcggatcacttgaggccaggagtttgagaccagcctggccaacatggtgaaaccccgtctctactaaaaatacaataattagccgggcatggtggtgcgggcctgtagtcccagctactcgggaggctgaggcaggagaatcacttgaacccgggagacggagattgcagtgggtggagatcgtgccactgcactttagcctgggcgacagagcgagactctcaaaaaataaagctatacgaaacaaataataaattgtttcatattcagcaaaaaggaataatttgagtggggcctggttaaatgtggaatacatctgagaattttatctctacaaagtttaaagtgtttttgaagggaatggtgttaacgtgaggagatacatgcaatggcaaaaagacttgtttgaaaacaagggctgtgctggacattacccagagattaagtgaatttaatcaagcagaaagataaatcaattggcctcctaagctcgggaataccaataagaatgtgttccctgaacgggcaatacgctgtaaggagccctgtcacgtttcacacgaaaccttccaggatacctgaacaggaagtacgcggagcccgggccagagcctccccaggcgcgtggctcaccaggctcaggccctgaaagaccggagcatccgcgctgaggtcaaacagggagatcgacgcaggagccggggctgcatctggagccggcgacatggctgagcagaaattatttagcagcagctcctggagtagaaagcgtgtaagaaacagggctcctgcaaacgagatcctactgctgcgtctcctgcctgcctgacttggtttctcctgcaccgcaagacttctcgtctctcatcctgctaccaactgtgagatgaataccttggcccccgtccactttctcaaacccccagtctcagcccacaaaagaatgaaataggcattcggctcccaaatcgagtccaacagagttaaaaatcactgagcttgcctagccgaactttcttcgttacccatgcgaccagcaacaactggcccgcgtaaactcgcccacgcccttagaagacgcaccaaacgtcccgggagctgagcggctcgcaagtcctcaggtcgattgccggatttctgcaacacaacaatccccgtcactacggagcagcgaagaggacaaccggcggcgtccgcacctgagccccgccccacgtagagcacactattgggccgctgactgtccaagacccgcctcgagactttagtcccgtccctgaagccgagaattggccgttgtgtctccgccccccgtgcttattggccagcctggctgcgggtgacagtgagtggcagacacccggcctagcgccgcgggtcgcgccgagccgagccgagccgagcggagccggcggagcctctggaatcacccgggtcgctgttcctgaggtaagacgtgagaccggttattggaatcccaggccccgtgtctggccttgcccaggggtgcctgcggagccctaagtgagctcgcggcgggtaacggaggaaggggcgccgccggcggggcgggggcgcgcagccggaatgttttgattgctggcgcgcgcagacgggggcgcgcgcgggcgccggggccgcgcgcgaggttgtccgctgttgggagctgccagcccttggcctggggccgggcgaccctggggcgaggtggactccggtccacggtcgccgcggctgggtgtggggaggcaagccaacccacccgggctatcagctgtaaggctgactcgatccctgcaacatccgcaggaacccctgagcccaggcccagccggccggggctccacgggccctggtccacactgaccctgtgagtggtgacttccctgaggggcagggctctcactagcccagggaatcccaccggggccaggctgggccaagatccacggcccccaggggctgcacggacaggtgagtaccacctcgaccatgcctggcttacaggacctagggaacccacaaattcacctaggatcgggggtctacactgacccagtcaaggtttcccatccagaaggtttgctcaccggctggatctttggtgctagggaagtaagagaaggggttgaccagaaaggtcctcttcaggaaagactcttgaggttttgtggaccctgagaagtatgtcatttctgaggctaaggtagggcaatggagaaatagtccagaggcgcccctggcctcaggtctgtacccactcattctccatggggtccctaagttacttcttgagaccctggagttggaagagtggcccggtttagcacagccagaggaagtgctcgtagtcctgggctggaagggtgcttcttccccactgcagccttcctgccccatgcttggcctcctcttggtggggtgtggatggctgggagggttgggttcctttttatccccactgcccactctctggggcctgacatcttctcctccagcagctgcagagcatcgagggctggagaggagcacatactgtccatggagctggtagggccatgtgcttttctcaaacatttgtttgtgaagtgcttccaaactgttagtctcttgggagaccagggttcccaggatgggcgggggagggactcttctgtccgttaaatagaagatgaaacagcccccaacaaagggacagattctggctttgggccaggaaagcagcagtagacacccagactggccagagttaaggctcccccagccctgagcttactgcctttcttgtgtcactactcctctgcctctgagccaaggaggctggtagtggacaaagcccaagggtactttctccttttggcagtaggcagggcagcccatgggcagcagctggaactgaatcagggtctcttcttcctccttattggcaggtggtcaaggtggacagggggcggtggtgatggcgcagtttgacactgaataccagcgcctagaggcctcctatagtgattcacccccaggggaggaggacctgttggtgcacgtcgccgaggggagcaagtgtgagttcttggatatgacagccatagggagagt

SEQ ID NO: 2568 - DNA, 4001 bp, Homo sapiens
acttaatgcaataaacatgcttctgaaaacatgtacgtaaaatgaatgtaaataaaataaaattggccaggtgcagcggctcacgcttgtaatcccagcactttgggaggccaaggcagacggatcatgaagtcaggagatcaagaccatcctggctaacacggtgaaaccccgtctctactaaaaatacaaaaaattaaccgggtgtggtggcggatgcctgtagtcccagctacttgggaggctgaggcaggagaacggcatgaaccggggaggcggagcttgcagtgagccgagatcacaccactgcactccagcctgggcaacagaacgagactctgtctcaaaaaagatgaagaaaaataaaataaataaaacgaatgtaaataaaaactggccctgggcattctggaaaagaatccgatgagggtaaaagccttggggtcggttaaacttctccaacgtagccctctcccgagatccagcgtctgcaagtcctccccactggctgagtttgagtcttgtctaatttaaattagccaaacagattgtttaggtgaatcctaaagaaaataatttctgttcagtttaaaattatttttcactgcacaaaaactacttcccaaatgctttttaaagtttacatttccaattagtgtacagtttgtctaaggagaggtgcaagaaaagatgtagccaaactaaagttacacaaaacaggaccgacacggtggctcatgcctgtaatctcagcactttgggaggctgacccaggcggatcacttgaggccaggagtttgagaccagcctggccaacatggtgaaaccccgtctctactaaaaatacaataattagccgggcatggtggtgcgggcctgtagtcccagctactcgggaggctgaggcaggagaatcacttgaacccgggagacggagattgcagtgggtggagatcgtgccactgcactttagcctgggcgacagagcgagactctcaaaaaataaagctatacgaaacaaataataaattgtttcatattcagcaaaaaggaataatttgagtggggcctggttaaatgtggaatacatctgagaattttatctctacaaagtttaaagtgtttttgaagggaatggtgttaacgtgaggagatacatgcaatggcaaaaagacttgtttgaaaacaagggctgtgctggacattacccagagattaagtgaatttaatcaagcagaaagataaatcaattggcctcctaagctcgggaataccaataagaatgtgttccctgaacgggcaatacgctgtaaggagccctgtcacgtttcacacgaaaccttccaggatacctgaacaggaagtacgcggagcccgggccagagcctccccaggcgcgtggctcaccaggctcaggccctgaaagaccggagcatccgcgctgaggtcaaacagggagatcgacgcaggagccggggctgcatctggagccggcgacatggctgagcagaaattatttagcagcagctcctggagtagaaagcgtgtaagaaacagggctcctgcaaacgagatcctactgctgcgtctcctgcctgcctgacttggtttctcctgcaccgcaagacttctcgtctctcatcctgctaccaactgtgagatgaataccttggcccccgtccactttctcaaacccccagtctcagcccacaaaagaatgaaataggcattcggctcccaaatcgagtccaacagagttaaaaatcactgagcttgcctagccgaactttcttcgttacccatgcgaccagcaacaactggcccgcgtaaactcgcccacgcccttagaagacgcaccaaacgtcccgggagctgagcggctcgcaagtcctcaggtcgattgccggatttctgcaacacaacaatccccgtcactacggagcagcgaagaggacaaccggcggcgtccgcacctgagccccgccccacgtagagcacactattgggccgctgactgtccaagacccgcctcgagactttagtcccgtccctgaagccgagaattggccgttgtgtctccgccccccgtgcttattggccagcctggctgcgggtgacagtgagtggcagacacccggcctagcgccgcgggtcgcgccgagccgagccgagccgagcggagccggcggagcctctggaatcacccgggtcgctgttcctgaggtaagacgtgagaccggttattggaatcccaggccccgtgtctggccttgcccaggggtgcctgcggagccctaagtgagctcgcggcgggtaacggaggaaggggcgccgccggcggggcgggggcgcgcagccggaatgttttgattgctggcgcgcgcagacgggggcgcgcgcgggcgccggggccgcgcgcgaggttgtccgctgttgggagctgccagcccttggcctggggccgggcgaccctggggcgaggtggactccggtccacggtcgccgcggctgggtgtggggaggcaagccaacccacccgggctatcagctgtaaggctgactcgatccctgcaacatccgcaggaacccctgagcccaggcccagccggccggggctccacgggccctggtccacactgaccctgtgagtggtgacttccctgaggggcagggctctcactagcccagggaatcccaccggggccaggctgggccaagatccacggcccccaggggctgcacggacaggtgagtaccacctcgaccatgcctggcttacaggacctagggaacccacaaattcacctaggatcgggggtctacactgacccagtcaaggtttcccatccagaaggtttgctcaccggctggatctttggtgctagggaagtaagagaaggggttgaccagaaaggtcctcttcaggaaagactcttgaggttttgtggaccctgagaagtatgtcatttctgaggctaaggtagggcaatggagaaatagtccagaggcgcccctggcctcaggtctgtacccactcattctccatggggtccctaagttacttcttgagaccctggagttggaagagtggcccggtttagcacagccagaggaagtgctcgtagtcctgggctggaagggtgcttcttccccactgcagccttcctgccccatgcttggcctcctcttggtggggtgtggatggctgggagggttgggttcctttttatccccactgcccactctctggggcctgacatcttctcctccagcagctgcagagcatcgagggctggagaggagcacatactgtccatggagctggtagggccatgtgcttttctcaaacatttgtttgtgaagtgcttccaaactgttagtctcttgggagaccagggttcccaggatgggcgggggagggactcttctgtccgttaaatagaagatgaaacagcccccaacaaagggacagattctggctttgggccaggaaagcagcagtagacacccagactggccagagttaaggctcccccagccctgagcttactgcctttcttgtgtcactactcctctgcctctgagccaaggaggctggtagtggacaaagcccaagggtactttctccttttggcagtaggcagggcagcccatgggcagcagctggaactgaatcagggtctcttcttcctccttattggcaggtggtcaaggtggacagggggcggtggtgatggcgcagtttgacactgaataccagcgcctagaggcctcctatagtgattcacccccaggggaggaggacctgttggtgcacgtcgccgaggggagcaagtgtgagttcttggatatgacagccatagggagagttgatggaagaacatggagagagcaaggggcttgtgttctcccagggctctgacatctctgttcctatcccacagcaccttggcaccatattgaaaaccttgacctcttcttctctcgaatatcctttgtgt

SEQ ID NO: 2569 - DNA, 4001 bp, Homo sapiens
tgctgctgtggccctgcactgactgggactgacaccacagggagggccccgccctggtcttgcctttgcctggccaggccccccttaccctcctggagctcctgtctgaacatcagtgggttctgctcggttctccacagccaggccaggccaggagagcggtgatctgactgtgtgtgttgaggactgggtggcgagggcttgggggttgccgggggatgcaggagaaacacggtgatgcccatccacccccagaggctctgggcccagggtgggggcatagacccaggcaggggaggacctctcaagtcgcaccacagtctcctgggtgctgttacctccgaggcgtgggctgtgctcccgtaagagcccctcttctctgcctcaggggggctcacatcgatcaggacggtgctgtcctcttcctgggcccgtcgccgcagcatcctgctcctgcacccagcaaggccgggtggggatgggggtcagagaggggatgggtgagacccgttcctggggccaccacactgcctgcagtgagctcactttacagactcgactcggagtagaatggggctgggctggctcggcagactctcctggccatgagcacatggagaaccccctagccagccacgagctccaggaagaaaccagtgccggggcgggagcgtctggcaggcctggcacagcaggcgtctgtctgtccatccagtgagtgcccgtgtcccccagccctgaatgccgtccactctgcctgggtactcagtggagcctgagaaggcccagaaaggtgggcctggagtacagacacctctccctctcttatccgtagggtggagccatgtgagccagggacaggaaacccctcaagtcgcctgccttcgctcatggcctgaggacccagtgccaggacccataggccctgagctccccagcaaggcgggcctgatggagcccggcctcacaactcttgggggtcccagcttcctcccgcaccttcgccccgggggtctctctctgtgggaggacaggtgccgtggctcctagtcttgggctggcaaaacggggccaggagcacgacatctgtggccctggaaggagagggttcgagctggggctggcatttggagctgcgacgatgaccggagggtgtgaccatggaggcgccgcaggaggtcggaggggcagccttctagttctacccttcacttcacattagcggaggcccagagggacagagactgagcctgggccgcctgcacctgcctaaccctgaagcccgagccaggtctcagtgttaggactcggccccggccccaggctgggagcctcactacggactgtggggtgttcctggaggaaagtccccgaggagtttcggccacccagcagcccctcatgcccccatccttctgtggtgggcaggcgggcccctcctcagagctctctgcagaaagaatggggatgccccccaccccaacgaagggacctgctccatgggggagcccctgggcaggcaggaagccaaccccagctgggtgtaccccgtccagagccgcactgagtgtgtgtccctcctcgtgccccaaggggctttggggaccagggcgggccctggcactgcctccccacaggccagggtgtgtgaaagtcccggtgggctggggtgccgccctgcctccctagagtccaacgctccaccttctccctgtggcccacacgtctaggctgggtccccacctggcacagtggcttccggaagaggtctcggaggtcatggcccacctctcagcgtgagcctggtctcggcagtagagtcccgtcctcactgcgggacagagggtggggaggggtggcccttggagccccgcccaggcagtggcagccattcgcatgccctcaccttgcctgcaagtgggccaggaagcaggcaggggaggtgcccagcacagctggccagggcaaggcttcccggctcctggagcaggatctatctttgtttaaatagggggtgtggggctcagagctgcagacagaggcagcccacttggctgggctttcacacacccgcatgcaaatgctgccgtcctcctgggaaccttatttgcttagagatttcagggctggcatcagctgtcatagttgctgccttggagggtctcgaggaggtgggattccacaggaacagccacaagtgccacctctgctggaagccttgccaggcagacctcgtaagctctgtttatgtggggggaaactgaggctccttgaggttacgtagcatgtgctgagtggtgggccagggtttcacccgggggctggggagattgggagacccagatcacactgctggctctgctaatgcctgaggggtgacctcaggcacatcccatgctcagggccccatctgcaaaaggacaggaggggtcctagccttcctcccatcctttccgccctcctcctcgtcctcattctcctcctagccctcctctttctcctcctagccctcctccccctcctcctttctccccctcctcctatcctttctccccaccttccctctcctccttctcctcctattgtttctcccccctactcctccctctccttctcctcctatccgttctcccctctccctctcctcctatcatttctccccccaactcctcctcctcctcctctttctccccactccccctcctcctatcgtttctccccctcccccccacttctccctctcctcttccttctcctcctttctccccactcccctcctcctgtttctccccctccccccacttctccctctcctcctccttctcctcctatcctttctccccgcccctcctcttcccctctccctccccctccccctttcctccttggtgcctggcagtgtctgagaacctaccacccgtgctcctcgccctccatgcacaactgcactggggagccccaagctcagcttgctgttccaggtgcccccttctgcctgttgaaatccctccaggcggaccctcatcctggctgcagctttcccttatacctatgcccctctgtgcttggcacctcccaaggggccctgttcttggacctgtgttgtgcctcggaacagcgggaaggccctgcaggccgggttccctgtcagcaccagcagagcctgggcggcaggaccttggggccctgggcctcagggcatctgcatgagaggtctctgcttggccaagctcagcctgcaggcgcctgaggtggatccctggacgagggctggactggggaagtgctccagaaaccaggaaaggagtcgggaggcaggaggggagggaggatgagcggggcaccatctccccaagacctgtggagggtggcctcagcctgccatgggcactctgcaggggaggcaagacgaagcgtttcctcacctggatgcaactgtaggctcttactctgctcagtcattggccaaggaccctcccaggaagacatgccacctcccaggagctcctggctctctgctcttggtgacaaagtggctctggtggcctcagggctgtctactcaagagcttcagggccggctgctggaggtgaccacaccccagtgggagccctttcagcgacagtgcacgcacaacacctaaagggggttcggccctgaggagtgtctttccatttttacttcatacaactctgtttgggtgggtggttttttcaagttgtgttacttctgagggaaaggaaggaagggagggagggagaaaagccgcaaccagcacagggggcccgccaggttccaggccttgggaagagcccaggcccagaatctgctgcaccatctttctttggctgtaacatttttttttttgagacggagtctcgctctgtcgcccaggctggagtgcaatggcgccatctcggctcactgcaagctctgcctcccgggttcatgccattctcctggctcagcctccggagtagctgggactacaggcgcccgcc

SEQ ID NO: 2570 - DNA, 4001 bp, Homo sapiens
catatctctatagtatctctacagtcatccattcagagacatggtgattctgtccccctttttttttttttttagattttcctgaatatcattctgaattggctttttaaaaaagcacggaggaggagcacctccgactgttttcatgcactgtctctaagtctgtgagctgatgcttccagccactagaagtaacaaaagaaattccattccttagcactggagcatattttcagtatccaccttctcataaatctgcagaaaagaaatctcacttttcatccaaagaatctggagttcaaaacagcctttacggaaaaatcaaactccaggggcaactgcaaagcacatttggtgtctagctagccagcttattttgcaggactctttttccaactcctaaatactttccagtctgtgaaatccatctccccaccactgtaacagcaaagcgcctctcctggcactggagagctcactcagttttaatgagcacggatcttctgtgaggggctttttatcgttgaagctggttttcagcagatagcatgaagcttccttgggtgactgtggcttggcaaacttatgcggatttgggaagtgcttcattggtcagaattcagctctcccttgagcaaatcctaaagcctaaccactttttgcaaggaaaccagggctcctgcacctccctggtagcccaccagtcaaatggccaagagcttgaattcactacatctggggtactcaagtcgaaggggagggacatttggcaatgtctggaggcatttttagttgtcaccactaataaggaaggagtggggggcgggggatgttactggcatccagtgggcagaggccaaggatgctgctaaacatcctacaacgcgcaggacagcccccaccacaaagaattaccaggtttcaatctcagaagtgccaaggttaagaaaccctgcctttcattctcactcagtgcccggtgagaagtatgcattacatgattaggagcaaagataatgccttccgtgggacagcgtttcaaaacaaaacaaaaaaacaaaaacaaaaacaaaatgcgacgattggctttaaaatgcccaagcctctaactttaggagtgcctgtgcctgcaagttctgcctttggtaagcaagcctttcccaccaacacgggagggagtcacagaaactcagcaagacaatagcatcctccaagccccttgcctgctcctgggacacagaaagcaagacagaaaagaagtctgtccccttccgagcaagcggcgtcgcctcggctgcgggctctggagccgaggctgggaggagcgcgccccaacaaaggcgcagcactccgccgccgcctgccgcgcggtccctctgtggccctggagatgcgctcctgtccccaggcgaccctgccaacgagcccggcccggggcgaaagcgttttcgcccgcttagcctggggtgggggggacaactcgcggcacttacttgtccaaaatgaagtacaggtcaaatccgccgtagcaggctggacccccatcctccctgcgtcccccttgcccggcgcagatgagcaccagagtggccaaagagagccactggaagccgatgccgagggctctccgctccgccgtggccatggcccgcagcccggggagagcagggtccgctccttcccacgctccgcgaactcgccacgaccctcagggacgcgccatccgcgggcccttcctcgcgggtcctttattccccctcgctccctcgcaactccccggaagcaattgtctggaggagttcaaggtttcccctctggtttccgctccgatgctgtttctgggtttcgggtttcaaggatcccaatcctgtcctccgcttcttttaaaggggagggctgcctcggtccggggccgccgggcagctcccgaggccgcgccgagcttttgcaatggaaggagttccgtcccgacggttctttgtcccagattttaaatatgatgggggggggggggggtttcaaattgttcttggtgggggcagtgctttgccttctctccttcctctctgcccccctttcgcgttcttacggggaagaaagttcaaaggctgccaccttgtggacaaaggcggcgaaagcacgcgtgggacccgcgggagtgcgtcgggggcgggggcgcttccaggcttcgcgtataaatttccttgtccttaccattctcatgtgagctgtgcgtgttttcttactccttccttcttcccacgcactttccctttctttttccgtgaccgcctctccattctctgtagtccttctattccttcttttccttccctatcctgcatcttttgataaggtcactaaacattggatgagaatttgtttcctccaaccacggtgactccggctccccaggctaggacctttgcaaacaaaccattgtgcagatgaagtaggggaaaaacgggacctttgtggtatgagtcatcagagtgaccttacatggtcttagtctgtctggaccataaaagagactgttggggtccggtctgaaaccatcacaaacaaccccacagagtgtggtacttagggctgctcccggcatggaacagctgagccttctagatggccaccatctccatcttttagggattctatgataatagttcttcttttcagcctgtgaactttgacattttctctctatctttgatttaggatggaggaagtaaacagcttacaagagtagagacgctccaagcagtttggaattggcagggaagttccgtgctagcctctctaaattggagaatcagcctctgagccccagttccgagtggtaccccagttctagcttcctattgtcttccgctctgggagccctcagtgcatatgcatgtactgttttcccaggattcttcctccagacacacatattcccctccacttgtgtgcctcccagacccttataccccaatgtgacagtccatggtggtttcccccaacatgtgtaccatggaatcttagtgtcttggaatgctccactaaccaataatcatgttgtcaaatcagccttgaagatttgtcatgcgtagcactgacctgcctccaaaatgaacccagtgtttctcacctcctggaattcacaccccttccaccttgggtgagactgacctgtgagtaattaagaagatggtgtgtggcttctgaggataggccatgagagatgttgtggtttttcccttctctcttggatcactcactgtaggagagcccactgccatgtcgtgagaacacacaagcagccccaaggaggggtccgtgtggtaaggaactgagacccctgctggcagccaacaccactttgccaacattgtgagtgacccatcttggacataggttcctgacatcctgtgaagccttcagctgactgcagccctgtctgacatcttgactgcaacctcatgagagatcccaaacaagaactacccagctaagccattccctgattcctgatccacagaaataagcgaatttttattagtgttttaagtctctaagtttgggggcaattttaaatataataaaagataactaatatatgcctagtatcatattaaagccttgagaatttctgtaggaaaaaaattgctgaactgtgtttcccagacttacttgaccatgaaactgttgtttcatagataaaatgtattaaacccatactttgggaattattgctctcaggaaaaaaataattggagggagattaaaataccctaaccatccaagtcttcctcttccatgtcttctttctcctcaaaggattgaaaacccatgctgaccccactgcagctcgatgacttgaaagacagtgaggaaatctatagaaatcagatgggtaagggaaagcagaaacactggtgggagctggtaagagaagaaaagggatatgacaatgtgatggagagagtgtttatgggattggcaaggaataggaaaga

SEQ ID NO: 2571 - DNA, 4001 bp, Homo sapiens
cagataataaatgagctcaggaaaacaaatgagtggctggacataaacaaagaaacatgccactggacatgagcctggggatgaccaggaggctcaccctttaaacaccaaggcctggagtggtacatggcttgactgtgcgggttactctctaaattgcttgcagagaaacattatccctaaccaaatgcaagaacatctaggagggaaattcacagaagcccttgatccagtagttgtgtgtctgtgcctgtctatgtgtgggtgggggcaggggtgtacttgtgtctctatcttcaatcaacagaaatctgacatgagctgaatgaggatggccttggcctgatagggctctggagagtcagcagctcttgggtcatggggttatccgttttcttatccctgtccacttcctctcctacttgctcttccacctgtgtctgagaattccctggcaactaaaaacctagggtttggccgctgggcacggtggctcatgcctgtaatcccagcactttgggaggctaaggcaggtggatcacctgaggtcaggagttcaagaccagcctgaccaacatgttaaaaccccatctctactaaaaatacaaaaattagccaggcgtgttggcacacgcctgtagtcccagctactcgggaggctgaggcaggagaatctcttgaacccagaaggcggaggttgcagtgagcagagatcatatcactgcgctccagcctgggcaacagagcaagactccatctcaaaaaaaaaaatctagggtttggttatcaatagagttaccagttacctcctgaatagctgagactataggcacgtggtggcatgcacctgtagtctcagctactcaggaggttgaggtgggtgaaacacctgagcctgggaggcagagtgaactgtatccagccactgcactccagcctgggctacaggagtgagacctcgtctcaaaacaaaacaaaacaaaaaattaaagggcaaacagtagggagtggaagggggtggtggggtgtcatggactggtgggcaggagaatggataacttggagagggacaccttatctatccttcccactgtcagcaggagagagcagatgcccagttccatgtaaagcacgagttatgcaggacccactctgctctgtcagctcagaagacttgcattgccccgggggtcacttctgccggtaaatggttgagaagccttcctccttggcaccaaagtctccagctggtcaaagtcatgacaaaatgctgagactgcgccaccagccaactcaagtcatggaccctataataatcagactccgatgtgccgggcactgtgccgagggcattagacacacgagaaggtaagaaagtggtaaggatctaggagaaaggagtaagtttcttaaatggagtaaagaattaaaaagtaaactgtaagaggtgttaggaggagttagctacaggcaagattatctcggtcctttctttttgatgcaaagcctagcacatggactgaataaataactgccgtggtctctgacccgcgtcctgagccgtgtaagcggccctggatgtcctggatggtgccagcggttaagcaccgcgctcgcctccctctcgcccacccggagcgagtccagggcccgctggccccctccaccctgtggccgcccgggcttgcccgcaagccggcggcgagcacccactctggggtgcagcgcggagccgggcatccccgcgagacgctcccgggccacgctccccgttccctgagcccaggacccccggcccggagcccctttacccctcgtaccgaggccgggctgcgctcctcctctgcggctgcggaggtcacaccctactcagggccagacagcgggtcttatccgggacggatccgccccactgtggggtggagactgagcccaagttcctggttgttcctctgcccacgagaccggaaaatccctctctaggggaagcgcacctggggccccgggccgggacggccgcgccaggagctctcggagaggcaggcctcgacccccggcgggtccgccctccacacgtgcctgctccccaggcccgcccggtcccccggcctcgccccctgcccggattggacagtgtccccagtatcgccagccccgctcctggccgcgcagggtgggagcagttggattcttggggtcccgtttcccgggcgctccacaccctcggagggccgagcccgggccacctcgccagttcctccctgcgcctgccgcgcccagctccgcgccaagccggagtcccgcggcaaatccgcgcttccccccacctcgggaaaccgttcgtctcccaacggcaggtcgtgccgagcccgtggccggaaaagtagaaagtgaaatctgaaggatacatttcattcccctctttcacatgaaaacacacattcccaaaagtttccagcacttccctcttccctgtgcgcccagcaggccaggaaagctttggagtaggagttaggagcagccccggatctttgtactcctgtgagtgactaaagtttagacactgtccgtagctcccaggttcggcttggcgcggcgctcatcccttgtaatagttctgtgttttcatatctgcttcccctgctggacgcagcctcttgaagacaccaactagggctaggtcgtctttgcacccatgcccagcaccgatttcgccacgtagtgaatgcttgcagaatgaatccgttgagtctataggcaaattcagtttttttaaaaaacagagaatagcccgtttggggagtgttttccatccgacacatcaaaatctaagtggttaatggcacccttaaagctggagaggtaacattaaattatttcattaagatgtaattttaaaaggtggtttaatatggtttagagcacgggttttaggatcagactgatttggatactaaaactggttctgcctcttttatctgcatatgataacttaaaaaattaaggctgggcacagtggctcatgcctgtaatcccagcactttgggaggccagggcaagtggatcactttagcccaggagttcgagataagcctggccaatgtggtgaaatcccatctcaaaaaaaaaaaaaaaaaaaacatatatatagccgggtgtggtggcatgcgcctgtagtcccagctattcagtcggatgaggtgggataaacacccaagcccgggaggcagaggctcagtaagctgagattgcgccactgcacgccagcctgggcgacagagtgagacattgtctaaaaaaaaaaaaaaaaaaaaagaggaagaaagaaaagaaaaagaaagaaaaaaagaaaagaaaacaaaaaataaataaataattagccgggtgcatagccacgcctgtagtcccagctactagccaggctgaagcaggaggatcactctaaacccaggagttcaatgttgctgtgagctatgactgcaccactgcactccagcctgggcgacagggtgagaccttgtctcaaaacaaaaacaaaaacaaaaacaaaacaaaacaaaaaattaaaggtcaaacagtaggaaaaaaaatgaaatacagataattcatttcttaagcaagattagagagacactgcatcccttacaagcaacaattaggccaggtgaggtggctcagactgtaatcccaacactttgggaggcccaggtggttgcttgaggctaggagtttgggagattatcctgggctacatggcgaaaacctgtccctaaaaaagaaaaagaaaaagaaagaaaaaattaagctacatgaaaaaaataaagtttaggaatgaagtagatgcgttggcaccccgcgtaaataacctttactaggtgggtgcatccagccccaggtcactgccccttcattgcccccatctgctgacatctgcgctcagaccagactgaggaagccatggccagaggctaacttttttagcttataaaaggccaggaata

SEQ ID NO: 2572 - DNA, 4001 bp, Homo sapiens
catgcacgcaaggacttgttatttctgtgctctgctgtatctcataagcctggaacactgactggcatacggtaggcccttaacaaataagtggattgaatgctcatgatcactctttatgaagtaagtggtatgatccccttttaacagagaaactgggcctctgagaggttaggttttctcaatcagaattagaattggaattgaagacttgtttgtctaaacaacaaagccagtgttgtgtttactataccattctattatgcaaaagaagaaaaaaatgacataatgtcaatcatctcaccccattgtcatatttcaccctcacagcagtcctgtgaaggggtcctaatgacccttacagatcaggaaaaactagctcatcttatccaatgtagaacccaggcagcaggggcagacaaagtttttgaggggcctaatgtacaatttgggggatcctctttaagaaacataatacaaaaccacaaatgaaattaggctcagggtcttagaacaggcctcacaactagggcctggtgcttcacactggttagcttccaggggaggcagctggtgcccgtcgggaaaagtgttgtggctgcccttagccagaagcagtggtcacaggtggctctgaatgaaccggcaccaacacgagcaccagggaaatcaggtgccactgctcttgcttggttgttagctctgtttttgttgtttttaagaaataggatctcactcttttgtccaagctggagtgcagtggtgtgatcacagctcactgtaaccttgaactcctagactcaagcaatcctccttcaccctccccagtagctgggctgcaggcacgcaccaccacaccggtttttttttgttgttgttgttttgttttgtttggttttttttttgtagagacaaggtttcgccatgttgcccaggctaaactcgaactcctgggctcaagcaatcctcctgcctcggtctcccaaagtgcagattacaggcgtgagccacagctctcaagggagctccttaaccttcctgcctcagtttcctccttcagagtaatgtcaatgaaactggaacattaagagtgagcagagttgatgctcacattaaggggggtgttttaaaggatgcccagggggctttgcttctcccaaacatcggacactgcctggaactgtccctcgggttgcgcagagcgagcccagcttctgaggcgacagagcccgcacccagcagtggaacccgtgaggaccttggagcccccagagcctgacttgggttcagctctgccaggaactagctgtgactttggaaagtaacgatttcttcatctgagaaacgatgggggtggtttgaatgtgttcgtctctacggtcttgtcccgaatctaagttgctctctgcgcttccaaacgcaccccgcgagctgaggctcagccatttctgtaggctgctctcagtgtactggggacgttcccgttatcggctgggattgagggaacgaagatctgggagtgctgacccctgatgggcaagaatactttttatcttactgtttagggagggcgtgtggttggaaatcagcttgtgagccttggaaggagaggaaaggggaacataaggaaggtgggggcccaaagatccaggacagtccctgaaaacgcagcctttagctgccccggaggcaggggtgggaatgcgaaggcaaagccgctgttacgggagaaagccagtccgtgcctgagtgccttaaacggcgggcacgaaaggatgggacgaacggcaggggctcctctctgccccggccctggccgcaggtctgggggcagaggaagcccgcgggcgctcaccttgcggccgttcacgtagaagagcagctcggacgcccggtccattgtggtgtccgcgctggttcgagggcccggagcgggaggcggaggttctgggaagtagcgggcacctgggacccggcggcaccgacccgccgagtggggcggggcttgctggagcctaaagtccaacccatccaccccgacggagaaagccttgattaagatccaacgttcctgagctctttgccaggaactcttcccgggacaccagcacgtgtgtgggcgtcactggcgccctctatgtgggcggaaatcatccggcgaagatgaagacgaccccttcatctcctcgccagtggcgcttagcgtctgtgtcacaccctcttgcgtcttagcaaacattgtaagtcctgggacattgcttttgatggtcttatgttactgcatattttaggtggtgttccagctggatttaagtctgggaacattagtaactcccctccaaccaggcctgctgtagtcctggactcttaagtgtaaacaatcatatttattccaactctgcaagagcggatcttagggaaaacaaataggtttacaacttgatcttttagaaatataaggttggtgcaaaagtaattgcggtttttaccatcacttccaatggcaacaactgcaattaattttgcaccaacctaataattactggttttaaaatgaagtgctatcttgatataaacttaaaaattttatcactatttacagtttatccagtaactaaccacaaagtttatctggtaaataagaacagagatgtaaaacatcttggaaaacttaaaaaaaaaaacttggaaaatacagcaaagcataaaaataaagaacacctgtaagcccacaacttagaacttaccaccgttcacttttttagtctatccttactttttgaaacatgtacttttaacacctttaaaaacttaagtgggacaaactagttattttccaggcttttttcacttgccataccttagaacattttcccatgttatttcatttatgtaaacacaaaaattttattgtgaaattttccaaactttgcacataaaagtgaagagtgcaattggcatctacctgcccttcactgagctttaacaatggtcaacgttttggcatactccattttttgtagtatttaaaagccaatcctggacatattttagccctaaatacttcaaaaacacacatacacatccttttagtcagccgcaacaccatttcacgtgtctaaaaaatgtcttttacacttgacttctttgaatcaaacaagagctgtgcaatgtatttgcatgtggtctcatcagtctcttttgatctaaaacagactttttaacactattaacacattgaaaaagaaaccaggtcagttgttctattgaaatgaaccattttttgaatgtggctaattgcttctccctggtattgtttttctactctacttatttcctatgcactaaatattagatctaaagctttgattaaattcaggttcaattttttgggggggagagggcaagaacacttcataggtggtaccatataattaatattgcagcacagcaggaagcatatggtgtctggttgtttcattcgtaatgatgctaacattgatcagtgggttcagagggctattcctttgtaatgaatttctccatcaacatttcacctaattgttttacatccattgttgagcattgcctgagcggtagttttaataggggtttgcaatttttctaattctagcatttcttcttcattcatcaactgggattctttgaataaaactatccatccttcactagagctattgactaaacccctccagcactctgtacccccactgcagtctctcaaagtgtggtactaggacaatcctcggacggactcacctgaagcatctgattaagatgcagatttctgggcccaccgcgttagtggtcagatattgtctaaaaaagttttccatctaggtggaatagagtttgagtagtcatttgaattcaataaactgtgtattgatctcagatatgaacaggatttattactacttattactggaagagtaagtgatctttaaaaccaaattataaaaaccaaattcaaaagagcc

SEQ ID NO: 2573 - DNA, 4001 bp, Homo sapiens
caagatcatgccactgcacttcagcctgggtgacagagcaagattccgtctcgaagaaaaaaaaataataataatgtttcccatttagcaaaaactggtagaaaagctggagaaacttcccacatttctgatcaactcatcacacatatgacaccagcaagaaaaaataaaactccaccacaggtattgtccagaggagcagcttttccttatagaccaaaccttggcccattcctcagcacaaaagcagcctttgatgactcagaaacgcagggccttattccagcctctgttaggcaaattacactggtggactgggcatctgtcaccttgttccttgggaaacttgagcaagccaagaaacctgctccattatttacagcattgtttttgcatcacgctgtatttacaaggaaccctcaacagacaaaaatgatgccgctagtgtgtgcagccaaacctttaacagaaaccagcaactgcggtcttgctggccaggtgctcagcactccccggctctctttgttgatcaactttcttagcccacgtggcccacccactcctgcctccggtgggcccacagggtgcaggtcacttcccttctgcggatttgggaagtggtaacacacttggggaagtgggactagtgacgttcagaccaccacactcttaaaaggctgcccctaaacagcaggcaagagcaagaggagcctgagctatcgcttccacccaagtgcaggtcaccagatctctcatcagcagggctgcggccggcctcagcttccaacctgaccccctatcccctgcccttacacaccccagtccattctccaaccacagccaaactgcacaccatgccgggtgcagtggctcacccctgtaatccctacactttgggaggccgaggcaggcggatcacctgaggtcaggagttcgagaccagcctggccaacatggtgaaaccccgtctctactaaaaatacaaaaattagctgggtgtggtggcacacgcctgtaatccccgttactcgggaggctgaggcaggagaatcgcttgaacccgggaggcagagccgagaccacaccactgcacttcagcctgggcgacagagcgagatcagtctcaaaaaaacaaaagtgcacaacgggtaaggtcagttttcttgctaaaacgtccccgaggtttcccctactcagttggaaccaaaaccaaactccttattttggcctataaaaacccgcctcacctggcagaagcccacctctcctgccacaaacaaggccttctcccctccgctttgctctctctaatccacctgtagcgcccctccaggacctccagcagctagaatgtcatgtccttgaagaggctttgccaaatcaaaagttgccactccacccggttgtatttgagactttacagcgcttcttactttagaagttctcttcattttacttgtatattggacgtgtccctccctccgcatccccctcctggaaggtaagcttcctggagaacaggggctcctcctggtcccccgcgacatccccagcgcccagcaccgagcccggcacagactaagcactcggctaaggcggatcgaatgaatgaatggagccgcggcgccgcggcgccgcgttgccgcaggaatcccgggcaagcgatcctggcgcgtccgcaccgtctggggcagcggggccacagggacgcacggttcgggtggccaggcgggactcggcccgcacccccacccggccgcgcgcccggcccggacgccccaggtgcctccccggagcgcgagcgcccccaccgcctacccgggccggcggttcccccgcactcaccatcgtggctgggccgccgcctcccccgccttgcgagcaaggagcgctggagaagcgagggcgagaggcgagcgctggagccggtgcggctgacaggtgaggcgcccggcttagaccatggctgcttcccacaatgccctggcactgaaagtgtgcagactcctcccagcgcggctgcctcctccctgcacgctcctccccgctgcctcctccccgcgccctcctccccgctccccccgctcctcgccctcctgctctccttctttcttcctttcccctttctcctcccttctcctcctcctcctcctcttccctcctttctgcctctcctctgtaccccctccccgcccccgcctcggctgcagctgttcccgccccgagccggccgcacctggagcgaatgcacctgcgcgcgcgggcgtctgtaccccgacagcccgcagctcggcgcgggtggtcaggcgagagcgcgtggcccgctaggaactccctgcgcggggaactccctgcgcggagaacaccggggacttttcgcgattctgccgcgcgagtgtgtcctgtattccttccgcaaacgtttatcaaacctggcaaagatacttccgatacactcgcagaaagtgccgggggctgccttatcctaagcctcctagggagggagcagttggaagagaaagaactagaagcgttttcttatccccttctgcccccatttcactttttaaaaagtaagctctgcagtctaagggcaaagatcattttaagcaggcccccatttatttatttatttatttatttatttatttatttatttatttatttagagacggagtgtcgctctgtcgccccgtctggagtgcagtggggcgatctcggctccctgcaacctccgcctcctgcgttcagggtgatccacccgcctcggcctcccaaagtgctgggattacaggcatgagccactgcgcccggcagcacgacccccttttaagaagtctctcctaagaagttgtggtgtagaaagttcgttctccaatctctcctccccttgacttttcttaaatctagggcgttgagagtctctaaacccccaagctgtaaacagagttttttcttttttcttttaattatatttaccagatagactagatgtaagcagagtttttaatgcatattcatgtttttgagaaagggagtccactggttttatcaaatagctaaagagatcctagaccctgcaaaagttaagaatcatttcctgggccaggcgtgatggttcatgcctgtaatcccaacactttgggaggcccaggtgggcggatcgcttgagaccagaagttcgagacaagcctggccaacatggtgaaacgccgtctctactaaaaatacaaaatttagctgggcgtggtggcacacgcctgtagtcccagctactagggaggctgaggcaggagagaatcgcttgaacccgggagacaaaggttgcagtgagctgagatcatccagcctaggtaacagagtgagactcagtctgaaaaaaaaaatgtcatttcctgggtggtccctggaaccccaaatcagtgaaagtccttcccaggatgtgttgtgtaccttcctagggatgtaggcccacccaggtgactgaaaatatgggaaactccatccacccctgcattcacactgcaaatattcatcactctaggccaggccctacaacaggagcctgggggacccagctgggaacaaacaggtggtctgtctcctggagcttacgtctcttgtgggacaacacataataaacaagtaaataaaatataagaaattaagatgagtgctaagaaggagatatttgagttcctcggatgggcacagggaagctacattgatttagctgagtggtcaggtaagtgccccctggggaggtgacagaagacttggatgtgagaagccagcgctctgaagaagaagaaaaaaaagtccttctggaaacacttcaaaaaaggcctctatgtgagttaagtgccaggaggcctagaggtgggcaggggccagaggcaatgagtgttctctacattagggcatcactgcaagcccccaggagagccacagcctccagcctcaaagctctcaaacctggacttgtggcattctgccggggg

SEQ ID NO: 2574 - DNA, 4001 bp, Homo sapiens
accttggcaaaagaatctcatccctgaatgttatttcaaaaggaaaagcaaaatcttgaccaggtaattgcccagctttcactccttaccatttttaaaaacagataccaaataggctcatctcacattagcaagtcgacaacacaaagaacaagctacaaataatgaaacggtctgcaatctgttgccatgtttctaaaccacggccctaaaattcatccaccttttaaccagacccacagtactctactggtgacaatttcttaagcaagtcaaaactcgttagtcaccagacatatgattactagattaagcacatactcttaagtttcaaacctacgaatttaaaagaaaaataaagcctccagacagttccttccagtgtttgtataggccaacaaacgatgaaaaaaatagaaatgatgttaaatatttaaataatcacttgtccagtaaaaaaatgaacagcaattgaatatctacttcctcaataaccttaccacatgcacatgtgcatgtacacaacacacaacacacaacacacacacacacacacacacacacacacacccctttaggaccagcttccataatacaatcttaaactaccactcctttccctgctcccagaagggacctaaggcaagtaccaatggttccatttagactctggaagttaaccaggacaacagtacacactccttactccttggtgttagctcactgacacaggtgtctccccggtcccaagagaaaactcctaaagggtagggacccatgttccattcatctttgtatgccccacagtgctagaatctgcaaaatgttctacacagtgagcaccaaacaagaaatgttgaatgttaaagaacaaaatagaaaactagatgtacttaagagatctatagaattccagaatgcaatatgcaaatgttcttattcctaaacctctcccaaagaaggtagagaatatttagctttgtggcattatgtgtccaaaagcttatgtatggactttaaataatgtatgtatggctcaattttctcatctgaacaatgaggataataaaaatagctaactgatacggtcttgagacagttaaagatgttggtataggtaatgtctccttagaccaatgacacgaacgctatacacattacttatgaagggttagctactcattttactggaaataataaataatataaataaataaggtccacacagctctgcaaaggagaccaaaggttaaaagaaattagcctagaagacgtaatatcacagtttggcaaacttttctgtaaaggaccagacactactgtaaatattttaggctttacaagacaagccgcaataccctcaacccttggagcaactattccccctgaaaaattagtagattttttgtttacattttacatttcagaatttaagaatcattcttagttcatggggccatacaaacataggctggatttggcccccaggcactagtttgccaatccctggataagataataatggtaatacagtcagtgttttaaaagcaacataaagaaatgtttgtgaattggcttaaaggtaactgaaaaacgtgcggccccaaacttctaaaatccggaccggcggaccagtgcggtggggaaaccggccaggactagggccggtcttcaggagccggcgcggaactccacggctctcggggtccgctaagcccccgcccacacttactcccagcagcggcccgcggccgatcaccgtctccccgggcgccagggccacccggggaccgccgtcccgcggctgcagctcgaagcccccggacatggcgggcaaggattaggccccttcgccaggagactggcccctccgctgtttccgccctccacagacacgcgcggggcaagcccacgccctgggaaaaaacaccgagggagggcctcaaaggctccccgcggctgcgccggtcctctcagagcccggccccagcgcagcttcacgagtcccgcccctccacgcctactaatgacgcaaccggggattccccagtctcgccgcctcaaaactactgtttaaaaaccccggcttattccccaacacccttttcacctccctcccatcttggaggacgccgggccttgtagtcctggtggctttcttcacttcctttcccgagcggagacgccctggaaaaaactaccaatccccaaaggcactgcgcgcccctctcggcgcctgcgcgagttctgagcagggcgggactcaggtgggcgggatgcgaagagctatggggaaggattcgaattccggtggatttaaatcgcgggaggagaagctaccgcggcctagtaggtagaagggtcttccgttcccgttggcttaggtgtctacgctcccggggacgcggcctggacgcaagctcagccttccctccgcggcctggagccgcagtgacagtcaacgctgacggttgttgtcacttgtcagtgccctgtgttcttgggttccagcagctgcaacccgcgcgggacacaaggagggtggctcagacgggacgtggggtgattagccctgacccgcgggatttggacggagtggggctccccgcccctccgactgcgctgccgccgatctatccctccgaatgatagttgaaagggggacgagcttttacttcacttgagagagaattcaggaaagctcagttcataaaggagaaagggcagaagaggggtcgtttccaggcatccaggcgaacctggacgtagaagaaagattcctagtgggattttagaaactcgcaaaggtatcccctgctgtgaaattcaaaagccttcattcccgttacaggaattccacaaggggacgcattttattctcccagtaagatcctgggagaagtggataaacacactgtaacgtttaaatgcactgtaacgttttcctaatgtgagattcttttcaagaacgttgtggtttggctttggtttgtattggtggtgggaggggccaaggtgcatggcaaaaacttgctcttgactcacccgtttttacgtttgctttcttacttctcctaaccctcaagaagaagacctctgttgaacacagactgcagttccagccaccacagctaatctggatcatgaatgggagccaccgtggtcttggcaagtccgaaaacatagctgagtagctcgtctagaaaagagatttgtgttcagctgagttaaaagaagtatttacctcaaacctctcctcttgcacaaccaacccccgttataaaaggaagtgcaaaatggaataaactgattttaagtgaatacaagctgtctttatatacaaaagtaactcaaggatggtgatgtacccagtcatgctttcaactgatttgggaagcctacaccattcaccttaggtaaattagctgaaactgagctttaaatctgggcttcaaagagtcacatactgtacctagctgagttctaaacattgtttacagttgtcactcactgttgcttgatgtcttcagtgactattatccttagcttgtaattatgcatgtaggatagcttcaaggggccatttctaaaacactactcttatgactgagttgaatatttgagactttgtttcataatccagatctcatcttcttgtccatttcagatagtagttgtgtcaaatgtaagcacctacctacctataagatacaagtagataaaattcttatataaacaactagaagtccagcaagtttatgattaagtcacaaattgcaaattaatgatgaggcatcagttcccatgtacaacaagtattcaggagtttaataggattgactcatatacattttcaaaggtacaaaagtaccgggtatggtggctcatacctgtcatcccagcactctgggaggctgaggcagaaggattgcttgaggacaagagttcaagaccagcctggacaacatagcaagaaccatttctccgtaaaacagtttttg

SEQ ID NO: 2575 - DNA, 4001 bp, Homo sapiens
ccacactgctgctaatctagatcatggattcctattgcatctgggaagttaacgggaaaatacttctgacttgcgaaatttggtgggggcagaccacatctcagcaatgtggctgacttacaaacagaggcaaagtcccagtgctttgatcagattacaacagttctgggatgttctgcgtttgctcagtacacaccctccgggaaggtcgcgtgttgggcgcccgctggaacagggctgggggaaagctgtgggctctaggtccctcctgcctgcatcctccataccttgcagttgatcctggtggcacttcttgaatcagcagtcccagggactccactggaactctcagcctcatagttgtatgtgtacttccggaggtgcttgaatcgggtcgcatcttctaacgtggggagaaatacgtcagccacatagcagaaatagctctcccaaggacagccaattctgggcagagaggggcagtggcatagagaattaaaaatggtaattcaactcaaattattttttaattgactttatacttaattttcctttatagatttgacttctccattatgtttttgctgaggctaatgtttaaattggctggcatgtcttgaatatctcatctgaggcacagggaagggagtgacaagtgtcaagtaatggggctcagaaaatctgcatgagagaccctctggcaaattaagagatgacaacattacgcaaatagtactatctctaatgcttttttagcttgaacacgccgtaattccgtgactctaagactaccaaatacttaaggcaaagttcattaagcattaagcgtaactaacttaacaaactcctagaaaagaatttctggaggtttccactgtagttgagaggaattttctgaacaattgaagaaaaagaacatctgggtcctgagtccagctgcagtgatgacagacggccactagatggcggtgctgccccatcagaagtccgccccgcggctccagcacacagggtcgcgcttggaggccagttcctttaacccccaggggtcaggtaaataggaagggggtggaggttcgatttcttcacaaaggttaaagtcagtatttcctcaccctcacatgcttcgaatcaatgactagtcactgataaacaggacagtgatgtttcttcaaagtgtgcacaggccagcggagagacaatcccttccctcccccgcccccaggctgaacttttgggacagaacagaaggccaggtagaagagagttggcatcccttgggtgtgggcagaggctcagggaacttgcttcctggggtcagagcaaggcacaccacgatgccatctcagccctgtagagtgggaggccctcagggacccgggtgtaggagagtgcacggggctgggcgcccttccacgccccatgcgcagatgccttacttggacagaccaggctgacattttccagcatttcctcttctgtaagacaggagaaagaaatctgtgagcttcccacgtcttcccagcgggtgctagggcccgacagggggaccaccggcacaggtttcacctttcaggagggaggcaggctccggagaccccctcctcagcccctccatcccgcgccccccatcctgagcctgcaggggccgccagctggtccaatccccccactcgccctggaccctgtggctgccctccctctggcctaggcccaggctgccccggccaacctcgtgccgccggctccctcccgctccctctgcgcccgcagagcggccgcgcactcaccggccctggcgcccgccagcagcagcagcagcagcgcaggcagcgccagcagcgccagcagcgcgggcctcggcgggtccatcgccagctgcggtggggcggctcctgggctgcggcctggcctcggcctcgcggccctggctggctgggcgggctcctcagcggcagcaaccgagaagggcactcagccccgcaggtcccggtgggaatgcgcggccggcgcccgcaccccatttataggaagcccaggctgcaagagcgccaggattgcaaaaggtccaaagggcgcctcccgggcctgacctgtttgcttttctacactggcttctctttgagccttgaagagcctcggggagggggcccacctgggatgcagccgcagccaccaggggctgggtcccaggtgggttcccttccccaagcgtcttcagtgctctggcgcggcccttcctgtgtctcagtggggccatggccagcgcctcagggtctgagaagcctgccctgaccaggggtgccttcttcagatgacccaccatggggacaaaatctctgcttctcctggactgaattgggagccacgaggagaaccagtcctgagcgctgtcttggtggagacgtgttcccatcggttacttcttttccattttggtggaccttggatttgcacccacaccctaatcctgatcagaatctgtggctgcggggttcagcccgtgctgggggaggagagagaagggggatgcagggaggtctggtgagtgaccagtcactgcccctgaggatgggtggcctgcctggtcccagcaggagtccaagtatctgtcttcaagaaaccccagcgaggagaggcctctggggaagagcaacctccgagggcgcacccctcttgtgcaaagtgttcttgggttgttgagaggaggatttcctgcaccagcttctaggtttcctccagtggtggggaggcggacgaggaaaagcagagtagtggacaggacacgtcatgttcctcatagacatctggaaccttctcatgcatcgtttccttctcttctaggcactgcccatttcccaccggaagcttcagccagcgctcgctgcctctgcccagctggagggaatcagcggtagtggaatttcagggacactcggtttactaacccaggatcactcagaaggggttattgatgggatggcactatgatgagctgagtgaatgtctgagcctggctgtgtccccaaggcacctccactctggttagggagacaagctgtgtacgcaggaaaccgctagtgagcaattgtggtaggatagagggggcgacaaccaggtaggtataactgctgggggaccacccaggaaggcgagtgggaggcggccaggagcaagccggtagagtgcggatgggaagtggacagcgcctgttgcagaagtcagtgtgtgctcattgttacaacttgtcagctttgtttgaattatgagataaccccagatgtaacaagctactggtgaagactgatgattccagaaggatcaattctgaaacagtaactatgtataaagacccagttccctcagaggagactcacagaaagaccttcgcctgcttcctgcacctgggctccacacctgtccttattcagatattgtcattagccatgaactcctatgggcagctaaactccctccagtgatcagttgctcatccacagcatattaatgttattaaagatggatattacagaggtctcaactcaaggctggtcatacctacaccactgatttgtgaaaggtctggaaaaagtaattgctctgaaaccccatttctctgaacactttatttgaattattctatgtggactgactttccacagggttcgctgctgctagtgtttgaggaaatggtcctgcttccatgcatattcacattaaggagagtgagtaagaatattcaggtatagagaagccaaaaggaggtgtcgagctttaatttacaagcacaagtccaagcttactctgttacgtgcagatgaaaccagggtccaatggtcagcatccatagagaatatatacatatatatatatatttttttttttaatttatttatttgagatggagtctccctctgtcacccaggctggagtgtagtggtacaatctcggctcactgcaacctctgcctcccgggtttaagcgattctcctgccttagcc

SEQ ID NO: 2576 - DNA, 4001 bp, Homo sapiens
gagaggagagacagagagagagaggagagacagagagagagaggagagacagagagagatctcagaaataaacgagcagcagcagaggagagaagacgacatggctgtgcgatgtgagacaagggaaggcggcggcagccgggccgctgtcctgcagccccaggcctgggtgaccaccccaaataacagaatccaccaataccggggacctgcctctgggcacggaagagcagggagtgggcctagcggagggcagggaccacagggacatggagtctgcggccgcccaggtgtaaaccaggaccctgaggatgggcagctccgtccctgagaccaggcgccctgtgcctcgtggaggcaggacccttgacgggagctctccggtgccacccaggacagaggcccgggcaatctgccacagagccgtgtccctgcagagctcccgctcacccgtgcctcagtttccccatctgtacagggctctggtggcaccttcctgtggcctttgtggtccagattccgtggtgtctgcccagtgctgggtcgtgggcagtgccatggacctaagtgctggtcctgtcctgattaggacctcggacccccggaaggagacctggcaccattctccctgcagcccttcctgtggtgcctggagcacgagccggctcccctggctctccctgcagccccagcgctgtggacacctgtcctgggaacttgctgagcaaaggctttcgtggtggtggagcctagcgctcggaggggaaagcagacatgggggactggatcagacggagggtctgagtggagggagctcacaagggggtgatgggaccatgagagctgggtgccacggtcggtccaggtgcaggcagagatcgcaggatgcaggtgtcagtaggaggccagggaggccaactggggcaggtgagacaggacctgtcgctctggaaggggtgatagagggtgcagggactcccacaccagaccaggaaactgggctgggccttgaatcgtctgcctcggctgtccctactaccccagaggcagaacttctgggaggaccaagaatagctgcgactggggagaggtgcagtgggcaggatggccctggcaggggacaggctgctccaccgcaccccatgtccagcgcaggccctcgtctacccgccagatcccaggaaatcaccgcctcttcttgtgggtttgttggccacccgggccagcagccccctatcctgggtgcaaacgggcctgagtgtgcatggaggccacacaggtgagaggtcctcaggggcccaggggaaggggaagcagtgctcacccgtgtaggccgtgacggtgaccaacagagccacagcgggcccgctgtaggcgggaggactgtgccgcaggtgcaggagggtcagatggaaacaaaaggcgcaggcggcctccacaagcgccccgtggggcacggatgtgcgcagggccgagctgcagctctgggccatgaggctctgcagcaggtgcaggtcactgagctcccaggcccagcagaggcgcatcagggtgcaggcggcctgcatgcccagcccctgtgccgccagcttcaacagcgtgccaggcagagactgctcggccatgaggaactcctgcagggacacagtggggttggccgaggccccgtccaaggtgaccccgtgcgccaggaagagcaggaagagcagggtgagcagcaggtcaggcccaaagtccccagcccagggcccgagctcgaccagcgtcctcatctccaggcagcagggcccgagctgcacccgcacccaccgcctcccgggcgaagacttcataggcgcccactgggagcagggccttggaggcccgcctggccgcctcacagagggcgaaggtggcaaagaagaaggagagggacacgttaagacctgccatcggcctgggccccccgaggagctgtgcctgcaggacacctgaggggacagagcaggagctggctggttcccacaacccagagggcccaggcgtgtgggagagggcacctgggcctctgggaacaccacagctgcagccccagctcccgccccactggctgccacccaggtgcacagccaggatggccacaggggccctgccccacagcctggcatcatcccgtcatgtgacacacccggacccactggccacgctcggccagccctgggcgctggagactggcccagctcttcagagcctccatccgagctccgctcctcctacctgcgctcttgggtaccggaccccaatacctgctccctgcacctggcccctcttgagtcagggtctcccagatcctgcaccccctccaggtccctgcctgaacaagggcccccatttccgcctccctgcatggatgctgtgtccccatctcagtgagggccccaggcttattgcacctgcactgtgtccccactggggtgagacccccactgaacctgcactgtgtgtccgcctgggaggcccctcatggcccctgcacctgttctttgacccagcctaggtgaagctccctcctgcctgcacctgtagatgtcttcccttgagtgagtgccctctgctccctgcacctggctgtgtccccagctaggccaggccccctgcacgtgggctgtgtccctgcctatgggaaggtcctctcattcttggctccctgcacctccactgtgtccccacctcagcagggacccccaagcttgttgacctgcctggggtctggtctgggtgagaccctcctccacctgctctgtgtcccctctggtcaagagttggcagcagcccttgccccagccccacattccctgccctgtactgccctcacctgccctcaggagaactcaggaccacgcctcacatcaacgtccctcccaccttcccgccccgaaagcgctttccagagatgaaaaccgaaagtgccatcgccattcacttgaatttcctgcagaggggccagctacccacagctgcgtggagaaggcgctgagcctgggcgtctgcagtgggagatagctgggctgggaccatccagagctccggaccccgaggggatgggacatgagccctgtgggccctgcgatgggccgtctgtcaccctgcagcatggatcctgtccagtgagtctgcacccaagcactgggacaccagccatggccatatggtacagcatgtgggactttctggatgtcccgcccgcagccctttccttctcccccaggactcactccagcacccgaggcccttcccccaacctggcccaaagctcccctttctctgagacttaaatttccttttgtttttggaaacccagttgggtcccacctggcgtccccctggcacagctggggagactgagaccaggagggaatggacctgcctgagggcacataggaggcagcagctcgcaaaacaaggggcgattttatttcagctttgaactttccaggtctggggttcagaatttcctccagttagggaaggtgtctggtcgcctccaaggaggggaggccccaggctcttcgactcccacaggaaggccgcctgtccccctccccaacccatccactgacctcttcccaggaggcagagaaaccctggttccagtagggctgtggctgccttcggctgcctgttccctgtgcaagtgccctgccctctcagaggagcagaggaaccttctggaacctgtagaggcctggcatctgcacagggaaaagccaggctttccctcgtgggatcctgtggagaatgagctcagacggattcctcatattctaatccgacaccactggagaccttgactcctccttccagagcgggaacccccttgtccagcgtcgcggataccgggccccacagtctccctgcatctgcattgaccctccacggagctcacagcagggagggtctgcgtggtccacctctaccccacgcacaggcaaacctgagaaggaacgtttaatcaccattca

SEQ ID NO: 2577 - DNA, 4001 bp, Homo sapiens
gagagagagaggagagacagagagagagaggagagacagagagagagaggagagacagagagagatctcagaaataaaggagcagcagcagaggagagaagacgacatggctgtgcgatgtgagacaagggaaggcggcggcagccgggccgctgtcctgcagccccaggcctgggtgaccaccccaaataacagaatccaccaataccggggacctgcctctgggcacggaagagcagggagtgggcctagcggagggcagggaccacagggacatggagtctgcggccgcccaggtgtaaaccaggaccctgaggatgggcagctccgtccctgagaccaggcgccctgtgcctcgtggaggcaggacccttgacgggagctctccggtgccacccaggacagaggcccgggcaatctgccacagagccgtgtccctgcagagctcccgctcacccgtgcctcagtttccccaactgtacggggctctggtggcaccttcctgtggcctttgtggtccaggttccgtggtgtctgcccagtgctgggtcgtgggcagtgccatggacctaagtgctggtcctgtcctgattaggacctcggacccccggaaggagacctggcaccattctccctgcagcccttcctgtggtgcctggagcacgagccggctcccctggctctccctgcagccccagcgctgtggacacctgtcctgggaacttgctgagcaaaggctttcgtggtggtggagcctagcgctcggaggggaaagcagacatgggggactggatcagacggagggtctgagtggagggagctcacaagggggtgatgggaccatgagagctgggtgccacggttggtccaggtgcaggcagagatcgcaggatgcaggtgtcagtaggaggccagggaggccaactggggcaggtgagacaggacctgtcgctctggaaggggtgatagagggtgcagggactcccacaccagaccaggaaactgggctgggccttgaatcgtctgcctcggctgtccctactaccccagaggcagaacttctgggaggaccaagaatagctgggactggggagaggtgcagtgggcaggatggccctggcaggggacaggctgctccaccgcaccccatgtccagcgcaggccctcgtctacccgccagatcccaggaaatcaccgcctcttcttgtgggtttgttggccacccgggccagcagccccctatcctgggtgcaaacgggcctgagtgtgcatggaggccacacaggtgagaggtcctcaggggcccaggggaaggggaagcagtgctcacccgtgtaggccgtgacggtgaccaacagagccacagcgggcccgctgtaggcgggaggactgtgccgcaggtgcaggagggtcagatggaaacaaaaggcgcaggcggcctccacaagcgccccgtggggcacggatgtgcgcagggccgagctgcagctctgggccatgaggctctgcagcaggtgcaggtcactgagctcccaggcccagcagaggcgcgtcagggtgcaggcggcctgcatgcccagcccctgtgccgccagcttcagcagcgtgccaggcagagactcctcggccatgaggaactcctgcagggacacggtggggttggccgaggccccgtccaaggtgaccccgtgcgccaggaagagcaggaagagcagggtgagcagcaggtcaggcccaaagtccccagcccagggcccgagctcgaccagcgtcctcatctccaggaagcaggccccgagctgcaccgcgcccaccgcctcccgggcgaagacttcataggcgcccactgggagcagggccttggaggcccgcctggctgcctcacagagggtgaaggtggcaaagaagaaggagagggacacgttaagacctgccatcggcctgggccccccgagatgctgtgcctgcaggacacctgaggggacagagcaggagctggccggttcccacaacccagagggcccaggcgtgtgggagagggcacctgggcctctgggaacaccacagctgcagccccagctcccgccccactggctgccacccaggtgcacagccaggatggccacaggggccctgccccacagcctggcatcatcccgtcatgtgacacacccggatccactggccacgctcggccagccctgggcgctggagactggcccagctcttcagagcctccatccgagctccgctcctcctacctgcgctcttgggtaccggaccccaatacctgctccctgcacctggcccctcttgagtcagggtctcccagatcctgcaccccctccaggtccctgcctgaacaagggcccccatttccgcctccctgcatggatgctgtgtccccatctcagtgagggccccaggcttattgcacctgcactgtgtccccactggggtgagacccccactgaacctgcactgtgtgtccgcctgggaggcccctcatggcccctgcacctgttctttgacccagcctaggtgaagctccctcctgcctgcacctgtagatgtcttcccttgagtgagtgccccctgctccctgctcctggctgtgtccccagctaggccaggccccctgcacgtggctgcgtccctgcctatgggaaggtcctctcattcttggctccctgcacctccactgtgtccccacctcagcagggacccccaagcttgttgacctgcctggggtctggtctgggtgagaccctcctccacctgctctgtgtcccctctggtcaagagttggcagcagcccttgccccagccccacattccctgccctgtactgccctcacctgccctcaggagaactcaggaccacgcctcacatcaacgtccctcccaccttcccgccccgaaagcgctttccagagatgaaaaccgaaagtgccatcgccattcacttgaatttcctgcagaggggccagctacccacagctgcgtggagaaggcgctgagcctgggcgtctgcagtgggagatagctgggctgggaccatccagagctccggaccccgaggggatgggacatgagccctgtgggccctgcgatgggccgtctgtcaccctgcagcatggatcctgtccactgggtctgcacccaagcactgggacaccagccatggccatacggggtacagcacgtgggacctgctggatgtccccctcacagccctttccctctcccccaggactgactccagcacccgaggcccttcccccaacctggcccaaagctcccctttctctgagacttagatttccttttgtttttggaaacccagttgggtcccacctggcgtccccctggcacagctggggagactgagaccaggagggaatggacctgcctgagggcacagaggaggcagcagctcgcaaaacaaggggcgattttgtttcagttttgacctttccagttctggggttcagaatttcctccagttagggaaggtgtctggtcgcctccaaggaggaggggaggccccaggctcttcgactcccacaggaagattgcctgtccccctccccaacccgtccactgacctctccccagaaggcagagaaaccccggttccagtagggctgtggctgccttcggttgcctgttccctgtgcaagtgccctgccctctcagagtagcagaggaaccttctggaagccatagaagcctggcctctgcacagggaaaagccaggttttcccttgtgggatcctgtggagaatgagctcagacggattcctcatattctaatccgacaccactggagaccttgactcctccttccagaacgggaacccccttgtccagcgtcacggataccgggccccacagtctccctgcatctgcattgaccctccacggagctcacagcagggagggtctgcgtggtccacctctaccccacgcacaggcaaacctgagaaggaacgtttaat

SEQ ID NO: 2578 - DNA, 4001 bp, Homo sapiens
aaaacatataaagtaatagaattctatagtaacttatttgcaattaactgtcttaaaatttggtttgtaccttactgctctttacaaacaattctgaaggtattttaatttacctatcatctttactcattgatctttctaaattcatatcaagctctcttcaattcattcttaattttacacatattccataaaatatgtgtattttaatttaacagtttctgcaagaaacactcatttttacagtgaatttcttttttaaaagcattaaacaatttaaaaaattttcatggacttttcctcaatgccagatgtttatctgcatattcattcttgctaaggtgtaagtattgcatgtgtttattcatttgatattcttttataataaaatgaaagaaagtaataacatatcaaccaaaattatcagaattatacagcttctatagatgcagaggttcagaaccacgatattgaagacagatttaaataatgctttccattgtgaggaaatgcaacaaattgaaaatctaatcacaatatcaaagcaaatatatattaccagggtcttcttacatgctaacaataaaaaatgtattgaacaccaagtcctaatctctatttttctgtgatcattttaatagtcaacaagtagctagcttcagtattgacaattgaagaggtcttaaaatggagtgtactactatgcctaataatttcctactaaattgaccatgtcaaaaaacatttatgtgtgtctttcaatagaagacaataaaagaaaagaaaattgttgccacttatcaaccctgtaaccattttttaataacacaaaaaataggtgttgtgggggccatcacttctcccatccagcagcacaataaaaataatattagggaagaatggatcatatcttgggctgttattaaaattctttcaaaaatctacagtcagatttattttaggtatttgtctctgagattagcaatattttgatgttttctgcacatatgttacagcacacaaagacattctgtaaaagcaagaagtcaatataaaagaaaattacatgtcagtttaggactaacaaatccttttcatttctaaggtttattattttggaatatttcaaagaaggaaaattatataattacataaataacaaaagtatacctctaatttgcctctcctctcagagtaaccttcaatgaaatcagctgtgacttcttttttaaatataaaagtttgcttatgaattagaaacttacactcatttcaccctatatcttaaatgaaatttagaaaaaaaatttcaagtgtcatgatagacagtattcctttacattttaaaagctccttgctttttaattagctacatagtaacctttttaagggtttttagtgctaacattaatacaatgctttaaagtgagtatctttcacactgaaattcaagctatttctcattgttatacccttttctctttccttatctggatgttgaacaatacatatttttataaaacagttggttaaaggtgcaaagtctcacattatttctagtagttatttttaaatgcacttcaaactaaaactttataacttattctgtctttaacattttagtacaaaatcttagcaaatcatcttattattataacattttagtaaaagacattggaatttgacagctgcaaatatgaaaagaacattcttttctacatcaaaggaaaccagccaatgttttaatcacaggtaaaagcgtcatattttgtagaaatgtttatatgttcacaccaaaatgtaggaaactctgccgaacatgttcaagtttaaatttcatgtacaatataaagttaaaacttaccttttctcggcaatgacctgttattgaaactgccatcaactcctaactgttaatgactctttcaacaaaaacggaaaacagtaaagtcacatgtcgtaagagtaggcctgtgttggatgctgcttaatttcagtactgggggaagaaaaaggcggggggtggggtgagcacaaaacttttaaataaaaccacttcctgggtagagacagttaaccacacacatcacatcattactcaatttgaagaaattgccttgtatagtcaacaatattgttatttttcaatgttattatcaattgtcaaacaagacacatgtatagagattttatcaattttaacttaagggaggaaaatgtgtgattaaaaattcatcagtgggaggagcagactgctaagcactgaagaaacttcctctttctctgccttctagcaagggctgaaaaatgaagcgtctactctgctggctacgcttgagatgctcccatgctatcaggacactctgcatattgactttggaagcaaggaagccacctccaattcacagagctggtgcctctgcctcattcatgaaaggacccaccaaaacctgatccagttaacaggttcatcaggccttgggagggttgcattagaacttcagaaaacacagcccagagccacgccgccatctgagcatctggggaaaaggcaggtgttcatcatgctcgtcgaacacaccctgtggcatttgctgtgactgtggctctcatacggatgtgtccactctggcaatttcctaagcagttctgaaacctgctgaagagcttttgctctagctgagtgattctttgtgtggtctgacttaaaaagaaaaaaaatatatattataataaaggatccaaacaatatcattttggcatgctgctgaatgccctcttgtgtcaaacttcaacaaacccaagacatatttgtaaggggtctcagaaataactctaggatgtgcatctttattgagccatggagttcaagaataagctcctggattttcaggcttggctggttttgtgagatttgcagcttaatcataaaaggaagagaggaaaagctttccttccaaatatatgagagagttaaatcacaatctcttgtcatacaaaccaattagactagaaatctgtgtaatagagctcagtggtatagaatgtttggcatactaaaagtcaatctttaaaaatagatttggtggatatggcccaagttagggatggcatgtccctatcagttaactgaatttctctgggatctttttctaaaaatcacatttcagattgaccctagaattcactgtcagttctcatttcaggaaggacctttttaagtgtttagagtcctgaagatttgtactgaatgcttctccttaacaccgaagagaaaatggaaagttcataatattaaaagtgaggaaagcagaattccgggcttaattctgacactgctattcacttaaccttggccaagttacttaagttctctgaaatttagttcatttatccatgtaatgaaacatccgcataaaaaaatccatcttggggaacacgataagtaaatagatgtatatattttgtatatcataaggaattgtagatatataaattagcatgagctgggaaatgttgataactcctaagaagcatcagagaacttcagtacattctgcttgatttaagcctttgtaaatctgagttagactcagaagtctaggacaaggaaaataaattaggcctttccttgtttttgtttgcttgtttttacggagtctcgctctgttgccagactggagtgcagtggcgcgatctcagctcactgcaaactctgcctcccgggttcaagggattctcctgcctcagcttcccgaattgctgagattacaggcatgcaccaccatgcccagctaatttatgtatttttagtagagacgaggtttcaccatgttggccaggatggtctctatctcttgacctcatgagccgcccgcctcggcctcccaaagtgctgggattacaggcgtgagccaccactcccggccatgcctttccttttaaatagatactaacatcaggcatctgactaggaaaaatataaaataacaatataccct

SEQ ID NO: 2579 - DNA, 4001 bp, Homo sapiens
gaaatctgcatttttagccagcacttgatgtgagtctgatataggttatctatgggaccatgctttaagaaacattggtaaaaatcatgaaattcactcaatcaaatcccagacctgagtatatgcagtcttgagctctagtgtggtaatttcctatatctgtgaaaaaaatcatttaactattaattgtctcaactttcttgttttttaaaccaaaggagagtaagaccctaataacctgtgttcaaacataggtggagagaaggcagaatgaccttatttatgtagaagcaggacactttcaaaggaacagaaccatataatttgtatgacatagattgagcattagccaagtacatttgtatcaatgatagttaggaggaaaatctcttgcttttgtaagaggtatgaacattaccttttctctgaactgacctcagcatacaatcattcacagcttgattagggaacgctaatctcccctagttatcaagataaatggcttctctgattactctgttttctttcaaaccctttctcagacctacatcattaatgctccgcttgtgacttttcaatggagcacttattttagtagcacacttaaccccattagaggttcaaatctaaacctttttccaagcaaaattcctccaagctgttagaaacaccttaatacttatctatatctaatatcaaggaagttatctcatgtatgggtgagatacataaatgtaggcaatagttttcagcccgattgctctgatgtgaattactgtgaccaatttagcaatagaagaaatctatgtaaagaacttcataacgaatatatagattaaacttaatgtatcactatcatcattagaaggacagggtatggattaaaggccagactatctcagaaaatatgccagtctcccttaaaataataaaaaatacatctcttttccaactcatctaagaattccctcccattctgttcctttaattatatttttattaagtaaggtctttattatactttagtacgtttttatgttcctgtcttgtttttgttgtctaccttttgctactaccttttaatacaccttgactcctgggctcacaaaacagaacacccattgaatttacttacagattgagcacttcaaaagactctagtctttgtgctcctgttcagaaccattcaaaatatggatgagtttccaaacaggaaggaaatggaatatgctaaaaactcacagttttgtgtgtagtctgtagccttaaatcatccgaagtaccccagatcctgcacaccaaggagtgccatcccactgttttgtccaaatgaaagagaaccccctcccagcattttagaacttggacctggcatgccaacttaaatgcaaatggtccctcaaactcagatttgctgcgagatccatttttaagtagactatgctccctgcagaccaacatgcaaatggtgctcgagtatacgtaagaatcacagaggcaacgaaaagacaccaaccatacctattttcgcagcctccactttcaggttgaaatcccagttccttggcaattttagggacattttgcttccagtttaagtgagtagttagtgaagcggtgagtctgtcacagtttgcgcccttcttgtcttttcactctttccctctgtttttgtgtctgtttttgttcctccttatgattgcttcacaagcaatcttaggcttgaggctgatttgccaacgtgtctcctcctttctcttagatgaaaggtccatccatctgtcactggaggatggcacccaaactcccccagcctccaccctcagtcccacaggggctagcaccctgcttttcttgctttcagttttaccagaaatatcccagttgacacttccctctgcgtcatgggaagcaaagctccttttcgaaagaatctcaggccttactgagttgaggtcgtgataaacaactgctgcctcttggttttgtgtgtgtgtgtgtgtgtttcttttttaactgtctgcttccttgcatttgaggaagtgggtggctgttcagtgaagatgatacattatgagcactctttcttgagaaaatggtttttggaaatgcttgaaaaaccagaatggttgcttctgttataaaagattacagttttaattagaagaaaatgtcgaaactcccatcatctacttcaactctaagctctcctcttcctcacctaacggatcaagcatccaaaaatggtcagaaaaacaacaagcattcccccaaagttatcttcttttaaattcttcctgctgtaaggaccatgtcgcaagctctccaggtgctcaggataaagtttgcaagtgatctcagcctgatgtagggagggttttgatgtatttggcttaatgaagcaacttaagctaggtcgacccactcacatatcctaagggttctttggcattgtacacagggtgtgggctttagaatcagggtgtgtgggctgtatacatggtgtgggcttccatttgctagctcttcaacttttgaacaagcaactgaatctttccagaccttaatgtcctcatcagtaaaatggggttgataataaccacaactcaaagggtttttgcagaggaatctagtgcagagcttgacacagagtggttgcaccacacacattaattcaacctttattctattctatttagttcagttctgtgacaagctttcatgtttaactgggtcagcctaacctagtgcttaagcatttgggccctggaaacagatcactggtagtcaaatcctggctttcctgctgtgggactatggacaagtttcttgaccactttgtgcttcaattcttatctgtagatggggcaaataatagggcttacttcataggctgttgtgaggctttagtagaaaagccagtacaaagtgctcagaacagtcactgctagccagcatctaagctgcacgccttgctccattcattctccaactctcctagatgactctgtcatactttcttcttcacctgccacttgcttactcttactgacgacctgggttcccgtttcattgagaaaatcaatgtaactgaaagagaatgtccacaagcttccctcactctatctgctcacctacctgcatgcaagctgtatccctgaccttattcttggtacaatgggtgaactggctgttaacactctcccatccctattgcatcatcaatttcttctctctctttgatccttcctgtcagcgttcaaacttactattttttatcccataaaaaatctctctggatgccaccacccccttgggctagagtcccatttctctccttcatttctgaaccaagctttagtaagaattgtctaacttgcaaatatctctcctcttattctctcccgaatcccttggttgatgtttttgcccctatgactccacaaaatatattctcatcaaggatacctacgacttccctgtcactaaactcacaggtcagggcttcatcttcatctcacgggcccatcagcagtgtcggacacatttgatagctctctccaactctgagccctctgtccatggggctcccacggcccatggttggcctggctgtctgcctgcctttctggcttttccgtgtctgttttcttgctgattccttctcatctctctgacctctaaatattgaaggaaaccaagactcgactggactctttttccatccacactcacaccttggtgagctcatctgtctcaaggctttaaatgtcacatatttgcagatgattccaatgtgtatttccagcccagaccccctgaactccaaatcacatggatctctgcttagatctatagtagccatctcaaactaaatgtatccaaactgtatatccagagaacgaggctgaaggaacagtggtgacctggtgtatactcctgtcttcaggaatgaaaggagcacaagagagaagaaccttgcaagcgcatttaacgcctct

SEQ ID NO: 2580 - DNA, 4001 bp, Homo sapiens
ttctagagtctgtcatcccaaataagctccttctggccaagcccatacttccatctccacacacatgagttctaggtgggtgacagctgtgctggatgccctgagacatccagtttgcacctggggtcctggcgtaattgttcagagcatcctcttttattctcacacaccacaatggccaaaaaagcaatgaggttggccgaagagacctaggcccaagatttaggattaaagcccattctcacagccttatccactgcatcaggaaatcctgtttgctctactttcaaagtatatccagaagctgaccattttcctccagcccacaactcctactgagcccctaaacatcataaccccttacctagattacttgcgtctcctctggctctatttttgagcacagtagccacagctgtctttttacaatttaaaccaaaaactgtcactctctgctcagagccctgcaatgcctccctgtggccctcagtgtgaatgctcaggtccttacagtggcctgcagtgccccagcagtctgtgcccctgacccctgactaccctcttgcttctcagacctcatcccctctgattcctacctgctagttctgctcccaccacagtgccctccttgctattccgcagccaggccagacatgctccctttggtgccttagcaccggccgttctctctgcctggaacactctttccccagagatctacccagcttattccctctcctctttagtctcggccccagtgtcaccctcttcatgaggtcatttgaccatcctttttaaaattacatcttcccttaactcgtgacatctgctagctcatcctattttttcctcatagaactaatcttttctctaacaaactacatacttttcttatttgttatgtttatgtgtcttttcctccacattctaagctgcatatggaagagatttttatctgttttgctcatagtttatttcaagtacctagaacagtgtgtggcatataataaacgctcaataaatacttactgaacaaacaaatcaatgagtcccaaaatcggttttcctgaacccaaatccactctctctgagcccttgactgagtgtcactaccatcaccgccctgttgccagtcttgactcagagccatgtgtaggaaactccacagtgcccgtcctggtgcttcctggaggaccactctgtcatctttgcaactcagtttatgtatctagaaaatggtgtaaagggaaaagcaatttcctttccaatgggtgtgtctggtcctattgagaaggcccctgtgagtttaagtgaaatcccagcgggctccaggcccgcctcctccgtgccttatgaacgggacaaacagcctggctggtacctggggcttcgtgtcctcttcatccttgtagtagtagagctgctgcgccctcagcacaaagtacctctgctgccagttcttcacgatggacctctgcttcttcagccagcccatcttgatgggcctctccagcgggttgggggtggacgatggatggaaggcagccatctgctcgccagtcatcacactccttgaccgagctatagagaggaacagacaggccgactgaccgagggacatggggcagtgagcaaagagtgggcggagaggagagaggaaccccagagggggctgagaagcggggggacgacaaccaggtccagttcaggggtccggatctgagccagagaaagtcccccccgagccagagaagcagccgaggggccagctcccggtcagggccaggccaagaataaaacccaggctgcagtcggtggccccgtgcacaggcagtccggcaccgcggcgggccccgtcattctgcaaaccgaaaggttggctggagccttctgaagaggaagtggccacagcatctgacaaaaggtgcttcctttttcctgcgtgggagtcagtatctgacaagagagaggagaaaataatgcctcactctgaaggctcggggtgagtcccacgcagctgcagaggccgccggaagctgcctgggcactcttccacagcggccggctagaggaggggccgcaagacagaagctgttagctccaacctcgctgtggaacgcaggccccctccagcggaccccactcaaaccccagcccccggccacagggccagcctgcagggagttggcaccttctgaattctcctgcccagtgccattctgtcccctgcccacggagagtatcccagccctttatgctgtacaaggcgctcactgctgctgccttcctatgacctttacagttagatcgtcactgccaatagaactcagaagcaggatttgaagccagagccccttgaacctgcatgcactcagcatggtatatttggcttttgttttcacacaggagttctgcctgtcattcgagtaagtccagcctgtacctccacatcttgtctccatggtaacccccacccaggaccatgctctcctttccttccctccacagcgctccatcgatcaccctggtccccattcaacacttccttctgagccccatcttatttcccagccagttcaatgatgcccttgtctccttggcctgcactgccctccacacttgctaatacccagtgtctgcacccctctccttctgccaagtgttgctggaggaaggctccatcttccaaccccctttttcagcttttgtccatccctggaccactcatgacacagctaaactaagctatcaactctgctcccgacccatttcatttcacctgattggagactagttctacctttcctgactttttgacggtggataaattatgcttctctgagcctcggcttcctcacttgctaaattaggataataatacttccttgtttatggaattgttgtagagattaaacaaacatacgcaaaccacttagcacagtccctggtcaaaggtaagtatatgttactcttgctgtttttatcaacaggtgactttacttcctactaaaaggatgggagtcatcactgagagcttcttcaacttccctcttcacttcaaaatgtcattccatcatcaagcttcctctctttcttctttcctatctttaatgcattaaattgccaacatctcctcattgattttgaaaaatatattcagggggtatacgtgctggtttgttacatgagtccatcgcctaatggtggggattgggtttctagtgtatccatcacccaaatattgaacattgtaaccaacaggtaatttttcaatcctcaccttcctcctgccttccccacttttggagtcctcagtgcctattattcccatatttatgtccacgtatacctattgtttagctcccacttataaataagaacatgggatatttgattttctgtttctgagttagttaggataaatagcctccagctccatccatgttgctgcaaaggacagaatttcattctttctgattctcttatttctatctccttctacgcctgtgattctcaatctttatttataatcatggcatactttcaaacaccagagttttatatggcattacagagtctttctgtagctatctccaattgtatctggagttatcaccctatttccacatttcatccttcggtccaatattgctgtctgaagaggactccactgtaactgggctcccttgaccctcacaaggggtctgagttcccataatatgcccttatacctggttccatctggcagtcacttcttacctcccaccagggacctggtgaggtcatactaggttgtatcccacgttgcaagacatatttgattcagcttcccattggacagacatcatcacaagagtgcttatgctcagatgtagaaaagataatttgatattttgatgacaatttggtagcttgcttacaaaggatttgctttatatcagtgtgtcttagcatcccagttaagaactttatctgagatcttgctcctcagttacttgcta

SEQ ID NO: 2581 - DNA, 4001 bp, Homo sapiens
aaagagctttgtttaatcaacactactcattctgtccctatcccctccagatacatgcagggaataagggaacttacaggatcctacatttgtgcccgcacgacaagaaaccaatgattccaggggaacaaaaaatgagctgaagtaggtggtgtccatattcacacatcctaatcactaaaccattatctacctgatatactcttgcaatagaaaaccacgttctactacagtagggaagtttctcaaccaaactgaatgatgtgtgattattaaatagccacaaaggaatttgcaggaagtgtctcccttatgttcttgaggctaactggaattgacctgcagggacagttctacagtcaggaaggcggctcttcaccaggcacttagtgacctcagcgagcttgcataaaatatcctctacttctcccacctctgatctttgacagacttctgaactctgccctgctgtcactgccaaattcagctaagggaatcttgctgtcctcctgggcaacagggctgataaaaggaattgtcaacggaaaggttctgggaaggatgcaggcagaagaaaacagtaatgtataatactagacttcgagaaacacagggcacacgcagaggaagtggtaggttgtagaaaaccattcacaggccaggtgtggtggctcacacctctaatcccagcactttgggaggccaaggcgggaggatcacctgaggttaggagttcaagaccagcttggccaacatggtgaaaccctgtctctactaaaaacacaaaaattagctggctgtggtggcaggcacctgtaatcccagctagtcaggaggctgaggcaggagaatcgcttgaacccgggaggcagaggttgcagtgagttgagatcgtgccattgcgttccagcctgggcgacaagagcgaaactctgtctcaaaaaaaaaaaaaaaaaaaaaaaaaaggaaagaaagaaaagaaaagaaaccattcacaacctagagagaaaaagaggttggcctggaatgtacttttcagcaccacattggttggccataaagatgaggcaatccatgtaaaacattcagctcgttgcttatccatttagcttcatctccagtgtgtcacactgtatgcatcaaacagtttatagaggaagcccctggttgcaaacatttggttgtgtggatgtgtatattgttctcctaaggcatgctggtacaggaaacccctccaacctcagtatttaagtcgataaataatacataaccttagcccagaatttatacacacagaagactgtccctataaaatccatatgatgtgaggttacccaaacttcctgcataagcttgagtagattatttagacaatttcatactatgtcccaacagcctggtataataacaagaatcagggcttgggaggaaagatccagatcccagacctaactttgatactttgcagttgtcacctgacttccctatgactgtttcctcttccgtaaattggagatgataagagaatctacttctatatagttgtttttatatggtaaagattaaaagagaaagcatttatgcttctaggctagtctagaaggtgatagatgtctagtagttgaatctgtgtcttggccttacccagcatgttgttctgagggagtcctaaagctattgctaagaaaaataaagtaacaacacagaccaaattctaatagcatttcctattttttcagcacccagtctatattcttcatagtcattatatgatgatagggaaatgaaaatagttaacatactgtcatgtctcgagacagtggtaagacaagacaaaaacctacattccttgaatcctaagtcctaaagcaagacataggaaaaatctgaccttgctttgttttggttttttccatagtgccggttacttctcttctccagcttattcttcaacattgcatcctcatcgtcctggctcaggccacctcctcttccctgcacctgtcaattcaaatcaagagtaagggataacaagtaaaactgtcaaagaaactgtatttacttcttacattagtaaaaaaattgaaatgaacacagcttgaggtacatgcaatttcagaagaggaaaaatattaaattaagtacacatttagcataaaggtaaatattttgtgaatacatatgaaattcattattcaaatttagggtagtttttcaaaatgctacattcttatttggatcaaatccattaattaagatctattggtttgattagcaagttatattttaaagaaattttattttatttatttatttttcaaacagggtcttgttctgtcacccgggatagagtgcagtgatgcagtcatggctcactgccgctttgacctcctgggctcaagtggtcctcccacctcagcctcccaaatagctgggaccacaggcttatgccatcatacctggatttgttttttttttttttttttgtagagatggggtctccctatgttgcccaggttgttctcaaacttctaggctcaagtgatcctccaacctcggcctcccaaagtgctgaattacaggtgtgagccaccacacccagccccaggaaaattatcttaaggagaaaaaacttaagcagatatgaaggccaatacatctgtttctattccattaaatagtatgttccttgatagccttgtccccactttcggcatctggtagactcctttgcacccaggaaatgcttagcaaatgtgctgtgtctgacacgaccattagacatgaagctgcaaggtcagaatgcagcctaacacacagtcagtgttgtggatactggccctctttttagccatccagcattttaaccccttcttaagtttgaagaattcccctgccttatgagacttgatcagatgcctcccactgtagaggctgaaaacgccaggttcttttagcctcccttgcagctaaggcatgatagatacatgacctgggacatatcactcagatgcacctaccccaattaacactggcagttgcaaaaagaattcctaaggcagatacttgatattctttctaccttctaagacagcagtggcagcgagggtagtggtggtgaccattatctgttagaaatatattaggaaattcaaggttctgctttcagtgctttcctcactaggacagttgtactatgtgatttaggcattgctgctagccgtagaatcccaaactcgattctccagcctcccagcaattccatgagctgtccatctcctttcaacaaattcctctcctgcttaaatcagccagagattgtttgctgttgcttacaactaagaaacctgattgaaacaatacaaatatatgaacactatccaagattaagaaaacgcaagtttaaactttgttcatcacttagaatagacaaatctaatctatagtgacaaaatgcagatcaacagttacctagagcaggaggtggagggataactgggaagaggcacaggaaactttttttttttttttttttgagacaaggtctcgctctgttgcccaggctgcagtgcagtggccttatgatggctcactggagccttgaactcctgggctcaagtgatcctcccatctcagcctcctgagtagctaggactacaggtggatgccactatgcctggctaatttttttatttttgtagagacaggagtctcactatgttactgaggctggtcacaaactcctgggctcaagcgactcccctcctcggtctctcaaagtgctcagattacagtcatgagccactatgcctggccgcacaggaaacttttttggatagaaatgttctactgcttaattgtgttagtggtatattggtgcacaaatttgccaaaactcattgaatgtatattttaattgggttatcttacataaattatacctgaagaaagttgatttaagacttcattatgggctcgatgcggtggctcatgcctgtaat

SEQ ID NO: 2582 - DNA, 4001 bp, Homo sapiens
cctggaggcgctctgccagcaccttatctgccgccctcccagctgcgcagcccgtgagcccaggtgtggctgacatctgcctgcaggcggaggggagcgcccgagaggccaccgcgtggggtggctgtggcctgcgctccccggctctgggcgcgcggaagactcggcatcgcttggtctaaagaagctgagggagccttactttttacttttcgcagtctccagggcacgctctgcaatttccagaaaagctctctccttccaagggcagctgggatgagaaatccaacccttctctgctccgttctgtgcctgaccctgctaacctatcctggacagaagcggtcactttgtgggagagaccatcttactgcactaaacatttcagaagcaccaacatttcctgtctctttatacgaagtaagtccagctggatcaaattctaaatacgataaagtagaagccattaaagtactagaagacaacatgaggaatttttttaaatgccacagtggagaagaactaggtttaacacaaaagcctgcacagaccgttcaatagaaaatgggcagtgccggccgaggcgggtggatcacgaggtcaggagttcaagaccagcctggccaacatggtgaaaccccgtctctactaaaataacaaaaattagccaggcgtggtggcgggtgcctgtaatccaatctactcgtgaggctgaggcagagaattgcctgaatccgggaggcagaggttgcggtgagccgagatggagcgactgcactccagcctgggcgacagagcgagactccgtctcaaaaaaaaaaaaaaaaagaaaaaaagaaaaagaaaagaaaagaaaatgggcagtgcccagggagcaggcagttcatacaaaagaaaattcaaatggcttgaaattaaagaaaaacacgaaatgatcatgaaatgccaattctggcttgttagcttggtaacgttcaagaagttggtcacccgctgtgttcactgggggagggggggcggctgggagtgtaacgggggcaattttggcctggccttcctattttacctctcccctcaggaagattcccgcctgctcccctccttctcttgcctgcagaggtcaggaaaggcttggtgcgattcagatactcacctcactcccaggaaggtccctgagccagggcactgtgcccaagccgcgcggaccctggcctccttccctgctctcttccttctgctcatcttggtttagcgtctgcagagaaagcaggaaactggtctggcccttgggaatcttgggtctttcagggtcccctgaactgctgtccacgtagctgtagcttccaagagaaaccatggagatggcgctacccctcccggggtagtggagacccatccgctgagcactaggcctgggactcaggggcttggggctcgtgggtctgcagggcgtcccggggttttcatatgccaggcagcaggcagagctggaaggcagggtgtgtgcgattccagcctgctgggcccgagggctgccgggggacgccagccaggacttttccggaaagatacctgaaggtaggtacctaccgccttcctgggtggctgtgcacttgatggtcggttcacttttcctcctgtgttctggagaaactaaactggaggacaaaggtgtggaggcaagtgggggtgcccagtgatcgctaaaaacatagccctctttgtcctccgcccgttcctcacagtggctgtcggtctctgctggggagagaacttcgggtcctagaggcagactcactagggtgggctttttggggcttccggcatctttgcttttcagaaacgcccgccaggaaccctggcgcagcctgctcttctccttctcgcccttgggagaacttggggaacgttcatgggtgttctctttctctagaactattgactcaataaagtttgaaaaggtcttatgagccaaggccaaccttgccctgagttttttctccgttgttttgagtctctttgcgttgcagctctcagaggaaggccctcggctaccaagatcccctgaggtccccgtgtgccccgctcctgccggccctgcagtcctgtcgcctgcagcctgcgggacaaactcgggccaggcgctggcgtccccgtggtgcagaggcggtgcgtcccgaccggccgcagcgggcggattctccctggggagcccctcggggcctgaagagccccagcggcgaccctcggtggtcggggccgggacccctcctgggctctcagtggccaagggcctgcccttcctgaaggaggtcaccttggaaaacgtcgggcgcttcccaggctcctgcgcgcccttgcggagcccgcgtggcggctggggcggctccaaggcggggacgcgggggcgctggccccgggctgctgcagcaccgccttcgggggcctcctccgggccacgctcccctgacccggagctccggctctccccacgcagtctctctcccgggggctcctctgtgctcggcgtctcttccgaagcagcttgggggaccagcactctcccaagctctgcggcctgggccacccgctgaagagccccatcgccagctccctgtatgggggctgctggcaactcacactcattaccggctggtgttttccccctagtgggagactcacagggggtctcgccagtgctcaagggagattctggtctttccttaggaaagtcacggggcagtgtttctggaacaggccccgcattgctcctgctggcctgaagacctttctgctccacagctacaatgatgagggcgcccctgcccctcgaggcctcgccgcctgctttgggctccagctgccggcccccggcacccccaggcccctgttcaccctcctcagccccggggccgcagtgagacaccgtggctgccttgaattctgaaagaccttgcaaagcctgttccctgtagttggggtctagaaccatggcttcttcggctgcctttgaagtgtctattgcgcttgatttctgggtggtctcaggggcatctgaactgtcactcacttccaagcagcccatcaagtctccactccacacctgggtcccctcactgctaggctgccgtgggaacttggccctggtaggtgacttgctttcctcgctgagcacatactttgatgtgtaattactggtttggtttcctgcctggacagaaatgccccagaggtgcttctgtgtctctctctcatcagcagctcttggtgcgagttgggtgccttggggttcctgggttctgctttctgggctttgctctgacttgcactcagcgggctcaggcacttcctctgcactgagcttcactaactctgaggtgaggcatgaagccaccagacatgacctggaatcctgtcttaactggttttcccccaggagacctgcagaaggagtgtcctgagaggccctttgcaagcgaaacccaccaggcttgcagggaccctgcagatggggagccccactctgaaaagcaggaatcgggccagacagctgggtgggtgcaggggaagggatgttttgtattcttggatctcgttcatttttggccccttccttcacatgggtcccagacttcacaacattctgtcccacgggatcctcggggcactctggtgaaaaccctgctatggaatgggccctgaccagtgccctcatgtgcccacagttgagtctgggggatgccctgttcttgtcaccagtagtttctggggcactatggtgacggttggtgcgtaggaggcaagatgtcctcaaaggaggctggcaggggacatccgagtggggctgggaccagagcaattctgtgtcccctgcagggcctagagtactttccttctttgtcctggtccccagaggggctgtgttgtccagtgggcctctgctaggtagcaccagtgccctggccctgttgtggatatgtggccaactccgacccagttca

SEQ ID NO: 2583 - DNA, 4001 bp, Homo sapiens
agatactgctgttgagtgttgattgccaatcatttcagaagtaatctgaaagctattaaaatacccctgccctttgtgcaatcccacttttatatccaacagacataaataaaagcatcgatatctaaggacgcatgctcaagggtgctgctgaagcgttatttataaagaccccaaactagagattacctcaatgccaatcagtagaagaaccgtgaaaggaaatacagcatggccatactctgaactattatggaacttctaaacagagccatgaacatgaggcgctggagggctttacctgctgtattaagcaagcaagaaagatgcagagcaatgtgtatgtctgaccccgcggtgtaattccctctccccaaactgccccataagccctgtgtgagaacacaatgaaagatgagacaccttagtatagggcagtgtttccttgcatggagtgggattagacggttttggggagaggccttttcctttctacatctgtattgtttggctttgtttttaaacttcagtagtaacagtaacgaaaaaaagtaaccctccccccaaaacaacaaaaaacctttagtgtttaactgcgtagagatacacaaacagactgaggaggtgaagccatttcctgctggtagtgatcctatttcaatgtatgctgtccactcggccttgtgggatgctctgctgggaaaccccttctcgcccagctccgcccctcttagcagcccacctggcctggaggcgctctgccagcaccttatctgccgccctcccagctgcgcagcccgtgagcccaggtgtggctgacatctgcctgcaggcggaggggagcgcccgagaggccaccgcgtggggtggctgtggcctgcgctccccggctctgggcgcgcggaagactcggcatcgcttggtctaaagaagctgagggagccttactttttacttttcgcagtctccagggcacgctctgcaatttccagaaaagctctctccttccaagggcagctgggatgagaaatccaacccttctctgctccgttctgtgcctgaccctgctaacctatcctggacagaagcggtcactttgtgggagagaccatcttactgcactaaacatttcagaagcaccaacatttcctgtctctttatacgaagtaagtccagctggatcaaattctaaatacgataaagtagaagccattaaagtactagaagacaacatgaggaatttttttaaatgccacagtggagaagaactaggtttaacacaaaagcctgcacagaccgttcaatagaaaatgggcagtgccggccgaggcgggtggatcacgaggtcaggagttcaagaccagcctggccaacatggtgaaaccccgtctctactaaaataacaaaaattagccaggcgtggtggcgggtgcctgtaatccaatctactcgtgaggctgaggcagagaattgcctgaatccgggaggcagaggttgcggtgagccgagatggagcgactgcactccagcctgggcgacagagcgagactccgtctcaaaaaaaaaaaaaaaaagaaaaaaagaaaaagaaaagaaaagaaaatgggcagtgcccagggagcaggcagttcatacaaaagaaaattcaaatggcttgaaattaaagaaaaacacgaaatgatcatgaaatgccaattctggcttgttagcttggtaacgttcaagaagttggtcacccgctgtgttcactgggggagggggggcggctgggagtgtaacgggggcaattttggcctggccttcctattttacctctcccctcaggaagattcccgcctgctcccctccttctcttgcctgcagaggtcaggaaaggcttggtgcgattcagatactcacctcactcccaggaaggtccctgagccagggcactgtgcccaagccgcgcggaccctggcctccttccctgctctcttccttctgctcatcttggtttagcgtctgcagagaaagcaggaaactggtctggcccttgggaatcttgggtctttcagggtcccctgaactgctgtccacgtagctgtagcttccaagagaaaccatggagatggcgctacccctcccggggtagtggagacccatccgctgagcactaggcctgggactcaggggcttggggctcgtgggtctgcagggcgtcccggggttttcatatgccaggcagcaggcagagctggaaggcagggtgtgtgcgattccagcctgctgggcccgagggctgccgggggacgccagccaggacttttccggaaagatacctgaaggtaggtacctaccgccttcctgggtggctgtgcacttgatggtcggttcacttttcctcctgtgttctggagaaactaaactggaggacaaaggtgtggaggcaagtgggggtgcccagtgatcgctaaaaacatagccctctttgtcctccgcccgttcctcacagtggctgtcggtctctgctggggagagaacttcgggtcctagaggcagactcactagggtgggctttttggggcttccggcatctttgcttttcagaaacgcccgccaggaaccctggcgcagcctgctcttctccttctcgcccttgggagaacttggggaacgttcatgggtgttctctttctctagaactattgactcaataaagtttgaaaaggtcttatgagccaaggccaaccttgccctgagttttttctccgttgttttgagtctctttgcgttgcagctctcagaggaaggccctcggctaccaagatcccctgaggtccccgtgtgccccgctcctgccggccctgcagtcctgtcgcctgcagcctgcgggacaaactcgggccaggcgctggcgtccccgtggtgcagaggcggtgcgtcccgaccggccgcagcgggcggattctccctggggagcccctcggggcctgaagagccccagcggcgaccctcggtggtcggggccgggacccctcctgggctctcagtggccaagggcctgcccttcctgaaggaggtcaccttggaaaacgtcgggcgcttcccaggctcctgcgcgcccttgcggagcccgcgtggcggctggggcggctccaaggcggggacgcgggggcgctggccccgggctgctgcagcaccgccttcgggggcctcctccgggccacgctcccctgacccggagctccggctctccccacgcagtctctctcccgggggctcctctgtgctcggcgtctcttccgaagcagcttgggggaccagcactctcccaagctctgcggcctgggccacccgctgaagagccccatcgccagctccctgtatgggggctgctggcaactcacactcattaccggctggtgttttccccctagtgggagactcacagggggtctcgccagtgctcaagggagattctggtctttccttaggaaagtcacggggcagtgtttctggaacaggccccgcattgctcctgctggcctgaagacctttctgctccacagctacaatgatgagggcgcccctgcccctcgaggcctcgccgcctgctttgggctccagctgccggcccccggcacccccaggcccctgttcaccctcctcagccccggggccgcagtgagacaccgtggctgccttgaattctgaaagaccttgcaaagcctgttccctgtagttggggtctagaaccatggcttcttcggctgcctttgaagtgtctattgcgcttgatttctgggtggtctcaggggcatctgaactgtcactcacttccaagcagcccatcaagtctccactccacacctgggtcccctcactgctaggctgccgtgggaacttggccctggtaggtgacttgctttcctcgctgagcacatactttgatgtgtaattactggtttggtttcctgcctggacagaaatgccccagaggtgcttctgtgtctctctctcat

SEQ ID NO: 2584 - DNA, 4001 bp, Homo sapiens
gttgttggcttaagtttctctaagcttgagctggagcaaaacaaagacagcctttgaagcggcgaaacggccggtccactcggcagcccgggagcggcggccaggccgagtctacgcgagcttgctccagcagtttggggaggggggcctgccaagtgttgagctggagccagcagtgagaagaaacgcgatgggcctgggacccccactccctaacagggcacaggtgcagctcaagccacagcccaacctcagtacctcagcttgggggagggcgagagagacagggtctgggggcagctgaggccacaagagccaccagagggtacagaaagggaaggaggtgcgggggacactgaatgtgaggctaccaacttccaagccccattctccctgtccctcttaccgggctctgggatgtcctaaaagccccagttccaggatgggactgtccctccccacggagtctgggccacatttggtggtgacggacagtgagagctcctcagatggtttcgtgtgttcccatttcacctacggggcagaggctcagaggtgccagttgacgtctctcaactgtagaagcagattatcggaggccctttctacctctgccacaccaagttctaggccccaggcgggtccctaaggcctggattgggctctgagctctgctgcggggtgaagccctcgagccccgacctcccacccctcctgtgctctagcgttgcctgtaggcgcagtgacgccaccgtgcgtgtgggctcccaccagaggagcccgggtggggcaagaggcacctgttgtcctcccctggggcccgcggagcactccttactggcccaagactctgcaaacaaagggacactggacccgcagcgccttgggaccccctgggccctcgggggtcctgcaccgcgcaagccccaccacgccggcgctgggcggagggtgacgcgaccccagcccgggcgacccctagacaccgcggagggacggagcgcgggcccgggttggcccgcagctcccgccgagcgcgaagccgggcatcgcctgcaagctcgtagcccacgctcttgccctcttcccctgacgctccccagccgccaccccgtcccttctgcagaccgagggaagacaaggggacacacaagggacaggagaggagagcaaccagggaagcgacccctctcctgtggggctgcggcgggtgggcggagagacaggagaggaaaagagaaaagggaagagaaggaaggggcagggggcgagaagccgggctccccggaccatcggcgcagcccgcggccgaaagaggaacagtggatcctacaaagcgcattgagcaagttcttcacacccgcgcagcccctttcaggaaacggcggccgcagaggaaagggccgcgcgctctggacccggagtctgtgcccggcggcgccgcggttctgaaacctgcgggatgtcacggggcggaggggcggctgccgacagctgtcacaacaaattagctgagcccagctcgaggtggaaaccgcagcaggaagtgggacgacagagccgtaccgggctcggcatatttcaggcaagagacggcgaaaagagtttcgagataaacgcccgggaagcccctggccgccaaaactttttgtctttccttttctcgaagctcgcgcggacgcccagcctcaccccttccgcgccggccggggagcgctgaagccgcgggccgggctcgctccccttggcccgcgccccgaaacccaccccgggcccctctccgccccacacagcgcaccgactgccacgagggctggaggggacccggcgccggcaccttgaacctccctgcagggccgccgagcccctgtccgggccgcgccgcagagccgcttacccatggcccggagaggtcccgcggcgcccgccccgagaccctcagcgcgcggctgtccggaccccgcgctctctgagatactggctcgcggcgcggcccgccggccacctccccgcagtcccgccccgtcccgcccctgctcgccccactccgggctcccattggtaagcccggcttcgtcgcgcggagaaggcggggggcggggaccgcccttgagtccggggacctctgggaattgtagtgcgcgcccctcgcctctaggctttcagactggagcccctggaataggctcctcacctagaggagcggaggcaggaccctcagtaatcattgctgccttgtgcctcagtttccctggaggcaaaactagagccttggaaaaagcctccttgctttcagcagagcactgaggactctgtggagcgagcaaagtgcttctgactttgatttgaaagtggccctgtgcatttcccagtccccacctagcccaacaaagaaggccaggtgaggccgggagcggcggctcacgcctggaatccctgctttgggaggcggaggcgggaggatcacttgagcccagaaggtcgaggctgcagtgtgttttgatcacaccactgcactctatcctggatcctgggcaatagacggagaccctgcctcaaaaaaaaaaaaaaaaaaaaaaaaaaaaaaaaaaaggagaggtggttagtgtgagctagacaaggaccaaactagtaaatccttggcctaggctctgtggccaggcctgccagtaatagtcaatgtccacacacataatgcagacagagtgtggcagctacaagctgagtagtccaaagaaggggcatgagttcaggctgtgggaggtgggaatgaggcctagggcgaatggaggcaggaggaggtgcccagccagccatagcagcaacctggacctgtgcaggccaaagaggaagaaatggaggctcagggtttcagtctcagcaggtggctagctaggatgggaaccctgttcctagcacatagaagctacacaaaaatctttgttgatgaattttaatactcataatagctctatgcacttgacaccatcattgtcctcattttatagcgtaaaactgaggtctgagagattagctcaagtagcacagctggtaggtgttggagccagagctagacccaggaagaggagccctcatacccaggcatccccccacccgctttgcacccattactaaccactcatcatactggtgcccctcctcacactaaacgaagggaccagggctgcagtttggtgaacctgaaaccctggcccttaccctttggccctgggatggaagatgtctgcaggctcagtctagagcagacgaccctgtgggctctgcaggataaatcccctgtctacctcataatgggttggcttgtaagagccagcacctgtagaattggtaatagacacccagaacaatcataatggtaattataacaatgcatcccactttggcaagtttacaagccactttcccctccaggaaagctaaggctgtggtggaagacactatgatgggatgccatcaggaagcacctttgtacattctggaagcattgattggcaggcactatgcccaaggttggggatggagctctggatgcagcccccggggtcacaatctaggccaacccctcacttgtgggttggatacccctaatgacaaggaactcactatcttataagacagcagctcatcccaccaagagttagggttattctgccatccgggcagctgggcacattctgacagacaagggctgttgtgcaaagcctcagcaagtcaacacctgcctgtgccagcctgggaacgataggatctaaatttaattgcttcctgaggcaactgtttgcaatagaaagtaatttacaatggccagtaaatcctgcagaaaacagacatctccattcatctggctaaaagcataaacacttccattgctcaagcctccatctcacacacctccactccggcccaaagccaccctcctctgcaccctccaaccacaggatcccaggccaggacgcctctgtgcctacagagggggtcag

SEQ ID NO: 2585 - DNA, 4001 bp, Homo sapiens
tacaccaaaagccttaccctttaaacacctttaactatcctgcaaacagtaaatgcatcattggccaccacctccaatagttcgtctttttttttttttattttttttatttttattggtctctttgtgtgataatgacctacacatggacagggtccaaaccatctggaagatgtctgattccaggctgaaaagcagttctcaacaaaactggtcttctgcagccaccacaaagcaccaggaaaagggcacctccgcggccatccccagccaggccagcacagcgctccgtgcccgctgaaccgtcccaggcagtcctctgatgacccaaaccaccaccacctttgggcccagagcaggacaaatgaaatttcaacaggggcctgccctgtgaccgaaaattactcagcttcacagcccctgaatgcaaggagaggtggtccccccagaaccaacatgccccccaaggtgggtacgcccacggttctgggaaatgcatacctcaggtaattcacaggtgcgatcccccagtggaggcggggcagcctgaacttctggccctgcaggagtgggaagaaatcgcttttgtctttccgacaactgagccttccacctggggctgggagggcggacagcaggaccggctcttccactccccaccgcggccccccgacctggtcagtagctctggcgttcagacaaaaggtcccctgagctgggggtggggggcaggtcgagagtaggccggtaaatcagacttcgcagctccttaagtcaccagtcctgcatttgggtgcagagattccgttttaaaaattcgaagcatcgctttggttcgctctttgttcgcgggcgcgggttctcgctcatccatccatccatccatccaaccatccatccatccattcattctttcttgacgcactcgctcgctccccggtcgctccgggcgcattaccgcttcttcttctgcttgagggacttcctgcgtttcaggatcatctcatagagcttgtccatgccctcggtgaggccctcgccgatgatggcgcacgccggctggacgtgataggtggtggccgggataagctcgtgcagcgccagctgcttctcaatctctgccaccggcagcgacttgggcaggtcctgcttgttggcgatgaccagcagcggcgtgccctggttctcggcgaacttggtcaccttgtgcagctccgtcttggcctcctccagccggtccacgtccaccgagtccaccacgtagatgatgccgtccgtgcagcggctgtaggacttccacagcggccgcagcttctcctggccgcccacgtcccagaagtggcagctgatgcccttggccgtgccgttgctcagcttgatcttctcggtgttgaagccgatggtgggcaccgtgttcacgaactcgttgaacttgagccggtagagcaccgtggtcttgccggccgagtccaagcccaacatgacgatatgcagggactggaaggccgagatgttagaggagatgttgcccatggctcctggctgcggcgccagccactgcggctgcggcgggagggcgccgccccccgagcagtcacgggcccgacgcggccgggcgcacctgggccccgcccgccgccgcccgcaccggccccggggctcggcgtccccgcgggcgcacggcttggcgcgctcagacgccgcagtccccgcgccctcgccggccgggctcgcgatcggcgggcatcgcgtctctacgcgcggctttgtctcccgcgaagccgcctcagatgttcggcgccctccccaggcctgggctcgctctgtggtttcctcgggccgcgcccccgcgctccggcagctgcccgggctctccgctctcccggcgcccggcgctcgcctctggcctgggacggcgctgctcctgctcctgctcccgctcccgctcccggagcgcgggcttccccgggagtcgctgtccgctcggcagcctcacagtccccgcgccgccgcagcagccgccagcctgcagcggccggagagctcccggacccgccccctcgcgccccgccccggacccgcccccggacccgccccgggccccgccccgcccgccgccgggggtcaggcgcggtcctccccgcccagccggccgttttcgcgcgcttcgctgcgtccccgccgccccccgccgccccccggcccctcccgcgccgcgccgcgcagacacaatgggcgcggagccggctcttcctccccagcggctgacgcgtttgcaaaaatagctctcggctcccggaatccccgcccgggtcctagcccgccccctgcccctccgggccgcagccgtgggcgacgcagcctgcctgagggagtgggtcccggggtcccagctctgtgggcgcgaggcggggcagggcggcccccagggtgactgggagagcgccgctctggggagtgagggcggcgaggctggggcctccaaaccccagaagggacgggacggggctggcctcggtgagctgccagcctgcgctctggatccagccgggcgcgtcccctcccaccctcgcgccgcggctgtcgccggccccggcccccagtgacgcccaggctcgcctcctgcctgggttccagggggctgcacccggccagcgccgccctccggagcccaggcctgtgcccagggcaccctggaggcccagcctttcttgcccggtggcggcggttggggcagggtcggacctaggccgcgatgggggattagaagacctacctgccccaagtagctcggacagctcaccctcccagacacgcctgggctacctcatttcgtccgcatcgactctgctgacatcccaggggaagcgtcagcatttcgggagagcaccccttgccacccgactttgggaactgagaaccacctgcccgcaggtgaactactccgcagaaatggcaacaccagccccgggggctgaaagaaaatgtgtctacagcttggagctggtggcgcagtgggttacaaacactgatattccacgggttccacctcctgtcacctcagttcaatggttttattctggtttgtaaacatgtaacaaatgtatatcctctctgggtgcggagaaaagtgagagtatattatggcaaacacacagatctggggagagctgctccgcaggagacagcaggccgcagcatgggcgaccgcatcttcccagctctagcttatgagacagaaacgacggaaacggggtcaagggagaagaaaatgaaaatgctaagaatttatgaataaaagctagaattttagagaaatactttatcaccttctgttcacaaaccacgaaaagacatatgatatcgttggtaccaaagcatgtgagaagacctcacctgtagaaggaaggacaagccaccaccacccctatccttggaattcccaaggtggcagccggagcgaccatccactctactgagtggatttggggctggaaacgaagtatcaggctggaaaggaccctgcctatcattccacccaacgttgtccagtgaggtaacaaggcctaggcgcccgtgacggctaaggcagaacctagaggcccactgcctgctccaggaccaagggtctgtatgcacaaaactgggcacctgcctgccctcttcctcacatcccactctacccacacgctatttccttcaatgaggaataaagtgagccacccgaaggatagagttcaacagaaaatattggctgcactgtgccacttacttcattttaaataaaaatggaaatgtattcactgacatcactgaaaagttaaggataaaggtcctcttcaggcatggctagacccaggagctcaaaaggagtctttcgagcaggtgtctctccagtcctcctccgtgttcccctgtgttgattctttttccttctggcagccttggactcacatccttggtttagatcctggaaaggaaaaggtacaactctttcccag

SEQ ID NO: 2586 - DNA, 4001 bp, Homo sapiens
catttacaccaaaagccttaccctttaaacacctttaactatcctgcaaacagtaaatgcatcattggccaccacctccaatagttcgtctttttttttttttattttttttatttttattggtctctttgtgtgataatgacctacacatggacagggtccaaaccatctggaagatgtctgattccaggctgaaaagcagttctcaacaaaactggtcttctgcagccaccacaaagcaccaggaaaagggcacctccgcggccatccccagccaggccagcacagcgctccgtgcccgctgaaccgtcccaggcagtcctctgatgacccaaaccaccaccacctttgggcccagagcaggacaaatgaaatttcaacaggggcctgccctgtgaccgaaaattactcagcttcacagcccctgaatgcaaggagaggtggtccccccagaaccaacatgccccccaaggtgggtacgcccacggttctgggaaatgcatacctcaggtaattcacaggtgcgatcccccagtggaggcggggcagcctgaacttctggccctgcaggagtgggaagaaatcgcttttgtctttccgacaactgagccttccacctggggctgggagggcggacagcaggaccggctcttccactccccaccgcggccccccgacctggtcagtagctctggcgttcagacaaaaggtcccctgagctgggggtggggggcaggtcgagagtaggccggtaaatcagacttcgcagctccttaagtcaccagtcctgcatttgggtgcagagattccgttttaaaaattcgaagcatcgctttggttcgctctttgttcgcgggcgcgggttctcgctcatccatccatccatccatccaaccatccatccatccattcattctttcttgacgcactcgctcgctccccggtcgctccgggcgcattaccgcttcttcttctgcttgagggacttcctgcgtttcaggatcatctcatagagcttgtccatgccctcggtgaggccctcgccgatgatggcgcacgccggctggacgtgataggtggtggccgggataagctcgtgcagcgccagctgcttctcaatctctgccaccggcagcgacttgggcaggtcctgcttgttggcgatgaccagcagcggcgtgccctggttctcggcgaacttggtcaccttgtgcagctccgtcttggcctcctccagccggtccacgtccaccgagtccaccacgtagatgatgccgtccgtgcagcggctgtaggacttccacagcggccgcagcttctcctggccgcccacgtcccagaagtggcagctgatgcccttggccgtgccgttgctcagcttgatcttctcggtgttgaagccgatggtgggcaccgtgttcacgaactcgttgaacttgagccggtagagcaccgtggtcttgccggccgagtccaagcccaacatgacgatatgcagggactggaaggccgagatgttagaggagatgttgcccatggctcctggctgcggcgccagccactgcggctgcggcgggagggcgccgccccccgagcagtcacgggcccgacgcggccgggcgcacctgggccccgcccgccgccgcccgcaccggccccggggctcggcgtccccgcgggcgcacggcttggcgcgctcagacgccgcagtccccgcgccctcgccggccgggctcgcgatcggcgggcatcgcgtctctacgcgcggctttgtctcccgcgaagccgcctcagatgttcggcgccctccccaggcctgggctcgctctgtggtttcctcgggccgcgcccccgcgctccggcagctgcccgggctctccgctctcccggcgcccggcgctcgcctctggcctgggacggcgctgctcctgctcctgctcccgctcccgctcccggagcgcgggcttccccgggagtcgctgtccgctcggcagcctcacagtccccgcgccgccgcagcagccgccagcctgcagcggccggagagctcccggacccgccccctcgcgccccgccccggacccgcccccggacccgccccgggccccgccccgcccgccgccgggggtcaggcgcggtcctccccgcccagccggccgttttcgcgcgcttcgctgcgtccccgccgccccccgccgccccccggcccctcccgcgccgcgccgcgcagacacaatgggcgcggagccggctcttcctccccagcggctgacgcgtttgcaaaaatagctctcggctcccggaatccccgcccgggtcctagcccgccccctgcccctccgggccgcagccgtgggcgacgcagcctgcctgagggagtgggtcccggggtcccagctctgtgggcgcgaggcggggcagggcggcccccagggtgactgggagagcgccgctctggggagtgagggcggcgaggctggggcctccaaaccccagaagggacgggacggggctggcctcggtgagctgccagcctgcgctctggatccagccgggcgcgtcccctcccaccctcgcgccgcggctgtcgccggccccggcccccagtgacgcccaggctcgcctcctgcctgggttccagggggctgcacccggccagcgccgccctccggagcccaggcctgtgcccagggcaccctggaggcccagcctttcttgcccggtggcggcggttggggcagggtcggacctaggccgcgatgggggattagaagacctacctgccccaagtagctcggacagctcaccctcccagacacgcctgggctacctcatttcgtccgcatcgactctgctgacatcccaggggaagcgtcagcatttcgggagagcaccccttgccacccgactttgggaactgagaaccacctgcccgcaggtgaactactccgcagaaatggcaacaccagccccgggggctgaaagaaaatgtgtctacagcttggagctggtggcgcagtgggttacaaacactgatattccacgggttccacctcctgtcacctcagttcaatggttttattctggtttgtaaacatgtaacaaatgtatatcctctctgggtgcggagaaaagtgagagtatattatggcaaacacacagatctggggagagctgctccgcaggagacagcaggccgcagcatgggcgaccgcatcttcccagctctagcttatgagacagaaacgacggaaacggggtcaagggagaagaaaatgaaaatgctaagaatttatgaataaaagctagaattttagagaaatactttatcaccttctgttcacaaaccacgaaaagacatatgatatcgttggtaccaaagcatgtgagaagacctcacctgtagaaggaaggacaagccaccaccacccctatccttggaattcccaaggtggcagccggagcgaccatccactctactgagtggatttggggctggaaacgaagtatcaggctggaaaggaccctgcctatcattccacccaacgttgtccagtgaggtaacaaggcctaggcgcccgtgacggctaaggcagaacctagaggcccactgcctgctccaggaccaagggtctgtatgcacaaaactgggcacctgcctgccctcttcctcacatcccactctacccacacgctatttccttcaatgaggaataaagtgagccacccgaaggatagagttcaacagaaaatattggctgcactgtgccacttacttcattttaaataaaaatggaaatgtattcactgacatcactgaaaagttaaggataaaggtcctcttcaggcatggctagacccaggagctcaaaaggagtctttcgagcaggtgtctctccagtcctcctccgtgttcccctgtgttgattctttttccttctggcagccttggactcacatccttggtttagatcctggaaaggaaaaggtacaactctttc

SEQ ID NO: 2587 - DNA, 4001 bp, Homo sapiens
aatagaaagtggtgataactctttttctggcagcactagagctcaattcacagtcttgctaaacctcacagcagatgaaacactagctttgctaaaaataatacaaaatgatggatgttaaaactagaatagatcttatctactataagtaccatcagtcttacagcaatgtacgttttaatatttgcaatgtagaaataaagtttacaagatttggaagctccacagatccctggtgttctaggtgagaaaacctagaccagaaaacctgagagttcaagtgactgcttcccactctcctgctcccaacactaacagccagtccagtcagagacagtgctgattagaactgattttctctactttatgaaaaatcctcttatcagaaaaattgatactgccctttctttcggtatcacgtgacctacacatctgtgtgtgtgtgtgtgtgcgtaaaagatacattagggatcacaagttctagttctgcttgcttcccctaagcttcttaaaagagcagctagatcatgaaggaggaggtggtagtagtaggtgtacataatagatgccaccattcacgtaagtctttattggaaaactgggacgtgacaccatcagcttacacaacagaaaaacacaaactaagttcctgacagcggaatgatgaaccacccaacttgagttaaaaagaaacaaaagtacaccactgtatcttaataagtatccagtctttgggttaaaattgtattctctttccccagttttagtcattttgtaacaaattttaacaagcctgataggtatttcatggccatgtctgaagttggctgaacttaagcatccctatataacacactttacacttagtaacttgctagttacctatggttaacaaatgtttcatatggtatgtttttaaaactttcagtgaaacactttaacatttttaacccagcaaaacaaacaaaaactgtgtctaataacccacacgagtagaaaaatgaccttaagcttaaccttaaacacagatataataagtaaaacaaatggagagaagtccatctctattcaggaggcagaagaaccccccctgcccccaacacacacaaagacgggtggcagtggagggcaggctcataaaccagaggtgtaatggacaagtcgagcgattcctcccgttttccgcattctgcaaccctcggtcgctcagtggtgcggttagggcagcaatctataaccttcattccagaagaccccagcacttctatgtggtgtccaaacacaactggtgagcaaagaaagggctgaaagacaggccaggccgtgctactcagggacgtcggacctagggcaagaaacctttaccactctcattcgaaatcggagcaatgggtctattacggaaaagacttcttaggaaggtctcctaagacaaagggctgcgagtcaggaaccatccccaagctcgggagccgggaccgaaccgtcccgggcccgtatccgcgcagcctgcaccccgcgctgagctggcgcccgaccgagccgcccacattccgaagtattcggagacccccacctagccggcccgagctgaccctctccccaacccgtacgcccgcggaccgagctcctcaccctggtgattgaacagtctccatattctagtgaagagaattcccattctcgggcagcggaccccccccctccagacacccgggccgcctggcttcccccggctcaggctgagggggaggagagagacgcgctggagcctccgcctctgctgctgctcccgcgctggtcgcgggcccgcttccagggaaccggagggaggccgaagcccaggccgccctgccgcgcgcaaggccccgccgctgccgccgcggcactcgcctggctcgcggacatcgccgccgcgttgtctgcgacgagcctcgcgggccaccgtcctcccccagctcctctcgggcggctgcggtggcgacgaccacgcgggcgggggaagtgaaggggcgggcctggagggacgtgagtgcgcaggcgcgcggccagaggggcggagcgtaggaaagggcgcccgccctgtcctcgcttatttgcataaccaagactgcggaaggcgcaggactttaccctgggactgaggctgtgaagaccgcaagttggggcagatggcttccgactgcttgctgttgcgtccccgagtatttatatttccctcgaatcttctccactgcgccataatgtaaacatataattgagtaccccatgtccatccccaacccttcacatacactacacttaaagttccacgtcatgactctttaagacattgtgtcccctgtgggtctttgagggaaaagtctgctgccctctgacactcagctgaagtcagtggccttacctagatagtcaccttaaagccatttttgcacttcagggctcttttctctccaatctcttaactctcacgtcagtattgcccaaaacaacgattttgatcaagtcactaccctgtttaaaaacctttagtggccaccaaagctccatccctttctgttctcgttaaccttagtaaaaaggaaaataaagaaaaattgggagacttgtaggagccatttgaactgctttgcactcccatccccaacagctgaatgaaattaagcaaaatcagcaataaaccgcaccttcccaactcacttctcctaactacccagtattttacctcaaaatatagaaaagtaatttcgttgacttcttttggggctttatggttaaaaagccaaagtttagaggagccatacatgaagggaaggaaaatcatagtaatccatattaatttatgtattatcatgtctggatttacttaatattctgtacactgtttagaagaacaatgtagtttgtataaccaatttgcattaactctgtaatatttccattctcgcacaccgtaggtaatgctttggtagctctaagactttttcagactcccacacagatgtcaacttatgaaatggatgtcatatacacattatgtgatggcggagcttcatattttacaatctacccaaggaaatggtctcccaggttattttccgagtgaagaaagaagagagagagagagacagagacagagagtttaaagaccaatttatctatgattacagagaaatgcaaaatgtcattggagagacttctgacttcaggcatgagagagtaggatggtttgaatatatcctcctaccattagcaaatagaaaactgcacaaagtacaggcaacgacatttcagatattgaaaaacacatcacagtactgtgattctttgcaaaagagaaaggaacaggtggagtcttaccatttcctggactttatccctaaaagcaattcccagtcaactacggaggaagtgggaacccaaatgagaatctggaaacctcttagaactgaagacgcatatcagcattcccagagatcaaggtgactagaatttgtgaagcagagtaactggaaggagggagctacacagagaaaagctctggaaacctgttaaggggccattgagtctttggctgcatatcaatttgtgctcgtgcagtatgaacccccaagaggctggtcagtcacaattcctgaggaaaaataagtaccaggaaactgtaatgcaaatgattcccagagattacaacgggtcaggaatcatttgagttcccttcagccagagtgaagagaactgaatatataggacaggggtgtccaatcttttagcttccctgggccacactggaagaagaattgtcttgggccacacataacataagctaacactattgatagctgatgagctaaaaaataagtaaaatcacaaaaatactcataatgttttaagaaagtttacgaatttgtattgggccacattcaaaaccatcctagggccgggtgcagtggctcacacctgtaatcccaacactgggaggccaaggtgggcagatctctaga

SEQ ID NO: 2588 - DNA, 4001 bp, Homo sapiens
gaagcaatgaggacaaataaaaactggagttaaatagatttaattatatttaatgaagtacaaaaataacacttcagtgacaatgttttgggtgcttttcatacaacaaagttcttttgttttttttttttttttttttttttcagtaacttggcaaaggtcacaaactagtgagaatggaaatttaaacttaactctgcttctttccactataatatacactagccaactaaattatacaaccgtatgccttgcaataaacttcaaccggccaatatttcaacttcagacagaaaaacaaaattattagaggacgagtggactatactttctgcaacagaactccgtgcactacacctggatacaaacttaaaaactgagaggctaattattttacctataaaagaagaaatttggactatgcgatgaaaatctttgtccctcaagattctgtgtagaggaattggtggacagcacatctttatttgtggatgaaggccattgaacatggcctattttaattatatgcacttttcactgtctccttttaatggtgggtgtttcgcattttgtttaatcttcacaatatttcatccccagtgttcaaggacttgaagatatttcttcaagagtacccatttaatcaaacgatcctttttaaaaatacgtctcctgatcatggatcaggacgctccacttagaaaaggcaaagggcgggagagcaaagtaagatgcaaatgaggactctgggtgaaagcagctgccagcctgagggcttagcgcgagggaaagggagatgggtggagacgagagccacaccctggctcaactttactctggacagactttcaaggcgtcggcttcaatacctttaacgatcaagtaggcgatggcgaggaggaaggcgagaagaatggcgaagagcagcgagcagagaatagagaggacctggaccggccaccgccgaggctgggctctgctgcccgcggccgcgggaaagataccattgcgcttatcgggcagaacgggcgacccgttcccgtccggcgggagcaccgagcgctttctgggctctgaccacgccccagccgagaactccgcccgcaggtcgcgggccacttggtcgcatccctcctcctcgtcgacttcgccttcaccccagctgtccccctgagtaaaggaggaatacgatggccgagccacagggcccggggtgccgggaccgcggcgccgcagagccgaccgccacccgctctcagcaaacgacatggcgcgaaacacaacgaaacccgcggagaacgagcctctcccacctgccccgccccgggtccgcaacagccaatccgcggcagtggccgctaccaccaggcctcagagcccaggggtaaaccacggagagcaagggtgggcggcgggttgcaaaggaagccgcagggccaaaggagaggcggaatgcgcttcgaccagagctcgaccccagggctgtagccggaaaggggagcaggaaagcgcgcagggagaagcgagcggaggccgaaggctgtcgagtatccactccctgcggggcttcgtcccggccggagacctccgccacccccgcgtcaccaacgggagcgcgcgccccgacagccccaaagcctcatcttttcgacgccgggtcctagcgcccgctcgcgccctcggagacacattcccgaacctatttgtcttctcccttcttccccactacgctcacactcttctccaggttcccccattaagggcacctctctacctggcgctctcgcggttccttaactgctcacccccatctccctttagtgtggttctccccacccgtactacaacttccctcccgctactcgacacgcctccttccccaggcgcgcgctctccacctggtgcgtacggagatcgaaccctctcctccgaacccctcctttcgccttccccgcctcctcccctccgcctcgagcaccgcgcgcgcgcattcggtcccagccaccgctaacactacaggctgcttacccccgccccctccaccctacccctggcggcctcaggtttgtggggcgtacgtaactcgggcggggagggtgaaggtggcagacccccactgccccaccccctacggggtgaggcggtctaagctcgggaagctgggacactgttgtcttcccttcccctggggaagttggtagagttttcccgacggaggactcggcgcagaaacttcctccgtcctcctcctcccccccccccatgcaggcgacgccgagtgaggctgaggctgggggcgaatcgccgcagagctgcgtgtcggcggcgcattctgattggacagcggggaagcccgtcagcctgttggccccgctgatcccgccccgtagcgcagggcagcctttaacctttagccccagtgggcgccagccactcagatcgcttcttgttggtatgtgtagcggcagtggccgccggcggagcagtctgagcccgacgatgaggccggggacgggagctgagcgtggaggcctcatggtgagtgaaatggagagccatcctccctcgcagggtcctggggacggggagcggagattgtccggctcaagcctctgctccggctcttgggtctctgctgacggcttcctgaggagacggccctcggtaagggatcagtggggcagggggaaggcggcacaatgaaaaacggagtgagaaacaggaagctttctccgaaaggagaagaagataagagtggacgaaggaagaactcgagatggtgggatatgttctgagggagagaagtggagggtggaaatgcacaaagagaaggatgtgagaccctggaagttccccgtgggcttggcctagacagatgcgtggtgaaggtgctggctcttgggcggggtgagcgtcttggagctttaggcccgattttagctgggagggggaggcaggggcttgatactgtaagactttaacagcggctgccaaaatttgttttcattagtcgtcggggtggtctgcagggggaactgttgggacaattggcaggagataattaggtggttttaatttaaaacatagaacaatggactcatcggtaaagaaagtagttgtctttttaaactgcgttaaaaaggatgaattagttgtttgcatttagtgtccgtgagtgacagaacctcagtctttgaaaatgtatttttggcagaaggaattttacctgtcttaaaggttatgttaggaaataagtttgttaggagtgaattgtgcctgggtagccatactgtttgtgttttgtaagaccgactctcacctgagttaattggatagagcattttaaagtttaaaatcagtagtgttataaaataacaatagctggctatcttttatatctgcatgaaataggagagttgttgttttcaccataacagttttaaaattagtattcaatgtgtatcctccaagcttagcaagccaattagtagctggttaagtcagtgcttaaaaaaaagagagagaaaacctatgatccagcggtccaggattcatcttaacttttcccatttttttacggaatttgcaagctcgttttaaatactagcagaatgcgttttgtttgaaacaaggtatagactaatccaatgatgttattacacataagcttaatattatgtcgcttcagataactgatctgttgaaatgagatttttgagaagcatttagtattatttgctcatttaaaaatgttcactgtttttcagatggggcaccctggcatgcattatgccccaatgggaatgcaccctatgggtcagagagcgaatatgcctcctgtacctcatggaatgatgccgcagatgatgccccctatgggagggccaccaatgggacaagtaagactgtttttgttttattttgcatttatttatttgtttttgcctcaggtattctatcaagatttcagaatctaggtcagtagttatagctgtttaatg

SEQ ID NO: 2589 - DNA, 4001 bp, Homo sapiens
aatggttttccttttattttgcattcttttgaaaatgttttcaaggtgtcttcaaattcagcaaaatctaaatactataaaaaataaataattcaattcaacagcaaaacaaacaaataatccaattaaaaaacagccaaaggatctgaatagatatttatccaaagaagacattaaaaagaccaacagatacatgaaaaggtgcttaacatcactaacaatcagagaaatgcaaatcaaaaccacagagacctaattacctcacacctgtcagaatggctattacaaaaaagacgaaagataaaaagtcttggcaaggatgtggagaaaaggaaacacttgtgcactcttggtgagactgtaaattggtacggccattatagaaaactgtatggaggttcctcaaaaaaataaaaatagaactaccggccaggagccgtgactcaagcctgtaatcccagcactttgggaggccaaggcgggtggatcacgaggtcaggaattcgagaccagcctggccagcaaggtgaaaccccgtctctactgaaaatacaaaaattagccaggcgcagtggcgcgtgcctgtagtcccagctactcgggaggctgaggcaggagaatcgcttgagcccaggaggtggaggttgcagtgagcagagaaagcaccactgtactcctgcctgggcgacagagtgagactccatctcaaaaaaaaagaaaaaaaaaagaaaaaatggtataggccaggtggcatggctcatgcctgtaatcccaacactttgggaggctgaggtaggaggatcgcttgagcctaggactttgagaccagcctgggcaacaaagcgagaccccatctcaaataaataaatttttaaaagaaaatgtgttatataggtagggtgcagtggctcatgcctgcaatcccacaactttgggaggctgaggcaggaggattgcttgaagccaagagttcaagaccagcttggacaacagagtgagatcctatctctacaaaaattagaataaaacctagctgagcatggtggtgcacgtctgtagtctcagctacccaggaggctgaggcaggcagattgcttgagcccaggagttcaaggctacagtgaaccatgatgatgccactgcactccagcctaggcggcagaacaagaccttgtctctaaaaagatttttaaatgtaaattttttaaaaaagaatatattcgccatcacaccaccaaattccaaatctgcagttgcacggtgggtgcctcatccctgctccaggcccgtggctctcgcaacctgcaggtggttactcacacagttaagcagcagcaagcgcgaaccatttctttagcaccagaaagtttaaggcctgggccctacttgtcaaagcttttagcgtaggaaacctaggccattaccagacaatgagttaaaaaaattatgatgcagccactcaatgaaatactctatggcattcaaatgtctagggccgatcataggcagatgttcatgctatattattgttggcagataaaaagcaagctacagaacaatgtatcatcccattctgtaaaacaaactacaggcatgtgaatatatttttactatacatagaaaaaagtctgggagggaaatttcctttttatacttctgtagtgcttgaatcttttaccgtggacgtgtattgcttttataattttctttcaagggactttttaagtggctttaagatttgtttagttataaaaccaaaatgtaaatacatggaatattatataatagaaaaatagctccaacataacaatagaagaaacattacaaggcactaaatagtttgttgcattttaaaacacaagttttcaagatctgtttctctgtgacctctgctttgtataatatacctacctctttcactagtccaagtaattcagattcatgagccagaatgtcccccatattgaactgttactggtaattaattctcacagcaaaaatctctagaaggcaaaaatacaagacaacagctttcatttcaaccacctatgaaactacaaaaaggtggttgtggtgagcagaataatggcccccaaagacatccatgcgccaatccccagaacctgtgaatacgtgaggttacacggcaagggggaattaaggtgcagatggaattaaggttgctcatcagctgacctttaaattgggggatgatcctggattacccaggtgggcccaaggcagtcacagcagagggaggggggcagacggaggcaagagggtcagtgccagcatgatgagatgtgagaaagactcaacagccactgcaggctttaaaggggataaagtggcataagacaaggagggtaaggagcctctaaaaactgcataaggcaaggaatagatcctcccactgcatccagaaatgatccagcactgcagacaccttgacttcagctcagtgaaagccatttcagacttctgacctccagaactagaagatattaaatctttgttgcttgacaccactcagtttatggtcatttgttcagcggcactaggaaatacaatggctaaagtcaaaagaaactcttcctactctttctactagccctccctcaaggtgtacccaaagcagtcattccccatggcccacaccccaggctcagcccaaagcagttgcccgtaaccccagaggaatgaaaaggtctgggctctaatgttaaccatgccattcactggcacctgatctgagacaactcactgaagtgcagagcctttcttcatctataaaattcagaatgtgtcagaactcatcgaattttttttttgagatgggatctcactccgttgcccaggatggagtgcaatggtgcaatcatagctcactgcaagctaaaactcctgggttcaagggatcctccctcctcagcctccccagtggctagaactataggtgcatgccaccatacccaggtaatttttttttttttttttttaagtagagacagggagacagggtcttactaagctgccaaactcctgggtaatgcaatcctcccgccttggcctcccaaaatgctgggattataggcgtgagccaccacactcagtcagatctcttctgagtctgtaaccttacatttttctgccactgcctccccacctcctttctctccacttcaatccaatttctacacttttaacaagtgagcattcccctcctgcttgggaccctcctgtggttccagcgccctccagatgaaggccaggctccttaggctcaactcccaaagccctagacaacttggcctctgacacactcccatttgttctgtaaacctgagccacactggccactgtgtggttcctgtggacacccactgaacacccaaagcacacgcctgccctcgtgaactctggctcactgcccttccttcagatacgtctcattcaggtctctgcctaactgtcacctcctcagagagtcttgccctgaccaccctttctaagaggtcggcccatcacttctcagccctttgtactgcttgatttttctcaacagcacctgacaggtgttcccctgtgcctagaccagtgcctggcacacagtacaggctcaaaaacatggacggagtggaaattgattccagacatgaagaaaacagcgcaaggaaagggacagaacctgaaggagacgggtatggggttattttagatagagtggttgatggcctcactgggaatgtgacatttcagcaaagattgagcacctggatctggggaagatggctttgttagtgcacaggcctcaggctgaagagctctgcagtcttggggtattgggatgtagctaggggtgaggcagacagcagcaggcaatggggggccggggccaggtcaggtgggccttacagagctggtaagtggcttggacattaggctgacagtaacaggaggctcagagagagtatggaggaggggactgacaccactgatgt

SEQ ID NO: 2590 - DNA, 4001 bp, Homo sapiens
gtccgccaccaacgcccagctaatttttgtatttttagtagagacagggtttcaccaggttggccaggctggtcttgaactcctgacctcaagcgattcacccacccaaagtgcagggattacaggcatgagccactgcacctggcacttcttataaccctgttcacaaagacagggagctgtatttcaacttcatatccccagaacctaacagagtgtctagtaagcaagaaaggtactcaaggcatataatgaataaatgaagccggagctgaggggatgtcattttaaaggccctggaacgggaaaagtgagtttctgagaatttgaaaccttgaggccaacctcaaggcctttgcgcatattactctctccgcctagaacactcttccctctcttcacctggttaaccactgtgcctaataaacatcacctccttagagtagacctccctaagccgtttaaatagtatctgctgtgatcaactgtcattgaatgtgagtgctgctgggtatcctattactcaacattcttagaaattacagaattggccaggcacagtggctcacacctgtaatcccaacactttgggaggctgaggcaggcggatcacctgaggtcaggagttcgagaccagcctgatcaacatggtggaaccccatctctactaaaaatacaaaaattagccgggcgtggtggcgtctgcacctgtaatcccagctaccagggaggctgaggcaagagaatcgcttgaacccaggaggtggaggttgcagtgagccgagatcatgccactccactccagcctgagcgacagggaaagactccgtctcaaaaaaaggaaaagaaaaagaaattacagaattttctctaaacttttatatcataataggtatcatttattgaaggtatatggtatgccaggcaatgtgcaaaatgttttacatttaaccttcatagtaaacctgacaggtgaatatagtttatattttcccattccagatgaggcaatttgaggcccaggaagtctgacacactcccaacagccacagtaagtgactaagcggctgaaaagaaccactacacagtatttcccaaagtctggaccacctaaatcagaatcagctggcacgcttgtgcaaatgaaaattcctgcctccaccctggtcttactgaacaccgtggcaggcaccatgcccagaaatctgccttttaaacaagctccctgagtgacttttacacactctcaagtttgagaaccagtgctctcctttatgcggaaactaagaaaaacttttccagttacatttggggattgcagcggcagcttttgaattcctatataagaaagatttagggcccacaaacgggtgggattatgggatttgtatggaagccgaatctgcatagcacgcatcctgtttttcctaagattaggtgaagtctggacttcaactgggtgcctcaggaacgcggctagcagatggagattatcagggggatctaaatcccggataacccgctcgcgccgccaccaccagctggatggcttgagggaccccctccaagtatggcccactgcagcaaagatcagggactacttgcgggaagcagctgggcctgtcctttcttgggatgtccaggcggccgcctcggcccttgccgaagaaagatccctggaccgcaggcgagaagtggtagcatccggcggcggcggagcgggcgcgtcgggtttttcctcggaacaagaggtccgcagagcctcggccctccaaacgcaccgctgctcctcccagcaccaggacggcgggcggagggtggcccggctgcatccggggacgcgcttacctgctgctcggccgcggacactcgcgctatcccagcccggccgccacctccgcagccgtcacccgggcaaccgccgccgccaccccggcgtcacgtgggggcggcgcagccaatcgcgcggggcgccgccgacgcggagcagcctgggagggaaggtgggcgaccccgaaacttcctggcggcggaagtgagggtccacagcccagcagtggtgaaggttcacgcgctggatgaccgcgtcttctgtggtcctctccaccactccactttcgttcgttcattcattcgttcatttccctttcgttgcgccagtcgctgcgccggctctcgggatgagccggagcaggctcaaccccttgtctcaaggagctcgtggtcgcgtagagaacacaaactaggacagtgtggtgtccgtggggaaagagtcaggcatggttattcccatcttaaaggagggacctggggccaccttagaaccaaaagtgacgcccaagatgtgcattaaagctccggggaccagggtcccgccccactgcagcggtttccaaggatttcagagaaactttttgttttccatgtcaaatgtgggctattaaaaataaatcaggagcacacgtcttccctctctttgcacctgatgcttttgaactgaagttcatcagcactgaatgagcacttgctagtcacccaactttgtgctggagggtgaagagatggccatggatagaaaatccctcccctccaggcgttgagattccgtgggagtctctcgttgccacctcagtgtttccacctccatgcttccaagaaggaggaggctaccagggccagagacagggaatggggcacggagaaggtaggtcagctcgcctttgaagaagccctaagatgggctgtggccaccacttccccagtccccaaccctgccagtggattgtcttccaaaagaaaaaaagctgtatttagtagaagagagccctatcttctgtccaggtaatatggattgaaaataaatcttcaatccatggccataatatttatcgtcaacacaactgtatgccgggagatgccagacaaaatatagaacacacagttaaatgtaaattttagataatgttttagtgtaagtaaatcccaaaaactgcttcattttattgtgcatgtaggatgttatattgttctgtatttttgtttgcaaaacgtgcagcctatatgtgtgcccagcattgtgctaagtgaatcatatagattgttttctttagttctcacaccaggcccggcacggtggctcacacctgtaatcccagcacttgggaggccaaggcagatggatcacctaaggtcacaagtttcagaccagcctggccaacatggtgaaacctgtctctactaaaaatacaaaaattagctgggcgtattggcatgtgcctgtagtcccagccactcgggaagctgaggcaggagaatccttgaacccggaagatggaggtttcagtgagccgagatcacgccactgtactccagcctgggcaacagagtgagactctgtctcaaaaaaaaaaaagtttttaattctcacaccacatctatgagatgaataatattttcagcattttactgattgacaatgttgtaattaacctgagctgtgtgctcttagaaaacagccacagttaagaaatctcacccacgcacccccaaaccttttgttttctaaaatcctccacacttttgtgttctgggaagtagcttatcagaaagaactacccttccacatatgacttcatcagacccacagtcctgtctttctcatgcctcccatatgatgcacggatgacccccttgtttacctgtgacaaggacaaatgcagaccttttcccttctgcctgagtctgccggcaaggccaaggacagacttttcagcttctcattctttgtctcatggttgattagctgagattagagctgtctgttttgtctttggcaagatgaacaacatgaggcatacgggattaagaaactcctcaaagtttacaccactgaggagaccaggactaaacccaggtctccgtgtctctggaccctgggctctgagctgccgtgaacaccccacctgctttgctttccctcctgagtgcatttgcctgactgc

SEQ ID NO: 2591 - DNA, 4001 bp, Homo sapiens
agccagtgagagactctgtctcggaaaaaaaaaaaaaagtcctggaagttctaacttatgtcttccagacttgagggcctatttaatccctccgaaatggttagcttctctttttaagaataattttctaaaagaaaaagaaagaactgaagttccgaataatgggccacattttggaatcacaagtcattaatacacaaatagatgagaatgtactcctatgttaaaagacatgcctctacttgaaaatacacagccatttatcttgtagatcagcttataaccgcccaggtctcattctttgctagtctggacctgagaatgcattaagatcagttatgaaaatgcagaagttaattcaacttcctcctatgtgttacactgctcagaaaaaagtatacagcaatcacccaaaataagactctgggctgattcatttgaatatttaaaatgcaaagaaactggtaagagaggctaagacaagaaagaagcaagtcagcctcaaatataaccaactgcagcccctggcaggaaacagtactgctcactacacgtattacttcaaggaaagtagtgctttgttttacagataaaatctgtggccttataaaggagacaggacatactatatattcaatttaaatggcagttaatactttctaatgcctccaagccacaagtacattatgaccacttaaaaattcccctctaccaatcttctcccatctgtggatctgcaagcactttcctattactagttcccagttcaccagaaacggtctgcacttattaactgtgaaacccagatgtgaagccccatgctcatacatagggaaatgaggcaaagggactggccacaggccaccaaaaattagaacccaaaatccttagctcatgttttaaatattatactagaaaagcaaagcagctttggaggagcagattgtcttctactgattcttgtgtttggcagagaggctgccttggaaagatgccctaagcccatcttttaaaaagtccaatcgtaaagacaggttatctaagaactttatagattctggagtctttgaagtgtgtaactgggccagggctaccacagaagaaatcacagacctagggtcttgatgtaagaatttacaagataaccagataaaggctagtgggtgaggagagagcattagaacctcaaaggagagataaggaaggggtgtggagcgagggacaattggctttgctttaaaaatatgtaacaaaatggcccagtgtctctcacagaagggttcggggaagggaaaccagagatcgcgtttttccggctctaagactgggtcggcttttagtcttctcttctgctccttttaaaggagatgggggtggggaacgagaatgctggtggcgatgtgggcctgcatctccttccctcctccagtcctgggaattcctgaaaactccttccaacccaattccaaacaggctctctctgggttcagaacaatgccggggaatttcacgcagggaaggggtccccttctcgccccagagggcagggggctactccggagcgagttccggctccagggtcccccacgtcccacaggtctcctgccctttggcacgcacagccctcaccactcgctgcttccgcatccctcctctgagcctctccccacgcatctctgcccctcgcccggccgcgcccaatcgcctcccacgtctaccccgctggggcagcccctacaccctgccaggcaccccatttctctcctccaggtctgggggactggacaacattggggattagctggggtcaactctgcttcccccgccacccccggccccgggcgcgcgctcacccggcggccgcgttctcgaacttgagcgcgagcgtctcctcgatgatgcggttgttcacctccagcaggatcatggcggcggctgcccccaggggaaggagaaacaagggccggtgagggtgggtaagggaggcaaggacggagggagcggccctgctgccccctgagtggggctgggtggggtaggaggttaggggagaaggggagaggggccggggtggagggaagggtaagacgaacgcgctggcccacgcacgcagactgtggagacacccacccacccaaccgacctggcccccgaagcctgaacccgcctgccgagccgccgccgccgccgccactgccgcttcaccgacaagcccggtccccgcccagcccccggctctagccggccacttccgctctcacacccacttccgctcgccgcctggacgcgcggccccgcggcgccatttccgcttcaaccactcgtgaacgcgagcgcaggcgcgccggaggaaacggaggctgcgcttgcgtatgtgtgatgccgccgccccaccgtctactttcccaccgaccccgcttacgtctaccgcctaccagtgcgtcccccgcggagctgtcattccccgaggcttgcctgactgttcagcttctctctcccgcttgtcccagagatccaactccattcttccggtcttgtcatttcagaaacctcgcaagaagctcgcccttgtcgtctcccagcgggcttcttagctcccagcttgtttgatgggggtgcctctttttctttccaggtatagctgtccagcgacaccatcatgcattcatttctccaacaaacattttcatgggctcttgctctatactggggatgtagtggtaaatgaaatggacgaggccctgccctcgtggaacttacagtctggcaaaggaaacagacaataaaattctcagttgtctaaggaggcagagatgcatggggagaggatcagagtagggatgcggaagcagcgagtggtcaggagtgtgcgtgccaaaaggcaggagacctgtgggacgtgggggcagctggggccggaacttgcgctggaggaacaccccttgcctgctggggcgagaagaggaccctttccttgggtgaaattccccatattgttaaaaggacaattaaagaaatgaaagagaggtcacctgggtgaataggcaacttagatgggcctccctgtgttcctgtcatgcctccaattctgcgtccaggtgtccggaacacatttttttctgcctttgaaaccttccagtacctctggcagagatataccataccctccttgttacctgcgtgcggaatcttaactcatcgttgtgctacatctgcaccttctgcctttgtgccttgttttgtgttttccctcctccggggagaatataataaacttagctgagtccgttctacatacaaggaaataatttattttctgctatgtgtttggggatggggataaaaaaatgaacaagaaactagctcctatcattaaggcacagatagccctttgaaacattacttaacgggctatggataagcttcaggatattgctgatcccctaaaattatacgctaacttaaatttttttttttttgagacagagtcttgcactcttgcccaggctggagtgcaatggcatgatctcggctcactgcaacctctgcctccccggttcaagcgattctcctgcctcagcctcccaaatagctgggattaaaggtgcctgccaccatgcccttttaatgttttgtatttttagtagagacggggtttcactatgttggtcaggctggtctcgaactcctgacatcatgatcctcctgcctcgacctcccaaagtgctgggattacaggcgtgagccaccatgcccggcctttttttttttttttttttaatttgagatggtgtctcactcttgtcacccaagctggagtgacgttgctatctctgctcactgcccgcctcccgagctcaggtgatcctcctgcctcggcctgccaaatagctgggactatagacatgcaccaccaagctgggctaatttctgtatattttgtagagacggggtttggccgtattgggcacgctggtctcaaactcctgggttcaagtgat

SEQ ID NO: 2592 - DNA, 4001 bp, Homo sapiens
gctagtctggacctgagaatgcattaagatcagttatgaaaatgcagaagttaattcaacttcctcctatgtgttacactgctcagaaaaaagtatacagcaatcacccaaaataagactctgggctgattcatttgaatatttaaaatgcaaagaaactggtaagagaggctaagacaagaaagaagcaagtcagcctcaaatataaccaactgcagcccctggcaggaaacagtactgctcactacacgtattacttcaaggaaagtagtgctttgttttacagataaaatctgtggccttataaaggagacaggacatactatatattcaatttaaatggcagttaatactttctaatgcctccaagccacaagtacattatgaccacttaaaaattcccctctaccaatcttctcccatctgtggatctgcaagcactttcctattactagttcccagttcaccagaaacggtctgcacttattaactgtgaaacccagatgtgaagccccatgctcatacatagggaaatgaggcaaagggactggccacaggccaccaaaaattagaacccaaaatccttagctcatgttttaaatattatactagaaaagcaaagcagctttggaggagcagattgtcttctactgattcttgtgtttggcagagaggctgccttggaaagatgccctaagcccatcttttaaaaagtccaatcgtaaagacaggttatctaagaactttatagattctggagtctttgaagtgtgtaactgggccagggctaccacagaagaaatcacagacctagggtcttgatgtaagaatttacaagataaccagataaaggctagtgggtgaggagagagcattagaacctcaaaggagagataaggaaggggtgtggagcgagggacaattggctttgctttaaaaatatgtaacaaaatggcccagtgtctctcacagaagggttcggggaagggaaaccagagatcgcgtttttccggctctaagactgggtcggcttttagtcttctcttctgctccttttaaaggagatgggggtggggaacgagaatgctggtggcgatgtgggcctgcatctccttccctcctccagtcctgggaattcctgaaaactccttccaacccaattccaaacaggctctctctgggttcagaacaatgccggggaatttcacgcagggaaggggtccccttctcgccccagagggcagggggctactccggagcgagttccggctccagggtcccccacgtcccacaggtctcctgccctttggcacgcacagccctcaccactcgctgcttccgcatccctcctctgagcctctccccacgcatctctgcccctcgcccggccgcgcccaatcgcctcccacgtctaccccgctggggcagcccctacaccctgccaggcaccccatttctctcctccaggtctgggggactggacaacattggggattagctggggtcaactctgcttcccccgccacccccggccccgggcgcgcgctcacccggcggccgcgttctcgaacttgagcgcgagcgtctcctcgatgatgcggttgttcacctccagcaggatcatggcggcggctgcccccaggggaaggagaaacaagggccggtgagggtgggtaagggaggcaaggacggagggagcggccctgctgccccctgagtggggctgggtggggtaggaggttaggggagaaggggagaggggccggggtggagggaagggtaagacgaacgcgctggcccacgcacgcagactgtggagacacccacccacccaaccgacctggcccccgaagcctgaacccgcctgccgagccgccgccgccgccgccactgccgcttcaccgacaagcccggtccccgcccagcccccggctctagccggccacttccgctctcacacccacttccgctcgccgcctggacgcgcggccccgcggcgccatttccgcttcaaccactcgtgaacgcgagcgcaggcgcgccggaggaaacggaggctgcgcttgcgtatgtgtgatgccgccgccccaccgtctactttcccaccgaccccgcttacgtctaccgcctaccagtgcgtcccccgcggagctgtcattccccgaggcttgcctgactgttcagcttctctctcccgcttgtcccagagatccaactccattcttccggtcttgtcatttcagaaacctcgcaagaagctcgcccttgtcgtctcccagcgggcttcttagctcccagcttgtttgatgggggtgcctctttttctttccaggtatagctgtccagcgacaccatcatgcattcatttctccaacaaacattttcatgggctcttgctctatactggggatgtagtggtaaatgaaatggacgaggccctgccctcgtggaacttacagtctggcaaaggaaacagacaataaaattctcagttgtctaaggaggcagagatgcatggggagaggatcagagtagggatgcggaagcagcgagtggtcaggagtgtgcgtgccaaaaggcaggagacctgtgggacgtgggggcagctggggccggaacttgcgctggaggaacaccccttgcctgctggggcgagaagaggaccctttccttgggtgaaattccccatattgttaaaaggacaattaaagaaatgaaagagaggtcacctgggtgaataggcaacttagatgggcctccctgtgttcctgtcatgcctccaattctgcgtccaggtgtccggaacacatttttttctgcctttgaaaccttccagtacctctggcagagatataccataccctccttgttacctgcgtgcggaatcttaactcatcgttgtgctacatctgcaccttctgcctttgtgccttgttttgtgttttccctcctccggggagaatataataaacttagctgagtccgttctacatacaaggaaataatttattttctgctatgtgtttggggatggggataaaaaaatgaacaagaaactagctcctatcattaaggcacagatagccctttgaaacattacttaacgggctatggataagcttcaggatattgctgatcccctaaaattatacgctaacttaaatttttttttttttgagacagagtcttgcactcttgcccaggctggagtgcaatggcatgatctcggctcactgcaacctctgcctccccggttcaagcgattctcctgcctcagcctcccaaatagctgggattaaaggtgcctgccaccatgcccttttaatgttttgtatttttagtagagacggggtttcactatgttggtcaggctggtctcgaactcctgacatcatgatcctcctgcctcgacctcccaaagtgctgggattacaggcgtgagccaccatgcccggcctttttttttttttttttttaatttgagatggtgtctcactcttgtcacccaagctggagtgacgttgctatctctgctcactgcccgcctcccgagctcaggtgatcctcctgcctcggcctgccaaatagctgggactatagacatgcaccaccaagctgggctaatttctgtatattttgtagagacggggtttggccgtattgggcacgctggtctcaaactcctgggttcaagtgatccacctgccttagcctcctaaagtgctgggattacaggcgtgagccaccatgcccgaccgataagctagctttgtaacattaatgactattgaactaaaataatgtttataaattgtttaaaatatgtatgcttataatactaaaaggcttgtaatgaaaaaagcagttccctgtcctactctttggaggcaatatgctcaactctttcacaaattcatcctgatatttaccttcataatccctttctttctttctttctttctttctttctttctttctttctttctttctctctctgtctt

SEQ ID NO: 2593 - DNA, 4001 bp, Homo sapiens
tttttaactggcacttaggaaaaaatttcattcacccatccccatctgcctcatttgaaggcatcatctgtaagccttgctgctaaaagtagaattaagtgatctggggaatcaccgaattcataggaaaggtttacatgcagctctcttccgccaaattaaatggagagaaggaaggctacccaagttatattaacaggattcagaatgctgaatgttacttttgactcccttttattgactgtttacagctacaaagaaaaaatttttccattaagggaaaacattctggattttttttcaagcaattcctaatagcagatgctttgttcaaatgggaaaaaaaaaaaaaaaccagaaaaaaaaaataacgccattgcttcatttaaagctctttggtgacacccacccccccacccacacacacactcctgctagcccaggcgtcttctgctaaaacacctgcaatacccaattttaaaactgtaacctgacatcctggcccagagacatttaatcacagattcactattgccacacgtgtgacttgtaaacctattctgagccgagcagagtgctaagcacttcacacagtctctgatcctggaaaggatgcattactaatcccgtttgatgggtaaggaaaaggaggactgcaggtgaggatgtgcctcaaaccacagccaacggtggcccctggactcacagactctgcccctttccccacggctttaattttcaaccaagcttcttcgttcctacgtgttcctctccccaggacctggagagcgtactgcttagcagctaggcgtgatgactttgcaccttgagagcactttactaaaaccaggccttttccaggttgagggggaagggcggcattccgggttcaagcaggtgagacccaggtaaccggggagcggctcctggaggcttcttggacccagaagcgccgactctcacacaccttgcccgcagttccttctccgggcacgggtggagcgcagccaggccgccctggctgaggcgggcacgccttcccgggcagcccgggatgccccggacccgcggacccgagggtgggggccctgcggcgctcgggggctgcggcggggagctcggagcgcggagctgcccccgccggtccacttcaagaacaagttgataaggtccgcaccgggtaccaaagaccccgggcggcggcgggcggcggcgggcagcgggatcccccgctcgccgcggaccccgactctggacaaagttggccgcgctgcggggaaaagaccaggccgcggaaccccgcgagggccacgaggccgagagaggggaggtcttaaagaggcccaaggtggccatcacccatctcctccgagccacctaggcgggaacaaagggcttctgtctcgggcagggttggcccggccgcgtccggcttcggagcaaagaaagttttctcgggatgcggatgcgggagcggcgggcggggctggggcgcgggatacctgcggccggagccgccgcgcaggccgcctcacctcctcgatggccgccacagtgttccggcactgcgccgtgcgggtggtgaagctggaggccgtgggcgccttgtagtcctcatgggtctcggccacgaattccgacacggagatctggtccggcatcgcctcggcgcgagggcgctggcgcacagccgcaggggcgccgccgcctcaactgccgcagcaggctccgaccgccgctcggacaccgccgctgccgccgccgctccggcccgcggacaaaggggagcgccgggcgcgggagccgcgcggggcctggcggcggagcaggggcggcgcgcagccccgcgcagctcggccggtccgcccgcctgcgcgccgagggctccgagtccgctgccgccgcgtcctctcagagcgagccccgaggcgggcgcgcacagccggcgggaactacccgccacccagccgcgggccccgacgcctcccgcggagaggggcgggtccgggccgggggcggcggccggccgggcgtggggcggggcggcgggaggaccgggccgccaatcggcgcgctcgccgctgccgcgccgccgggaagcggatcccgcaggaaggaaggcggcgcgcgccccggcccgccgagccgttcctggccgccgcgcgccgcattgtctcggcgttccgggccccgcgcgccgcgcccatgccccgcccccagccggcccgaggccccgactccgacccgctgcccgcgagggtgcgtgtggaggtgcgccccgccggagtccggccttgtgcgcgccaaccgccccccgcccacggcgcggagcacctctgggctccccacttgaacggcgggccgcgccggcccatgaggaaagcggggtgcggagctcgccccctgccggaggatgcgctccgccggcgggcaccctgcggggaccacagccggacgccagaagtgacctgaccgtgaatgtgcgctttgcgtgcagtcattgcatcgtcgcaggcctaggagacagatgaagagatgggtgcttattttatataggggacacagtgtgcccaagagcacaagataaacggccgggtggggattcaaacccatgttccctgactcaagtgtgagtgcttcagagcggtgaggggcccctactaaaagtcccagtcgcgtttcctaggctgcccaatgataggtattctcggttatagttttagggtactaggccaggacccaccctgggaaggctgctgaacgccctgaagtggtattcccgcaggcagaggagggaaccgagggggtgcaggaggaggaggagggggagaacgtgctacagcagccagccaacctcacacaaaaccgggccagtaaagggttcgaactggtaccgatttttatttacagctcttaaggaaattctcggttatactgaaaaatccagaagctctgaagataccagtcaaataaaatcacaccctataactctacaccagacttgtggcatggtttctgtagctgccagcggtaaaaccaagagaaactttacaaaaaccttttgtgcatctgaaaaggaggaagtgtgagagacactggaaattcaatatgtcagacaaagccgtctcctgacactgcaggacagtagaccagtcaaacaatctttttaaagcccccatgtaagaagttgctatatgaggtggcagcttgggtcagacattatgtatggcctttggtattttagtagcactgcatgtaaaatttaactttctaaaatcgctgtattcgtggatagcttttatcattgcactagacaacaagttacaatttaaaaattgtatctgtttctttttatgttttttgatccttttggtgtctgaagttttcctctatttgcaaccttctacaattcatgttttgtgtttattatttatattaatacatcctctccaacaccaggcagattctgttcccgcctacctagtttcccagctacagtttttgacatgagggaatatgctgaataacttttcaagtcttgatttgtagagggctggtctctatgaggctatgagggatctaagaaagaaagtcgggtttttccttgatgtctagtacagcattaaccagactaatcaatacttctacaaggacaaagttaagcttggtattctctgttctctctttatatacaactccggttcttgtttcttttagtttaattttgcagatacaggaagctttagtagcctcaaaaaaataaaattgcaaagctgtgttgcattgcaaggctggtggaaaacaacaattagttaccaagttcattggtggcctaaagaggataccaaattggtagaatgctagagccatttattcctccatcatcccttagaaatctaacttgcctactgcataagcctagaattaaagcaagaccagagcaaaacatagctaatgcctttctgagattaatataagaatgagtagcttccaataaataa

SEQ ID NO: 2594 - DNA, 4001 bp, Homo sapiens
actatcctcccctgtaattactccacagttgcggttactacagagtgaaaaagttcaaagtcggagtgggaaagattcaggtgtagggcaataaccaacaggtaaatggcggccacaggacttttgctgagccctcttctgggccccctctgctggcctctgtgctatccattcctggccctgctcaaagtagactcagaatctttccccagctccagattcaaaagcaacttcaagtttgtgtttcgctgatcaactactccaatgacaacacaactgccccaggatagcacttaagcttcaactgaaaatctgttgcccctctacccgaggccgaaacacactgaataacaaaacagcagtgcatgaggatataaaaaggagccctcagctgagtgtggtggctgccgcctgtaatcccagcactttgggaggcagaggcgggcagatcacctgaggtctagagttcgctatcagcctggccaatatgccaatatggtgaagccccgtctctactaaaatacaaaaattagccgggcatgatgccagcacctgtaatcccagctactagggaggctgaggccagagcatcgcttgaacccccgaggcggaggctgcagtgggccgagatcacgccactgcactccaccctgggcaacaagagcgaaactccgtctcaaaaaaaaaggagacctgtgcagccgacaaagccagtgtttattccccaggaactctctttatactgggaagtagctgttggtcctctttttcccacggaacacgcatcattccgtctctcactctcacatgagatgacatcctagaccctaaggtcctggctgtctctgaagtcaaagtcaacgccaaccaaagcccaggatggtagatgctttgtctggctttttctggtcactgcagtatcctctgctgggtctagccaacagcaggtcttcaatacaagtctgttaaatgattggaaggaggtgcagagggagggatggatggaaaagcctatctgcaccagtctccaagtcaatcttttaagatgtttaagaaatgtattggtttattactaagtaggagaggaacccctccaaagacaaatataggcatgtaaagaaagcccagaacacacgaaactattggcgcgaatggcaagctcagaaatccagcaagaaggaactcccaccacaccaccgggaaacgggaacctgtcctgaccgcttccttcacatctgcatggtagggacactgcaaggtggagaccctaagtaggacagttattttggaaggtgggtgtgagcctttctatctgcctcccttgctggtgggccaaaggcccctggacatgttgtgtcactgacgagctcgctggagacggcgtccccgttgtccctggtctgtgcctgtggtgggtgggaaggctgccccccgctgtaccaccggacacgccgtgggcggcagaatggtgaaaaagtgcctgccctccctagggctaccctctggctggctttcctgatccgtgcgctcagagctggaaggtggcccacgtcctacttttgcggttgggtcatatcaaatctgtatcggctaacgggaaggaagttacgagcaagttccaccggaaagaaaatctagcgcggggactgcactcgaggccgaggagagggcagcgcgtccgtggtggggtcgcccagcactgcgagccgcgctgaaccccacccccggcctgcagggtgcggctccctggctgccccgtggacccggccagcccgggacgaggacgcaggacctcggcagggacgccggagccagcccttcgccatccccacacgccccgcggcccagtggccgcgcgcacgttacctgcggagcccggccctgcccgcccgtctgggctgccgccctccgccatggatgcttccgcctccgcggccgcccctgacccgcgcacgcccctcgggcaggaagcagaacgacccgcgaccacttccggcgccgagggcaatggggggcgcgtcggggtcgcggcttccggcgggcgcgcgccggcctcactggtttccggggccgcgcaggggccacgcctccgcttccggcctcgctgtctagcagggcgctggctggtcccttcgtccggcgggaacttcgcggctaaccgactctctggatgccggccgcgctgtggtttcctcacataagaagccaaggagtcggaaagcccgttgcctgaggcagcagtctgggaatttcggtccggcgggccgtccccacccacacggacggggcgtggcttctgccagatgtgggcggggccccgagggccgtggcgggcgggacccgggcctcggccgggctggcttggtccccgcaggtgccccccgctagccacgagcagccccgggagggtggattcggaggcgcggggactggtgagggcccactgcagggctgagcgtcgcagcgtgctgtggttttagatgaatgctcctccaaatcccttccatgaagccctcaatcaggtcggtaactgatgacagccagtggctgacgcgaagttcattgaataaatgaatgcattcgtgaacaaccgagtaacatttcttgcacactcccaacttcaaatatcgcagcgtcgtcccaccatgagtattggtgttggtcctaaagcacggattcccttggctcctcccattctcccctgctgagttagacagcggggcctcatgcaggaggaggatttgtacacagcacagcaggaggctgatgagggagtccggagaccccagcagtcgtgggcgtgagctgctggctcatccgtgtgtacaacattccagactggagtaagggaagccgcaggcgcagccccgcgagtgcccctgctgaggctggccctgggtggcccagatgcaccagggggcccactgggggcagacctggcaggccctgtgggggttggaggcgggagtgggggtacttcctacagtggtgtttggtcttgatgacagcagagagcaccactggcatgagggacaggtgactccgatgatgacgctgccaggccaggagccaggggtgtgcccagcccctggctccaccacagctgcacatcccgaactcggagcttcagcaactccgaagcctgaagccgcctcacgtgttgttggatggatgaatggataaacgaaatgccgtccatccatacaatggaatcgtactcagccttagaaaggaaatgctgtccgtccatacaatggattcgtactcagccttagaaaggaagggaatcctgacacacgtcacaacacggatgaccttgaagacgttatgctgagtgagataagccagccacaaaaagacaaatacagtactgtgtgattccaattatttgaggtccctggagcagtgaaatggtggagcggaatgggggttgccaagggctgggggagtggggaatgaggagttagtttttcatggggacagagcttcagttgaggaagatgaaaaagttttggagacgggtcacacagcaatgtgaattgtgcattaacagtactgaactgcgcatttaaagcaggttaagttttatgttctatatattttaccacaattgttttaaagaattttttaaaagaggttccggtgcagtcagtcaggggtgcgggttgggtgttgggtggttcagagcacccaggtgattctaaagtgcagcctggtgagagccacgtctccgggggcctccgctgctctgcctgcctggtcccggtgggctcacagtgagcgttctgcgtgtcggtagcctttgcatcaaggtattgagtccctgagcagagtggccctcctgcacctgcacctccaccttccctgccacgtgttgcccttgggatcctgcctcttagaagaacctgaggccgcacgtggtctgtagcggggaggtggcctcacatgcccacctccgtgcctcctaaatgcccacatggtgcagggcagtgtccacagag

SEQ ID NO: 2595 - DNA, 4001 bp, Homo sapiens
tacaggtggcagcagccacagcggatggccattcctaaccctgtacctgatagggctggaggaggggcaggagctgctgggcaggagccaagccttccacagaaggaggctgctaaacccagcagcgatctggcagggagggccggggaagcacttgccctaccctcactttcctccaactcctatcattagtggcacccaacaggagccagagggcaagtgggactgatgcagtttgcagagatcagcctcgggggggtgcttgggcacggtgggcctaaagggtgaatgcaagatgtacagctcagcactcccagtccaatcactgcttgtgatgacaacctcccctaaaccccccccagggcaatcttctagagagatggaaggtaccaagtttgggatcatggctcctgggcctatggacccccgccagatattaggaaaaccaaggtgaagaggaagcaagagaaggttcctccctaaagcgacttgcttaagtccccactgaaaggcagcccagaaagtagacccaaaccaaggggggggggcggaccccctcggaagttccaatctcagactcctcgcctcagcaccctgcaagctccattccctagcagcaactcccactcatgtcccatctgtgttcctcctgcatgttgcgcacacgtgtgcatgtgatgcatgtacttgcgtgtgcgtgtgtgcacctatgttgggagggagaatgggggtggaaaggagccctcagcatcccttagaggccaagactaaccttgtcccctaatctgacaagctgggaaacagcacaatacaactaaaagtaaatcacaggtcaggaaaacactttcaggaaacctaacaaagggatgatgtctatgttacgtgaagaagtcctacaaaatgataaaaatgattccaagagatggagagttcctgcccaagacccaaatagacaggtcttgcacctgatgaggcctacaaagaaaaaatcctatggacaagactttgtccagacctgcaaagaaaggatgggcgacaggcagtgaagaattaccagtgtgtgcttatcaaatggcaatttaatacaaacattcattaccagtgatgctccttggtgaggttgtggtgaaacacatcacctcactgtcagagggaacagaaacccttgcggaaaacaatttggaaccaatttagaaacaatacaatttgaaaaaatgttatgttcttgttccagttatatggctcctaggaatttatggtaaggatataatcccaaaaaagaaaaaagccgtatgaatcctaataaagatgttcgttacagcattatttatagaagcaaaaaggtaaccaaatactatctttttgtaggcatttggtttaagtatttcagtaggggattgaaattgggaagactatgtagcaacatggaaaatgctttagatttagattttgtagatctcaagggagcagaacacacaattatgtgtatgatatggttatcagtgggtgaaatttacacacgcaaatggacaggcttggaaaacaatggagccacagagcagccactgtggtaggattagtttttttgtgttgtgttgcacttgttgcttatgtcgcacacgcatgtacatggtctatgcagtacacatatatgcatgtatgtatgagagtcagatatccgagtacatatcatttactttttccaaacatttgcccctctacctccaggatctgcccaccccatcagtgtaacttagtaattaaatcccagatgcagcaggctcgttctggttacctagcagcatgccggtgggcagctgagccgaggggtctttcatccagtcgtcattggccagttctatcacagcgtccacaggcgtgatttcagtgcagattaaatccctcactctctcctcatctttggcatccagggcagactttaatctcttcactaaatctgagttgagtgggtagtcgggaaggtaatccgagttggacattgttacgtcgtttctgcagtgaccagcccttcttttcttcctctaaagcgactccaaagtcagcagctgtccgtgagagtggcgtgggggctgctataaatagcagcaccctggctcctcttacagtccctgcggagggccacctgccagcagggaggtgtgaagtaatctttccagaggcctcagcaaaggattattctagagatgggggcagcagacatgtttgtgagtggtgcaagaaggagagacaatattttcaaagacagctttcatgggtattgttgaataatatcttcttttatcaaaagtgaggctctctcctgaaactttgaaaacctcttcctggcactgggcttggacctctattctgtggaaaggaacattttctaatattctaccccttgtgttccttcacttcctctaaaaggagcgtctggtcacctgcaaattggacatgcctcaaacgcatagaatggaatggaatctttggtttccaaatgcagagaaggactggctgatctcaggaagacggaagcatcacagaaaaacaaaaaaaagtaacctaaatattacctgtgacctccctatgcctcaaggctggtaaactttgctcaaagcctataattccatgacttgtggaagtgtggagccctcagggggatttctgtgcactcctaggggcaaaggtggggctttctctccttgacctgtgtcttcagtgtgcttgggtctctgtgtgccaacctgtgcataagcacagctgtgcctgaagcttctctgctgatgccaagtgtgctgtggtctctgagggcccagggcgggccgtggagcttacagggcctccttcgccttgccttctatctcgccatcttttccattccttactttctttcttctcccctgtgcttaattttatgtctcaatttggctaggaccccagtgcccagagacttggcccaacactagtctagatgtttctatgaaggtgtttttgggatcagattagaatttcttgaaccggcagacttggagtgaagccgatggctctccctaatgtgtgtgggcctccatcaatcagttgaacgtctgaatagaacaaaagactgactttccctgagcaagaaggaattctggcggcagacagcctttggtctcaacctcaggtcttccctgggtctccagcctatcagcccaccctgctgatgatggatttaccaagtctgcacaatagtatgagccaattcttgaagagaaattctctctctctccctacataactgttggttctgttcctctggagaacactgactaatacaccctcttcctcctttcagctcatttgtgtgattttccagcttctgttccatctgcacttgaggtgccaggcactgtagttcctgcccaacatccattctccttccacctgcccaacacagcctggctttcttggtgggggcactgtgcccagcccctggggatgagtcatgttgatttaggtcagtagtgtcagtcccagtctcctttgcctgcactcaatgtccagtctcccttgcaacccagttctggctgctggggtgagtctgggaagttatgtgctttcctgatcaagagggacagaagtgactggcaacaccctttcctgttcttgtttccttgaacatggacatgatatctggaggtgcagcagccacatcacagctgggaggcaacagatatgaaatgaaggattaacacagaaaggagagtgggatggaaagcgggggagagactggggatgacatttctgaacccctgccccagctctggggccccagccaccagacctcttgtctttatgccataagcactttctgtgtgttttctgttacatacaactgaaggcattcttggttgatacaggtagtgtatttactctgcctttcaatcatggaaatgtcctggttttagtctaaggaggtgcagggggaatggctcagccagtgaagaacttgagttgatcct

SEQ ID NO: 2596 - DNA, 4001 bp, Homo sapiens
tctttttggggaacacaattcaacccacaacaccccctacaatcaattttccacacagcagccacaatgatcttcacaaatgtacatcgggtcctgtccactctcctgcctacagagctgtctccctggcctctttctgcttctcaaacttcttctaccactttcctcttacactccagccacactggccttctttctatcactccaacacatcaagctcattcctgcctcagggcctctgcctagaaatttgtctggctcccttcttttcatcattcaagtcacaattcaaatgtcacttcctcacagaagtctcctctgacttacgtactaaaagcaacacatcctacaggtattgtctttcacataaccttagtttctttgcagcacttaccaatactagaaattattttacttatttaagttcccctcttacttgaacatcagctctattgaacacagattcaatcactatagccctaaatgctaaaacaggacctcacagacagttttcatttttattccgtcaaatacatctcttttccttcatgacttaagactagtgcttagcacagaataaatgctaaaaaaaaaaaaaattgactattactactataatagtttgcaattatttgtttgtacaatctccctgcctagactgtgtgaccaaagacagaaacccatttatttggcattttaccaagcccaggggggccaggcacagtggctcaggcctgtaatcccagcactttggaaggccgaggagggcggatcacccgaggtcaggagttcgagaccagcctggccaacgtggtgaaaccctgcctctactaaaaatacaaaaattagggtgtagcggcgcgcgcctgtaatcccaactactcggaaggctgagaaaaaggagaatcccttgaactccagaggcggaggttgcagtgagccaagattatgcctctgcactccagcctgggtgacagagcgagactttgtctcaaaacaaacaacaacaacaaaaatcccaggagtctggatcacattaagcattaataagaagtgctgaatataattagcgaataacaattctgaagaaagttatcttctttgatactatggattcctgatgttaaaaaaaaatttttaagatagaatatgggactgtccttcctgctttttgatttggttcaaatctgaggaagtgggggcgaccagtctttaacagatctagcaagactgtcgagctttagggaatggtaatttctctaaagccaacactctatgtccattatattggagatcaaaacagacaatggcattttttctaaagagggggagggaaaaacaaaactttttgtctaatttggggatgcagtcagacgtgacttagttcataaacacacacattcatctggcgctaaacctcacataaggaaccttaccagcttccttgataaaacaacaccccaacacttcaatctagagatggagggtaaaaatgtagggttgtgatgtctagctgcccattccacgagagtcgcccaccacgccaaattcggaggcttgcggtattcacctacggggagatggcgggctacctcaccccaggtttcccctaacacagagttgcagtcgctgaacaaactgccctgcgttagtcagaagctgttaagtaacgagatggccacggtccacagcagaagagatggagataagcctcaagcgggaaaaatgaagtgtacaaatgccaaatgcggagaaaaagaagaaaagctgcaagaaggcaggtcagtcaggaacaccgccatttctcacatctcatcgctacttcgaattttctcatctaaggacccgcacccgcacggttcacactgtcttcttcccgctatcactccgtgtgggtcaaacctctgcctgcccactggagagcagcgggaatggcttcaggaagcggctgccgcctccgagactcaccgacctgccgtgctgccacttctacaccgaaatggctggtccgaggccgcgtctccagagctgcgtcccagaagcccccgctttcgatccccaccgcgatgctgcagccgtccgaaaacgagagacgcgcaggcgacgtcccggcccccgtaggcggacggctccgcgacccccggatgttgatatgtcgtctgccccggaaacggtgacaggaggctcaagggggcggaggcggcgttgccgggctctccggaaggagacgtggcggcggttgggccggtgatacccgggcgctttatagtcccgccgcctcctcctccacctcctcctcctcctcctctcctcctggagcagaggaggttgtggcggtggctggagaaagcggcggcggaggatggaggaaggaggcggcggcgtacggagtctggtcccgggcgggccggtgttactggtcctctgcggcctcctggaggcgtccggcggcggccgagcccttcctcaactcagcgatgacatccctttccgagtcaactggcccggcaccgagttctctctggtcagtgccctcactaaccccgcagccacccctcctcctgacactaagggttcggcctcttccctcggttttctttgctttttctccccaagaccttctctgcagactcttaccttccccaagccaaagctgcttttatgcagcgttcattcattcgttcgttctcacgttatgtggatgcgtcccccttgctgagcattagggatccagcaatcacctgctctccaccttttcaattctgtcgcactagaccttgcttcccaacattcccaccctgcagaagcagctttcgtagaataacgtcaggtgcacttactcatcttcctttcggaaaattaactgtggctcttacttcaccagcagacttctttccttcagtattacatgtcaccctgcccacaccacagtacttcagactcgagttccctctctcgtattcgttctccctcagttgtatacacacacggacatacgcaaacgcacagctccaagggaactttttcctttcctagttgtttctgagagggctatttggcctgtgagatgttaacgaccctttatgcagaatatcctttacagttttcatgtattacgactgttatttgagtccccagaacatgagcttctatgttgagttttcctgtagtgaagaacatttgtaacctcgcggaaatgaaaattccctcttgggggagtggaccgctgaaaagtcttcctgtccacgtgtacctactgcaggctaataaatattgtactcttatgacacttaccatgtagtaattaactcatttacttcaaattgaagtcccggaaaaagcaaaatttttttaaactttttattccaattaccttcaagcattcaacttgcaatactttattatattctttcattaccatttcattgaaacagtaagtgacactatgatgtcaaaacaagatgtgtcaagttaatggatgttattaccacatagctttctatttgcaagtgttaggggttttttggtttggtttggtttggtttgggtttttctgtttttgtttgttttttgagacagggtctcagtctgttgcccattctgaagtgcagtggtacggtcaccactggctgcagcctcgacctcctgggctcaagagatctcctcagcttcccagtagctgggactatagggaaatcccaccactcctggctaatttttttttttttttctagaggcagggtctcactatgttgcctaggctggtctcgaactcctgggctcaagcaatcctcgtgcctgagcctcccagaatactgggattacatgtgtgaaccaaatgttctgaatttatctaggtaaatatttttctgggacgtcaaatttctctttgtattaatgccacaaaatattgatacattgaaatacctatgtaaaattttgttatgaatcagatataactttagcaggcttggaagagaatactttaatacctgttgttg

SEQ ID NO: 2597 - DNA, 4001 bp, Homo sapiens
tttcctcttacactccagccacactggccttctttctatcactccaacacatcaagctcattcctgcctcagggcctctgcctagaaatttgtctggctcccttcttttcatcattcaagtcacaattcaaatgtcacttcctcacagaagtctcctctgacttacgtactaaaagcaacacatcctacaggtattgtctttcacataaccttagtttctttgcagcacttaccaatactagaaattattttacttatttaagttcccctcttacttgaacatcagctctattgaacacagattcaatcactatagccctaaatgctaaaacaggacctcacagacagttttcatttttattccgtcaaatacatctcttttccttcatgacttaagactagtgcttagcacagaataaatgctaaaaaaaaaaaaaattgactattactactataatagtttgcaattatttgtttgtacaatctccctgcctagactgtgtgaccaaagacagaaacccatttatttggcattttaccaagcccaggggggccaggcacagtggctcaggcctgtaatcccagcactttggaaggccgaggagggcggatcacccgaggtcaggagttcgagaccagcctggccaacgtggtgaaaccctgcctctactaaaaatacaaaaattagggtgtagcggcgcgcgcctgtaatcccaactactcggaaggctgagaaaaaggagaatcccttgaactccagaggcggaggttgcagtgagccaagattatgcctctgcactccagcctgggtgacagagcgagactttgtctcaaaacaaacaacaacaacaaaaatcccaggagtctggatcacattaagcattaataagaagtgctgaatataattagcgaataacaattctgaagaaagttatcttctttgatactatggattcctgatgttaaaaaaaaatttttaagatagaatatgggactgtccttcctgctttttgatttggttcaaatctgaggaagtgggggcgaccagtctttaacagatctagcaagactgtcgagctttagggaatggtaatttctctaaagccaacactctatgtccattatattggagatcaaaacagacaatggcattttttctaaagagggggagggaaaaacaaaactttttgtctaatttggggatgcagtcagacgtgacttagttcataaacacacacattcatctggcgctaaacctcacataaggaaccttaccagcttccttgataaaacaacaccccaacacttcaatctagagatggagggtaaaaatgtagggttgtgatgtctagctgcccattccacgagagtcgcccaccacgccaaattcggaggcttgcggtattcacctacggggagatggcgggctacctcaccccaggtttcccctaacacagagttgcagtcgctgaacaaactgccctgcgttagtcagaagctgttaagtaacgagatggccacggtccacagcagaagagatggagataagcctcaagcgggaaaaatgaagtgtacaaatgccaaatgcggagaaaaagaagaaaagctgcaagaaggcaggtcagtcaggaacaccgccatttctcacatctcatcgctacttcgaattttctcatctaaggacccgcacccgcacggttcacactgtcttcttcccgctatcactccgtgtgggtcaaacctctgcctgcccactggagagcagcgggaatggcttcaggaagcggctgccgcctccgagactcaccgacctgccgtgctgccacttctacaccgaaatggctggtccgaggccgcgtctccagagctgcgtcccagaagcccccgctttcgatccccaccgcgatgctgcagccgtccgaaaacgagagacgcgcaggcgacgtcccggcccccgtaggcggacggctccgcgacccccggatgttgatatgtcgtctgccccggaaacggtgacaggaggctcaagggggcggaggcggcgttgccgggctctccggaaggagacgtggcggcggttgggccggtgatacccgggcgctttatagtcccgccgcctcctcctccacctcctcctcctcctcctctcctcctggagcagaggaggttgtggcggtggctggagaaagcggcggcggaggatggaggaaggaggcggcggcgtacggagtctggtcccgggcgggccggtgttactggtcctctgcggcctcctggaggcgtccggcggcggccgagcccttcctcaactcagcgatgacatccctttccgagtcaactggcccggcaccgagttctctctggtcagtgccctcactaaccccgcagccacccctcctcctgacactaagggttcggcctcttccctcggttttctttgctttttctccccaagaccttctctgcagactcttaccttccccaagccaaagctgcttttatgcagcgttcattcattcgttcgttctcacgttatgtggatgcgtcccccttgctgagcattagggatccagcaatcacctgctctccaccttttcaattctgtcgcactagaccttgcttcccaacattcccaccctgcagaagcagctttcgtagaataacgtcaggtgcacttactcatcttcctttcggaaaattaactgtggctcttacttcaccagcagacttctttccttcagtattacatgtcaccctgcccacaccacagtacttcagactcgagttccctctctcgtattcgttctccctcagttgtatacacacacggacatacgcaaacgcacagctccaagggaactttttcctttcctagttgtttctgagagggctatttggcctgtgagatgttaacgaccctttatgcagaatatcctttacagttttcatgtattacgactgttatttgagtccccagaacatgagcttctatgttgagttttcctgtagtgaagaacatttgtaacctcgcggaaatgaaaattccctcttgggggagtggaccgctgaaaagtcttcctgtccacgtgtacctactgcaggctaataaatattgtactcttatgacacttaccatgtagtaattaactcatttacttcaaattgaagtcccggaaaaagcaaaatttttttaaactttttattccaattaccttcaagcattcaacttgcaatactttattatattctttcattaccatttcattgaaacagtaagtgacactatgatgtcaaaacaagatgtgtcaagttaatggatgttattaccacatagctttctatttgcaagtgttaggggttttttggtttggtttggtttggtttgggtttttctgtttttgtttgttttttgagacagggtctcagtctgttgcccattctgaagtgcagtggtacggtcaccactggctgcagcctcgacctcctgggctcaagagatctcctcagcttcccagtagctgggactatagggaaatcccaccactcctggctaatttttttttttttttctagaggcagggtctcactatgttgcctaggctggtctcgaactcctgggctcaagcaatcctcgtgcctgagcctcccagaatactgggattacatgtgtgaaccaaatgttctgaatttatctaggtaaatatttttctgggacgtcaaatttctctttgtattaatgccacaaaatattgatacattgaaatacctatgtaaaattttgttatgaatcagatataactttagcaggcttggaagagaatactttaatacctgttgttgtatccaaagagcacacttggagtgaatatggcagatgtttgaagaattatgtcattaaaattttttactcttggcacctgtgttttttttaatttaaaaaaacttgctgatatgcagccctgaaaacttactataagcgagcgactaaaactagcattttt

SEQ ID NO: 2598 - DNA, 4001 bp, Homo sapiens
gcaggtgtgcatgtgagtgtagtgacagggacagtgagtgagagagggagtgtgcaggaaactgtgtcccccagcagtgcgtgtgcgtgtgtgcgtgtgcatgtgtgcatgcacccgtgctggggcagcagtgagggtgagttatgcacataagagtgaaccagtgattcccagtgtaagagccagagctgggcatgggagccgctagaacaggagacagagggggactggaccccaggagggctggagggcagaatgaaagagggatgtgtgagggagtctgtgaggcaggcatgtgagagacacacagagatccagaagagacactggcacccagtgtcctgaagaccgggtctctccagcctgcccaccaggccagctccccaggaggccacccggggtccttccctagatggagccccccaaacctcccctccctatctccttcgtttggtgggaagaatccagtagcctcagaagaaaaagggagcaagagaaaagtgagagtcagttggtctggccttgggatggtgcgtgcgttccctgcaagccagccagctccaggacacctgggcccatgcctaggaacccccaccccaactcccagacctgggcactgcagcagcagcaaaaccaagaagaggagcagcaggcgccccagggtaagcccctatgagcggccactgctccatggctgggaagccagagggagacgccaggcttggggaaacacgaggccagcctctggtggtggaatgaagggaagccctgttgaggatgcccctgtacaccactgccaccactcctccccactccccagcctccggccatccaaggccaggcagcccagctggcagaactcaccacagagaagttgctggcggagcagtgatgcccactgaagttgcagctcttaagcatgtcggcgagctggtggccagtgcggttgaggatgtctaccatgtcaggctctgggtagcgcaggccagccgcacggtgcccatcccggtctttggggggcagccctgtcagattggccaggtggaagatgtcggcatcgctgagtgccgaatgccggaagcggttgatattgcagagggtgacagccgggaagcccgccactggggctggggcagcggggtccattgccaccaggtgaggccgggtcaggtagccccgggccaggccagccgcctggtacaggaaggcagccagcgaggtgagtagggccagtgcccacagggttctgcgcagtccgtgggggcctgggccacaggcccggcccagtccatgcagggtgctggtgctggcaaaggtggccaggtctcggggggctgctccaggggcaacagccccgaggaggctctgctcatcccctgcctccttctccttgggtttcgcatcctcctcagcaaatttgattttgcacacaatctcgatcggcatctgtccccggctgctgggactggccagagcctccctgccctgtccctccctagccagcagccctggtgccctcccgagtggcagtggtggcagcggctgctcttctaaactcagggcaagcgggaagaggacagggacagggtgggggcccgaggtgggggagtcactcccactcccagcagctccgcagccctggtgctgcctctgccgctgctgcctctgctgccgcttgtctctctcctcgatcgtctccttgtggcttcccttatcagcaccagcacagctgtcagcccctgcgtgtgtccctgcgagcgagcgagtgagcgagggagcgagcgctgctccgccacgccgcgcagccccagccgctccgctcagcatgtgctccggagccctccccacgcttaataattcaggacatgtcaacagcgtttcaccggcagcacgggcgtcaggagccaggccaggggagggggcagtccccagcccaggacagagatcccaagactggggctatcccccaaactcctgctgcaccctagccgctcactgggtccccagatctccccacttcctggccacccagggaagggtgccgtgcccagggtcctcagctcattctttgccactttcctggcccacaccccatgaagggtcagccaactctatccccccacctcctggcctctgagactcctgactccagcacccagccaccacctgatcccactacccgactcacagcagcttccagaaactccttgagagagccacttgtttgaatgacggagggaggggggcagaggagggcaggctagacagaccaggggacaactgtgacttcaagattctcagcttccctggagctttgctccagacttcaacacccaccatgcccctgccccctctgggaggctggctgccctcaccctcattttgcccccaaccccaatctcagtcattcatatgtctgggacagacagcaccctggccagcttgcatatctgtggccactttgcttccccaaatgttccccaaatcccttgccacaaccaggcttcgggggagggctgttgggtaagcaagccagggagcaaaggggaggtgtgcttccggggtgctctatatgtagggggacagggcatgcaatggagggagaggaagagccccagtgggggcgtggaagggagcaggaagatgtgctgggcgtcaatgggagcgaatgctctcctaaagaaaggggtttgaggggtgcctggcagagtggggcaggagagccctaaggggtctgctgtgttctcgtggaggggaacaggcatgtgggccatcatcataggtgggggtgggagcctcagttgactggccaggaggggatgcatccatgcccccagggtgggggtggcaagaatcagtgcttgtgctctggggccccatccgacagcatgtgccctcacgggggaggaagcccttgtccccgggaggaaaggggggctgattaatcggggcgctaatgagcagcagggagaggaagcgtggacgggcggggggaggtggctccatcgatccaagccgcagaaccagcagctgagaaaaaaagtgagaaaggaatcgatctgagggaaacggcagctgctggggattagagcccgaggtccacccgctgcccaacggccaccccgccccctgcgtcaggcctggccccgcagcctctgcctggccccaggggaggggcctagggatggctcccttagcagctggaagccactttgcccaccctggctgcaaggccaggtcaggccccatcagggtcaccccagcatggagcctgcccacacacccagccctgaccatgcgtggtgccctgcttaggttgtccctagcctttaggcaaagtggcttccccagggaccccacagctgggcttccccacaagcctccaatgagtctgggtcagctggttccccaagctgggaagataagacccctggggcagggtgatgcatctggctgggacatagtgtcccagaagggaaagtgggattggcattggacaaagccgctgagttagcactgaaagtggccaagtgaccacagacagccccctctctctgtcccatgcccaggcagccgcctcctatgctctcccctccctggtagacttccaaacctttccagaactccccccactgttcctccccatccttctctctcttctcctttctcctaatattgatttttctttactgttttttttaaaaggtgatttaattgctttttaaggttactttagtctggggctttgccaagaaagcgggaaactgccccccaaactctccgcagcactcgttgctaccctggagtgcatacatatctctaaattcacccaccatctattgagatcttggggtcacacttccccgacaacatactggcctccatcatgagacaaatcacatcctctttcctcctgagggtaggcaggatgccttcaacctctataaggaaagaaatcgggtggtaactgggtataaggggcatgcggggggtgctgtgag

SEQ ID NO: 2599 - DNA, 4001 bp, Homo sapiens
tgcctgtaatcccagctattcgggaggctgaggcaggagaactgcttgaacccgggaggcggaggctgcagtgagccaagattgcaccactgcactctagcctgggcaacaagagtgaaactccgtctcaaaaaaataaataaataaataatttaaaaaatatatatatatgatatacaccaaaaggaattaagttgtgatttagattgaaaattaagttgtgatttagatttaaaaaaaagcaaattgaatgaggggtgggttacttttttcaatattttcatgattttatgtactaagtgctgcagtcaaacattcaaatcaagcaatgccctatttggggacagtaagacctatcatgttccatcttggtatttttccctctttttatctcaatgactagcatagagctggcactgttgaactgggctttttttttttttttttttttgaaacagggtcttgctctgttacccaggctggagtgcagtggtgcgatcacggctcactgcagctttgatcttcccgggctcaggcgattctcacaccttagcctccgagtagctgggactacaggcctgggccaccatgctggcctgggcttcatttatttgtaggggagggctcaactaagtgaaaactaagtttctttttaactctatttattttgtgaacatgactgattacatagtatcacaagagcctctaaaagcagcttttatcatatttgtgctacctcacacacacctcagggatctgtaaccaccagtatgcgtaagtggcttgctatggtggtaatcagaatgggctgtgtgtcttttgaaaattcacccccaatccccatgaatgtgcacctttctgtctcccccgttggcagagctgtagtaatgaggttgaattccaaggccaaatttgtaaacattctttgagacttaacatttatacagggctttcccattttaggaatgacaggtgtacatttcactttacttcaaagaaggtaactgatacagaaagattaaagagacttgcccaagatgtcattgtaagtttgggacagaaccaaagtagaatctaggacatgtaatacctgaagggctataaccctcgccacccccatttatctttaaaggttgtttgtttatggcagttaaggcttatattatattggcttcctctctcccccagtttggtatgagtgacaacccaatgcgtgttttaggaccattgctctggttaacggagaagcagcagctaacaggtggatgaggagagaccgcttaggaaggccttgccgggggcaggggtcccgatagcagatgacggtggcttatttggggtggtaagagtgttcacggtgataaagggacatatttgaaatgagcttcaaaggtagaactgataggcttccatgatgggggtcaaggatggaccccgggttgctggcatggttaactggatggagaatatctttgatggaacagatttggggtgggcggtatttccaaaagtttaaaaagactagggaggaaaacacccaaccaaaactccgccccactgtcacctgggtccagtctcgggacaaatttcaagatctcccttttcgcaactgttttcagaaaataaaaggactaactgtggctgtcaagtgctatgaataaaaagagcaaagtagcagggcaaagccgaggcccaggcaggccccacgctgcccgctgcggaccaccttcagggtccagtggcgcccggtcccgagtccaggagccttttcgtcgcgtctcacactcaccttgctgcttagatcctccttgtgtggggtcgaattgtcggtggggatcagcacagagctgtcctctggtcgcgtccctcggctgggcatttccaccgagcgcaagacacgcgggatggctcagccctgaaggagcctacggcattagccacagcgcatgcgcgcttccagccgcgctcaccctttcttttcccgcgagtcttaccaatagcgtctgcgcgctcacttgaacgcatgcgcaggccgggtctggcctggggaggagtttcgcgcctgcgcatggctgcttagggagcgagtaaacagtctggttgcaaaatctgaggttcctgtactggcctcttgtggttgagatgcagaaacgctcaggtggtttcttcatgacctcttatctagtatactacgagttctgtgcgccctccagtggtaaatatgaagaatagtcgtgcaatagaaacagcgcttaatatgatatttattatctagggaaagatgaagctaaggaacagatttaagagataccgtgttggcaaaagaactgtacagacttggtaaagttttggttaactcgtggttagggttgccggataaaatacagtatgaacttcagatgaattaatagttttttagtgcatctatgtcccgtgcaatatttgcaatatctcatttctgtggaaaaaatgactaaaacttggaaataggcaaaagagatttatttactggatgctctttcagtgctgctctggacttgactttattatattgactgggctgttttacaattctgtaggggcaaaggttaactttggtagagattttggtttggtagagatgcaaataattttttgttgtaccagataccaacacaggttatgatttattgttctgcaacacattagtcagttttgtatctaaccctgcattctgtcctaacatttctttattaacatatgcctagcttctctaatattctgtattggttttaaagtcatcggttccctcactaaccaatgagttgaataaaagtttgacatgtatatattttatgttcacattagagacatgattttaggtttttgataattatactatattattggaaatcttaagtttccacagagatgcccaactggatttatgtgatgaatcaaactatctggcgaaagaaatgtatacatcatgggttgtttaaggccaggcatgttttttatttgctcttacagaaaacccaagtggttatatatttttcctttataattgatttttaaagattgtgttttcatttctgatttgtacattcctgataagttattcaggtataacttatacattactgatacattgatagcagcaatgattgggagtttggttttgtggtctaaccatttggtggtatctgttggatgatggacgtctagtctcattggtagagaggtagataggtgcagtggctcaaacctgtaatcgcaaccactcggggctgaggtgggaggattacttgaggccaggggttcaaataaataaataagagaggtgacagagaagcgagtttgtaagtctttttgtttattgtttgtgagctcaaattaattaattacttttgtgtccactgagagggaaggaggacagctatttgagatgtgggctagtaaggttttgtttgtttgttttaacataaaggccgctcaagcagaagaactggtgaatttttgtggttttgtgtttacttttgacctgagattgaagttgtaagacagaagcaataacctctttatgtgtctgtgtgtctgtaacttagaacaggctttatgtctccctttgtaaatatgaaatatttccctacttctggagtgtattaataaatcccactatagtatctctaattaaagggcctctgttctgactagtttatagagaaaaataagcactggtataatcccaatatttttaaaagcccagaatttccaatactttaaatgtgccagatttttaaggaaaaaagttcttacaaaactgctagcttagaaacattttaagaatccaagtttaggaaaaagagagctccaaagtgaagtatcacttcactttgttgttgttgttattttgagacacagtctttctctgttgccctggctggagtgcagtggtgcgatctctgctcactgcaacctctgccttctggattcaagctattctcctgcctcagcttccc

SEQ ID NO: 2600 - DNA, 4001 bp, Homo sapiens
cccaactaagacaggctttgaggacctgagagtgaccaagccatacctcagggaatctgaaggggtcccacagttctttcaaagacaagcatttctagcttccttgggagctcttccagcctttgagtctttgtcatcaacagcagcttgatgaccatggggaccctgtccctctaagccagcctgctctccctcacctgtgcctgttcagtggaagcctcccctaccaggggcagattaaggcccctgcagagggaggcaaaggggagagaagagcaagagttgataagcagactggccaagcccagtgacccccatgaggatatgcaaccccccccacagcggtgggtcttcccaccaatatttaggaggttaaagaaaaggtggcttctcagtgggatagctcctgccgcccttcttctgaggaggggtcctcctctatgagctccaggtcaaactcatcttccagggaccctcccacaggcagaaggcgaaacttcttccctttcagggtgcatgtgcggtgctcaaagtccaggatagcattgtggtcctggagcacatcagtgccaatgatggcttcctcggcactcgcattggccactaggaactgtgccttcagcttcagcttgcctagggacaccgctgtatcccagacacccaggatcttcatttcagcaccattggccacctttaccacattctcaaagggctgcagggtgtccagatcgccatcagtgacctcctcccacaagtttgggtggaccacagagacctgggccccagagtccaccaggaacctcacgggcactttgccaatcttccccttgagatagtagcccttacccatgctgttggcaaagacgatctctttgggcaggtggctgggggcagccccagggaccccaaaggccttcaggagggcctctttcacagtcccatagtctccctggtcctggggactgagcctattgtagacacccagggcctctcctctgagggactctttcaggaaccttagcttggtgatatggtcccaatggttgaggtcattgatgacttcaaagctgtgcagccagaggtttgggacgacattggccccatcaaaaggttccgggacgaaggcatgctgccggcggccttcctcactcctggctccgctcccggccatcctgctgctctcctctggaacctcagcagcaacccacgccaagaagagaaacccacagagcagtgtcggcgcaatcacgctggaaaacggggcctctcgaagcagagtggggatgacttgcccggccttgggcaagcaggagggagcaggcgcggtcggctggctgactgctggggcagaggcaggcagtgctgtggcctgttcactctgcagagcctttttgatgcctaggctggcccctgggctccccattctcctttgttctggaagctccgcccctcctcaccccgccctcctgccagcatccggccggactagcaggatgggtgcctcaccctctgcatccatccttggaccaacaccagccagcccacatcccaagaaaggccagcctctgttgaagggggactaccctgtaccctccctggcctgtgttccagaataacagatgaggacacggaggatgtgatgacattcaggtatttgtcatcagccagtgaaggaaggggaggcagggaccagacgcccatcagctcagagaccggggaagccgccattggcctccccaacaagtgactactttgagtggtcaaaggaaaacagtttacatgtactgagctcctaccacatgccaggcactgggaagtgtctcacacacattctaaagcaggtatgggatcctatgggatttcctggagagggaggcagaggagggttccagcataaagaatgcacagaaatggtcttttttaagtgagtgaggacacacacacacacacacacacacacacacacgtgcacaatcatcttacatggactcaactgctgcagtaattttccttcattgatcacccctgattcagaggcagaggggtggccaagcaactctgggtaggccccatactgcactccatgagcattgtctccaccctatccacccctctccatttccaggaactgttccagggccccttccccaggcactgcagcacttcctctcccactccccaagctggtcatttgtggaaagatcacgggaaatttcactcccttttcattctgagagggaaaatgtccactatgttggtgatgccagtggtgaggacctggagggctctggctctgtgcccctcgctgcaggggtaaagggtagcacgggaggacatccagtcgtctacagaggacatctgtgagtccaagggctggaggcctgacttggggctgtgcaggggctgttgaagggatccacttttatgtccccattcaaaggtcactccatggagccttctgcctgtccctagaaagggcacccactcctcgttgagcgtgttttacggtgtgatctggtggtttgttcacaagtctgcctcttgctatgaaccagagtctggggctcacaaacctggcatttgtgattgtctccagcccccagaacaacttcctctgggacccaggggctctttgctgggctccaggcctagctgtgtgctgtcaccaaacaggagtgattaaggatgggagaggaggaagactcgatggcacacctgtggctctggggctgtttttcctggccaagagcctgtccctcttcagctccctatgccatgcatcacccagtgcctggcggaatcccagcagtaccctgcctttggacagtcctgcctctggatggcccaggtccccaaccacaatgcaagactgtgctgtccccagccccttccacctgattcagtgagccagcagagaggcagttgggtcaacacctctcatcacagctgcctggctaaggtggggccattgtggcattccaggagcccagaggaggggaaatggagtcaccgagaaggtgttgagagcaggtggttctttgagaagactgtataatgaaaaacctgcatccagagaaatggcccagccacacgcaagaccaggaagccctttctgcagatggacttttgcagatagcttcccagctgctgggatgagtgttgttctgtggctcaaagaactgatccagtggtttcctgattccctggtattcattacctctgcacatctggtcccctggaagtggaaatgagtgaggaggttagcatgcgaccaagggaggagcgaggcaggtggcttgtcagctgacaagctgggactgccaaatgccctgaaccggcttttcaaaccatagtggtagatgttgaattccgatctccctactgcccttagactagaaatcggtggtcccttgggacctcatttgagtgggtttggtgttcacattggcaaagcattttacacacatcacctccatgaggagtataacaacctgggaagaagaccagctccgctccaggaccctggagcacaggagcttcaatggcctcaggtcccaggctttccagcggccagagaaggggattttgcaaggacagggaggtgaagcgctgggctgagagaggtatagcataggcgccgggggcaggggtctggtgggcagtggacaaagagctgcttgttaaatattcaggaatttggtgagtcaattgttaaaccaattggtacttgaaatcagacttggtggaagtatttacatcaccaaaattggcaaatgctaaatcaagactttttccccctctggaatgccagttccatcacacccctgcatggaagccttggtcacactgactctctagggcaggcaaagcactgtggctggtgatgaacaagtttatagtaacctccacccctgcttagctgcttgggcccaaatcacctctctcaccaaggagcccaagcccaccttggccccatccttccccacaatctttagaattct

SEQ ID NO: 2601 - DNA, 4001 bp, Homo sapiens
aggcacgggcagcccttatgagacagcctcaccgtaggtgataggatagttgttggggtcaccagcatttgggagttttctccattggttctggttacctgcagaccactcacggtgatccaggggtgggatggtgcctggggctcaaggctcagctggcgctgggctcccaagtcagctcacagaggaagaagggggcagatcacacagtggctaccacatctggtaggatctcacccacccttagggcaaggttgtcccctgttcagcccgattgcttcaaccctgagtgcttcagccctcattgctccaacatctgaactccagtctccatttcaactggctttgttcaggctatttatacaccctcattcctcagctgacatccccagacagcaaggccctgagcctgacttttgttttttgttttttgtgagatgctctgtcgcccaggctggagtgcagtggcgcaatctcagctcactgcaagctccgcctcccaggttcatgccattctcctgcctcagcctcctgagtagctgggactacaggcgcccgccaccacgcccggctaatttttgtatttttggtggggacggggtttcactgtgttagccaggatggtctcgatctcctgacctcatgatctgcccgcctcagcctcccaaagtgctgggactacaggcgagagccaccgcacccagctgagcttcagacttcttaatcacacctgcagacagtcctgcacagggtggctgacaatctcagactgcgactaaccgcttagctccacgcccaggccctttaagagcttggtttttcttataaaagtaacaatccactaagaaagatacaaaaagaaagagtagacttaagcaattgcccatagaatttccacccattcacacctgtagtcccagctgctcgggaggcagaggcaggaagatcacttaaggccaggagttcaagaccagccggggcaatatagcaacaccactccatctcttaaaaaccacttagagcccagagtaagctggtccatttcctcccaggctctgcatttctgagtgttcggtgtggttttcacactacataacgtcgtgcccctccaggccgtgagaagatgtagtgccctcaccttggttaattgcaggaatgtccttgtccccggaggcctgggttccctcaggggtgaggccatctgggaagctggtaccacaggctcctgcgcagctggaggccaggggcgctcctaggatcacacctggtccagacagacaggggcatacacagatgcctggagcacccaccggtgagaccagacagcaggacatggggtgggtgtgggggatcagacggtaagactcagtccctaggaagagtaggctccagcacaaagccaaggagccttcccagcctccctgctcaaccccaactggtgccaaggtctagatgacctcagggaaggagctcccttagggggaccaaaagggaccatgtgccccacctatgaggtagaggaggggcaggaaggaaggaggcaggacagacctcgggttctgacgcccgtgacgggcagggccagcctcagaccccaccttatgactctctctcagcccaggctcttggacaatgggctcagcctggatgactccctgcctgaccaggctggagtggggacttacagcctacccccaccccaagacaagtaggcctggggcacaacacttatcttctgccaggcaggccctctgcttccagggccttcaggaggcctccccttggccccccaggagctgacttctagaataaccctggagagctctgtgctctgagctactgagctcagctacaatccctgcaggctccagccacaaccttctagcctctccccagctttctccaggctggagccagcagcaggagggacaggcagccagcttacctggcaaggagagcagacccagcacccaaggccagagaccccctacaccctccatggtagagccctgctgccccttcagcaaacaagaccaagccccagcaagacacagtaacctaattgcagaaccggcaccaccaccccctcttaaatagcagctgctccacctcccaccttgctcccctcaaccgcctccacctgcagccccgccccaaccacctccacctgcagccccgccccaaccatctccacctgcagccccgccccaaccacctccacctgcagccccgccccaaccagctccacctgcagccccgccccaaccagctctaccggcagcgccacccaaaccaggtctactggcagcccctccgatgcctacctgtggttcccaccccagcccagtccccttcctggctgtagcaggtgaaagacaggaggggcccgcttgggagtgtggctcttctgaggttccttcctgcctccagggggcagagaaacatcgcagaaagttgctccaggcctagctgaggccccagcccaggtatagacctattcctccagcgagggagaccccctttcctaccccggcctgtgcttagacatggggaaagctgcctgagaccctggggcgccccccgtgtatctccggaaggaggaaaaggtcactgcactttcacaagcttttattttagtacacatatagaaaagttcactatcacaagcacagggctccaggaaatttcacaaactgaacagtgtgcagcaccctagaaagcctgccatgtgggaaaggtggaacccccagatgcccagagcctcgcagggagtccaccccctaatcccacagcagctggcatgatcagtcagtatttattcccatttcacagatttggaaatttaaactccttacctatatcccccctcctccatacccctgagccccagagccaggtcactcagggccccacctggattgaaatcccagaggcggagcatgtcagcgctgggcagcatttggggacacccccacagtcacctgcacccagtgaagggaagcgacagagccaagaagaatagctattgtccacaaggacctttcagcattcccactgtgcctggaatccagagcttctccaaagataggaatcagaatcacagggagaccatgatggaggcagacgccctgctgccagggcagggtattgacagatgtcaggatacacaccatggatatgctagttagcttgttgtggtcatcatttcacaaggtatgcatatgtcaaaacatcacgttgtatacttaaacatatactacttttatttgtcgattatgcctcagtaaacctagaaaaaataagtaaaataaagaataggacccatcaaaaaacaaatgcacaaggctgaccacttaagatgagtgttcaggagggcgcggtggctcacgcctataatcccagcactttgggaggccaaggcaggtggatcacgaggtcaggaattcaagaccagactggccaccatggtgaaaccccatctctactaaaagaatacaaaaattagctgggcacggtggcgggcacctgtaatcccacctactcgggaggctgaggcaggtgaatcacttgaacccagaggtggagtttgcaatgagccaaaatcgcgccactgcactctagcccgggggacagagtgagactccatctcaaaaaaaaagatgaatgttcagtaaaaaaaaataaagtagaccgggcgcagtggctcatgcctgtaatcccagcattttgggaggccaaggcaggcagattacttgaggtcaggagttcgagaccagcctagccaacacggtgaaaccccatctctactaaaaatacaaaaattagccagaaatcccttgaactcaggaggcagaggttgcagtgagccaagattgtgccactgcactccagcctgggcaacagagtgagactctgtctcaaaaaacaaaagaattaaaataatgataagaaataatcaccctgcttggggagagaaacagagtctttattaggacatgcag

SEQ ID NO: 2602 - DNA, 4001 bp, Homo sapiens
ctgcttcagcccaggagttcaagactagcctagcctgggcaacatagaaagaccctgtctctacaaaatatttttaattaaaaaaacaattttaaagaccctaggaacttaaaattaattagcataaattagggtccaggtctgcttacctataattaaaatttatcatgcttcttttattaacagaaagaggtcttgaggtatactgagagtaaaacagccctctgtggggatgcaacctctacaccttcaaaaaaaagtataggagtcttatcttttagagggaaactactagcacaggaagatatacaaagacatattgtaagtgaaaacacccagtaagtaaaatgtgctattatttcttaacttttttacatttccaactaagagagatacaaattgaaaactcatcaacctcctaatgcataaagtttacaaaacaaatgcacaaagtttagaaacaaatgcacaagactgaataaacagtatgacctagatttggggaaataaagagactagacggtaatataccaaatgttagcagatacagccgagcggtgaaataaatgtgattttttttaaatgttcttctttatacttttttataattttccaaatttccccacagtgaacattacttttatatttaaaaaactcattaaaaaataaaccatatggcatctaataagggttcactaagaagggctacgttgtcgaagtattaccggcattaatcaccattaaaggggtgaacacctctcactttccactattaaaatgctgccgtttaatgccctattacttttctgctgcaccctcaacgatgtatgaacttcactatctcctgccatttcatttctgcatacaacatgcttttaattttttcttcttaaaatatggtaaaagttctcactaatcctcaatattccactttttaaaatctacctctaaatttcgtcataacacaattagggggaaaattgttttgcccactaattacaacttcattagggcaccatccctttggctagggtaacgtgaaggccgggtaaactacacgtcccaccatgcattgctgccttgttcagagtaggtctctacggaaacaggaaaaaaaaaaattctacaagtcccacctgttacttcgtttctaaacacctcctgcactttcggctccaacaccaaacaaaaacaaaagcctcgtgatctctcgtctgctccgggagccagacaaacagggggcccggggtcacaggcacgtccgctgtaacgggtaaattctatccagctccagcgctcccctctcctttccggggctggatgcacgcacaagccttctcctatctgcatccaatgggggctctccagccgcacaagggagaagaaccggttaccgtgcaagcaccacagacttccccgtgccggggcgagggctaccacagagcggaggtgatatcggctcgaccccaaaagacagcctcaaaacactgagaggactcgccgcagacgccgagggacgccacggccccgcggctatcacgttccgccgggcgcctccattcccacagggatcgcaaccccgacactaaccgccgccctctccgcgcggttttgtgccccttcagccgggtccctgggccagtgacctccctttccctgcgactggcgggcgacaagggaacaaaatcctcccggccttccccttcgctccctcccccttaccgtcttggcggcctccgcccaggtcctgcccttcttcctacgtcccttttccctcatgtcgggtcttgaactgactgggaggctcccgtgtccgggctccggccgccctccctgcctgctctgccctgcgctgcttttcccgcggtgccgggaaaggtgggagaaaagggaagtcagaccgggggggcacccaagcagaggaagcggcgggggtggtgcgcgggggggtctatggggcggccggtcctcttgctgccgttgccactgctaccgccgctgccatattgggttcttactgtacaggctgccgctacggtcatgtgaccgctcccgcgcggccgtcactactgtacgcagccggccgcgcgaacgagcgcgggcgcgcccccgcctcccaagcccggccgctgagctatcgagccggcggtctgcggtacctcgccacgcccccgcccttccggtctccgcctctccgcaggagcatgcgcgccaaggaggccccggcagtagctgtagtctgacgcctggcgctcacacctacagcgaatatctgcctgcggaagcggaacctgtgccatccgggaaagcttactgagcggatcccgcctcttgcgaggcgctgcacaggctgtgtagacctggggagctgaactcttccctcagtgggtggctctgccaactatcactttagatcagccctgcgtttgtgttttctcatttatttgcatttttacagaggttatctttttgaagataggcaacaattctcgtctgcctattaaccccattcgataggcgaagcaactgagattgagtgacttgccaagctcataagtctgggatgtagagaaaccaaaaatcaaattgccagctcagagccctttccatctccccagaatgcctcaaacttaggtgactttgtttttaaggccaccagtaactgcatccatgcttttacatgtgaagctactcatcaatgacagaaatggtgtcttctttatttcggtgagctcagtccctagcatagtgcctgtacatatcaggcgcccagtaaatatttgctgaatgattcacctatttctgtggtcagagaccattatttgtagtatccgtaacagctttctgaaagatccagaatgtggcatcttctcttacatcatctacaccttgataccttgcaaagtaagaagaatgtagtaacaactgctgatctcccaaatccacctgcttccagaagctgcttccaaacaatccagtaaacttactatagtgtgaaataggactgaggattggattgcctcttgggaggaaagacaggtgagagcaatacttaaagtttatggatgcgtttcagaaattcatggactccctaaaattatgaactatattttgtgtgttatatgtgaattttttaagaggattcataacttttcctccatttttcaaaaaggatctgttgtgcaaaaaaaaaagagaaaaagatattaaagggagtttgagaggccatctagaagtatctagatacttccttatatttccgttcagtcatggatcaaacagcctatttcagcaattgatatggatatattttcccaaatgtctttggtaattcatagccttatgcattacacaggtagtatgtaccacctccctccaaagcttatgtctgtagtctaagaaggccttctcgccaggtgcggtggctcacgcctgtaatcccagcattttgggaggctgaggtggtcagatcacttgaggccaagagttcaagacaagcctggccaacatggagaaaccccatctctactaaaaatacaaaaattagctgggcctggtggcatgcgcctgtaatcccagctacttgggaggctgaggcaggagaatcgcttgaacctgggaggcagaggttgcagtgagcccagagatcgcgccattacactccagcctgggcaacagagcaagactctgtctcaaaaaagaaagagagacagagagaaagaaagagaaagagagaagagaaaaaaaggtcttctccatccctggctgttgagctgagtacagcttatcatccagtcctgttgtttggtcctggagccccaactggttttcagaccttactagggtccttactttgcatttctggagctctatccccaggtttgaatttcaagggtagggattgtgatgttgtggttcctacttcttaatcttccacagatacagatagtttattattattataaaagtataattccccaaaaagtattttgtccccatgt

SEQ ID NO: 2603 - DNA, 4001 bp, Homo sapiens
cctcagtaggtcaagaagcttgaacatgtttggaatagtttccaccgaaagcctcgtcttcaaagtacttattctcaacagtttgcacaactttcagatttaaccttatttcaacctaagagagctgtaagcccccaaaatagtctattaaataggacgttataatgcccaaaattttatcaaagaaaagccaaaacgattttcaaagatataataaaaatatttcagagtagtatggtaaaatattcctgtctctgcctagatccattctgttagtgtcaaaacagtgtaagacacaaagaaaagcacacacaaaccgcgatcttgtagacccctagaacataaaatattgctttcccccaataagaaccacaaaatggtgtggaattaaaggagcattttaaatgaacagctttttccagccaaattacttagcaagtcaacctcttttagacagaagcaatacactcttctctgaattcagaaacaatctcatagtaaaacaaacgtgtcaattcctttaaaacaataaatatctgtgcttagctttataatgtaggtaataaaatttcaagatctttcaatcagttttttaattcaatcaccagcgtctttaaatgtcatttttgcaactgcatgactatggtgttcattcaccttttgtaatatagtcccataacaaaaatgtagacacccaagaaaccacacagttttggcatgatggtgctgactatccgaaacattccacttgtttctttcgacgtgctccttctgtgacctgaaagctctggttcctactagcaccttggtgagctagctggctggttccccagctataatatcatgtttgatctctcctgcctggagaggcgatagcgttgattttgtttttaaagttggtgtcagagcagctacaaacttttttcagcatccctgcctggctgccaactggagctctctgttcacttcctcaccaacttgaaccacccccaaactgagagtaagctggagttagacagcggcaggaactgacacactttcaagaagggtttgacaccgcagaaaactttcacttctccaacccttccacccaggggctctggcccttcgctcttgcttccccgctagaattcccctctggggcaggacaaggacacggacagcagatcgttcgaatgacgccgaaagggacccccaaagccctctcccctggactcaagggctgttcttcacacaaaagagccgggccagcttgaaaagcaaaggggccagcgtcgcggcccttctctgggtgccaccctccaccgcgcccgcagaccctgtctccagccgcccgagcggtctccactgtaggcttcctacccccaacccggccagacaaagccccggcagcagggccggcacttccgagcctccggactcgggacgccgcgctcttaccctggcctcatccagagtgacgccggcgccaccgcttcccccggctttggcggcggggcagctggcggcgcgggtcttggaggagcgggtccgagaggagatgaaatggctgctgcctccggtcgccccaggctctgctccggccccaggcccaggcccgggaccaggagacttggacccgagaaggcggagagagctcttccgggtgttcaccatggtccagccagggggacggagtccacgccgcgcccgggagagccgagcaaggccggcccgccggccggtcagtcagggccagcggagccgagccgggcaatgagagacgagccggcccggagcgtgcggagcgcagacgagcacaagagagagccgggcagaggaagggaagtcggcgtgagcaggcggcgtgcgggaagcgggggcggtgctgcagaccggcagcacagacactccgccggcttcgccctcctcagcgggagccgagcggagccgccatttctacccctttctctcccgttctcgctctcgagctccgtgcgtcaaggctccagcgccgcagggccaacgagaccgcttccggccgcagccacggcggggcgctgcgaagccggccagcccttcccggctgctcgctcctctccctgccgcctccagctgccccgcccccggcgcggcgtcagcgctcggcggccggggagcgacgctctaggctgtcagctcggtggtttccagctctccccgaccgcagggctggggcgaccagaaaagccagactaatcaggacgagttcgggcgtggaattgggcctgaagccctcatgcccagccaggcctgaatgccccagaccccaccgtcacccccgtggcctggatggagcaggggacggccggcgaaggcgcggggtggaaggggagcggcgacgaaggcgcgaggagctgactgggaatccccaagctacccgaggcaagacactgaacttgagtcgcacttttcatgcctgtagaaatgagaatgacagctgtgataaaaaaaaaattcatctgggcggtatctggaacttggtaagcttaagaagagaaggggggggggaaacaccatgctagaactctgcgtttttaaacaaagcgaggcagggtcgttttctatccccttagccagatctaaggcggagccaaagaatgagtaccctgtaagagccgcctctatcgccgccccctgcccccggcccgctgaagaattaagaatacaaaaagctgaacccacagataaagcatttgcaatttaacttccaaagaaaaaaaaattaagccacacaattcatatgaaaagctctgctgtaggccgggtgcggtggctcaagcctgtaatcccagtactttgggaggccggggtgggtggatcacctgaggtcaagagttctagatcagccttaccaacatggtgaaaccctgtctccactaaaaatacaaaaaatcgatgggtgttgtggtgggcacctgtaatcccagctgctcgggaagctgaggcatgagaaccacttgaacccagaagatggaggttgcagtgagccgaaatcacgccactgcactccagcctggatgacagagccagaccctgtctcagaaaaaaaaaaaagaagaaagagagagagaaaggaagaaagaaaggaaagaaagaaagaaaaagaaagaaagaaaagctctgctgtaaagtaggaattaggttcatttcaaaaattcacagtacaggccgggcttacgcctgtaatcccagcactttgggaggccaaggcgggcggatcacttgaggtcaggagttcgagaccaacctggccaacatggtgaaaccccctctctactaaaaatacaaaaaattagccaggtgtcgtggtgcatgcctgtaatcccagctacttgagaggctgaggcaggagaatcgcttgaacccgggaggcagagattgcagtaagccaagatcgtgccactgcactccagcctgggtgacagaatgagactccatctcaaaaaaaaaaaaataaaattcacagtacattagacatagcctactgtttattgggcaggagtttattaaactgtttattaaactaagaaaaattgaaaactcaggaaaagtcctgaaaatgaccaaatggcatcaaacttagagcattctggccatctaagctcccaatcattccaaaaaactgtacaacactggaaatgacaattttttttgtttgggaaccagtatggattccagaatagataaatccttctgacacaatttgcataccacatcctctcctggacacttcacctgccacttagagttgatgtcttaatgggtgggattcctcataatggaaccatacctggattttcctgggtcaagtagctatcacatcactgagcagcataaacaagtatcaattcctgtggaaagaggctggtttgggccaggcactgtagctcacacctgtattctcagcacttggaggccgaggcgggaggatggcttgagaccaggagttggaaaccagcctgggcaacatagtgagatcc

SEQ ID NO: 2604 - DNA, 4001 bp, Homo sapiens
taagttctaaatttccacgatattacattttaaatcagttcttaaaacttaatggcagtagcattctctcaaagcaagattaaacgtcttaggaaggcaacatacacatcatggtaaatttggaagattctcagaaactcttttacacatcacggtaaatttggaagattcctagaaattattttacaaagacgaggattcttaactattacgcaactactgatggccttaaagatccatgaactttcttaatctgcagaggggaatctgtatatttaaaacgtattttacaaggatgttcctaacatttttgaaacaaagtttttacggtggattcctcaagtaaggaaaaaaaaattaatacatgataaaactgcttctgtgtttgtactttaagacacttaaacctgtaggtttgactttttaacaagcttttataaataaagctttaccttcataattttgattcaagagaccaaagctatatggctatttaaagatcagaacggctgttactcacaatgataacgccagtggtcatgtttcttcaaataggacaaaaagtgtgctcaaagaaagtcagtttttgttctgattttaaatgtatatcttaaatgcatgcattgtgaccgtctccataatttaaaacctctaagaaatttaaactttcacattataatttagggattagtcaatcccttagtaccagttaaataatagccaggaaagcattagaaaacctgaaggtacatgtaaagaaatgctttacatcactatttaaaataggtgttgaattttaagagaaacatttctttcactaaaatttctgatgcctaaggtccatcaggagtaatctcttttactccatgatattcacagtagttttgctcttggcctcaccagttttaagactctccattaaagaaagccaattttatactacctaggggcacaaaaatagttcccagctcctcctctctttttcctcctaggttcggttaaacgagcgaacatagaaaacacgtacacacactccctttcggccctggtccctagggcattgatgaaaagcaaattatttctttacatacgctctgctgtccacccagagatttaaaaaaaaaaaaataagggaaaataccagaatcagtctgcacccacacctaagccccgccccaccgggaaaaagctgggggtagcgggattgtgagggtggcggaaaggacggaaaaggccgagacttccagctcctaggttctccacaccattctttccttcaagctgcaccgcagccagggaccctgattctattttcagccgcgcctcccgatcctcctccccgccaccatcaccaatacacggtcctcaatcgcttgaatactgggtggggagaccagagtgggccctctccccgcccaacccaaggactgtgggtgggagaggtctccctgcgcacacggctgactcgacgcgcgccccgaggacctctgaactgacccaagtagggtgaagataattcggagggaggggtctaagagggagccgttattcctttttcctctgccttaggaaagcgcgcgagagggaggggccggaacaacgaacgctggttacctaacggtccggcccagccagtcaggttcccaaagcccacaccgcgcgggccgccgaggtggcagcacagccacaatcgccccaagggctaaggagcacgtcaggagcacccgaggtgatgggaaacggggggtggggactgtgctgagcgacgtcgccatgttagcgccttctttctccgtatccctacagtctccagccctgctgacctctgcccatcgttactcacctttccaggtcactagttcatgatcctttcggtcacccgcgagccctgagcacagccgtgtttacaaagcacccctggaggaaaaggctgaacggcactttaaaggccacgggctcccacaggcttccgtcctctctcgcgagatcggactgacaacccccgcccgctcgccccgctcccggcatccccaccttccttctggcgcccctccccttcacccacacgccccttcttgccttccttctgagggagcgcctccgagtcaggtgattccgtcaggcttaaggagaagaaggcgggtcttcggcagggcgggtagaggggacgggcatcaaagagcactcgggcgctcatgattggacaaggagcccgaagggcgggaagcagttctggagggggcgggaccagagggcccaaggagcgttacttctgtaaacccggagctgtggaagactgtgattggctgtcggctggaggagggcgcgggtgcaggcggcggtgaagggctaggcagggctttggcggtgtgaggggaggaaaggtggtgagctccggaaaggctgctagagggaaagcaggatgggtcctccgagcccagccccaggagccgggtgtctccgtttccgtcacttcccagcactaggtagggaggtgggtaaaagtaggctgcgttcctcagcccaccccttggctccccgggagcctgaggcggggagcttcgggttaggtgaggtttgggggaggcggagtttgctggtaattgcccatccctcccctccaaaaaaccccacacaacttaaagattttaatattaactgtaaggatgttggttattcaataaataggcacaagttgaaaagtatgatcagaggcctctgtgagaatttacattattcaataaaagattttcagtgtcttattttttccatttattaaatactgatttctagtctggaacaaaattatgaactagtttatatattaacataaaatacactctcaaaattgttgaaaggttttgggggatagtatgagagttaatgagcctgaagttcaagaatgatatctggcataaaagtgaaattgtaatggcattgacattttaacaggtaggtctctggaccgcatacatgtgtataagccaactcagtcctcttttaaaactaattttagttaagaaacattaagccaaattattaacactttcctacttaaaatgaaagtaccgtccccatatagtaacagtaatgtagtagtgccattgtagtgtaacactaattatgtcagcaaaacctcacagttcagattactcatgatggaaatggtggacaaaatgtttgattgacatcacaattgttaggtctagaacgcattgattaaatagatgcttctctctccatctcccaaaacaactaatgtgagaaaaagaactgcaaatgttacgacatttcaaaagaagtttgggtcaattagaatagatttttttaaaaaaattgtttttccatttgaaattttttccagtgttgattcaattgggcagtagctttggttttaaatttctcattgctacttctccagtctgttgtcaagcagttagttatctacatgatgcattcgagaaacacattattttaaagaaagtctttcagttctttttagacaagagaagaactgtttagtgatatgaacagtactctgatctgttttgataattcagttttagctaattttctaaagagagggtatacctaaagtgagaaaaaaaaataagataggcgcaggaaacaggtggaaactatgccgatctgttatatatgcattttggcagcccggcatttaacaaagggtctcactttatccacatatttctagttccacagcagtttgtttactatagtttttctacaagtggggaaaacattcagcattgtcaaaatgaatgtagttaccatattcaggtctgattccatgaacttgtctcactacttattcatatcctcataaaatgccacccttttccatctttgttctcacttttgcattcctcaatatccccaagagtcctaaaattctttacagtcttctctttacaaacgcaggaaacttcttgtagacctcttctttgcctgtcttgttccatgatgcatctacccaactt

SEQ ID NO: 2605 - DNA, 4001 bp, Homo sapiens
aagttcaagatccgcctggccaacatggtgaaaccctgtctctactaaaaatacaaaaattagctgggcgtggcggtgcttgcctatagttccagctactagggaggctgaggcaggaggatctcttgaacctgggaggtggaggttgcagtgagctgagatcacgccacttgcactccagcctaggtgacagagcaagactctgtctccaaaaaaaaaaaaaaaaaaaaacaaaaaaacccagtctcaccattaacctgctgtgcaacctcagaagttacctaatctctcttggcctcagttccatgtgtgaaaatggcaataacagttcctgcttcatacacagaattttgggaaagataaaataacacatgcaaatacttaccacagtactaaaatttgtctgcacagtagtcatttgggaagcatcaaaaaacactgataacttggcatgcagttctaggcttaatctcacacaaacacaaacacacacacactgatacttgtgtactgtgatacttgtgatttagttggtctggggtgtggcttgggatttgtaattttttaaagatccataggtgattctaatgtggagctaagtttgagaactactgattttgcacaatcagaatgcaatataaggtagcaattattattctgaatatcatcaacagcataacttgagaaagtcgtcaggtttactttcagacgcagatggaaccaccttaggaccattataatttaggtaaaggtacaaacatttttgtacccttaagctgcaagcagtaaggggaaagaaaaccacctctttcatactgaagatttcagtaacagtaaaggttctgtcccgcctaaaagatattacgatattaacaccaaggtggggccgggctcggtggctcacgcctataatcccagcactttgggaggccgaggtgggaagatcgtttgagcgcaggagttggagaccagcctgggaaacacagtgagacctcgttccaaaaaatttttttttaaaaaaattagccgaccgtggtgaagcgcgtctgtaatcccagctactcgggaggcttaggtgggaggatcacttgatcctgggagtttgagactgcagtgagccgtgatctccgccactgcactccaggctcggcgacacagcaagaccctgatcccctatcccgtttccccgcaaaaaaaaccaccaaggtggagtaagggaagtaagtttgaggaatcaaaggccacccgttccagtgcattgagaaggcaatgttaattctgcgactgaaagtcaacgaccgtttcattaacatgaccccatagatgggatgtttctgggacctatttaagtgcataagcattgtatgagctactgggatttacaaatacaaacacgaactgtgcctccccacaaagatcgtacaatttaatagggaaaatcctccaaagataaaacgcaggttagaaaaaacatttaaaaggcgtgcggcgtcccaagcgcgggttacccggggcggccgccatgcgtgcgggcggcgccagggactcggcctcaggttcccgctgacgccccgcatgcctccgcggggcccgcccgccccactcccagcccgcaccggcgccgctcacactgcaggatgatctcctcgaacgcctgtctctgcagccggtcccggcgcctcagttgctccgagatgtggcgcttccagcgggggaagtcagcggcgcggaggcccgacgacatgtcacttgctgccccggcacctcagcgccaccaatgcgagcgagggctgacggccgcagcctgcagcatgaagcaaccagcagaagcgggaatgccggcaatcccggagctcacctccacacactggcagtccccgaggccatccgggacggtcttccggctcatgccggaaatgattttcgagagggccggaagacccgccccctcacccgaagcacgggctcaggagccggtgcctacgcagggcgctcgctagtgacgccagcctgtagccggaagcgtcagctgcagagaggtggccgcttgggggcgtccgggccctgcgcaaggcccagcgccgggcgggaaggaggcaggaaaggggccgtttccgcctgactgcttacttttcttttgctgcttttcaacccttttcgtgttttttttcttggcctgtctccccccacttttatttttaatcgcagtttaggaacaaatggggttccctccatagtagctctgtggctgtggatgagtgacagcctacctaagcctcagttgtctcatctgtaaatggggacagtaatgatacctacctcagaaggttgtcacgaatagtaaaaagaaaaacccatgtaatgcagtcagcactgtgcttggtacaggggaaacctaagtttacaaagacacctggtgtcttcccaaggcctaccctgacagcaggagcattgccatcttggacaactgccaccattttaagttccccttgattaagaaactgcctaaatccaacccaaaaacatcagcctaatggctaatgtcagcataaccagaaacattccaaccctaagataaacccacttccaaccagaaacatgccaacccagagatagcctcccctccggccagagactttccaaccctgcaataaactttccctcatacagaaacattacgaacctgcaataagctcaccgcttcgtaaacccttaaacacccttagtgtgtaagagaaaacgctcctgaccaaaatcgacaagaagcccctctcaggtttattctccaaaataaacctgtctttgattgttaagctgcttttcgtgtttctttcttgtttcttaactcttacatacctgaagtcagggtgcgttgggaagagtgtcccactgaacttggaaacaggttttgtggtttgtttggggtttttgtttttgtttgcaatggagaagagaactggaaacgggagctaagaaagatgtgaattgtgtatcagagtttgtcttcattgttagaatcctagaaattgtggcctgacaataaatggagccttagaaggtaatctgaggctgtagatgttgaaagggggagatgaagacacactggctcctgagaaagttgtgtctgtgaacaagctcagtagaatggaaaacccagttctgtaatagagttgctggagctccatctgcctttaacaattagtgaatttactgcatgaaaatggagccagacaaagtagttggccaaaagaggaaaggaatatcagaaactaccttctcttccagtgtgtctcaagtccagaggaaggtccttcagagacagataagaagaacttaggctgaggagaggaggacagtcaggcttctagcactgtagttgaagatggttcactggtagtcagtattgagtggacctgaagtcgttggaaggatccaatgggatcagaaatagaagtgacttcctcacacgctgaagaaaatgaaaaagttctgaaagtgaccgagaatgccttcaaatgcagcagtggcaccacccttaaaagaccattacaccaaatcttgacagttgagcatgttaatttcccacatttatgattaaaatatgtttccaaggttgggcatggtggctcacacctgtaatcccaacactttgggaggccaaggtgagaggatcacttgagctcaggaatttgagaccaaccagcctgggcaacatgacacaacctgtctctacaacaatacaaaaaattagttgagtgtggtggcgtgtgcctgtaatcctagctactgggatggggctgaggtgggagcatcgctcgagcctaggaggtcaaggctgcagtgagctgtgatagcaccactgtgttccagcagcctggtcaacagagcaagaccctgactctctctctatatatataaaaatatgtttacaaatttgcagtttgcctaaccagcaattccacttgcaggaatttatgccaagaaatatttggacacatgtc

SEQ ID NO: 2606 - DNA, 4001 bp, Homo sapiens
aactattctccaccctcctcacccttcgattgtcagtgttaagtgtagtctcattcttcttggacgtgggacaagaactagggacccaatgaatgcaagtacaaagaaggctgtaacactgtggccctgggccctctgccggcaaagggcagccacccactgtgacaccccacgtgacaggaggcagcaaagggaagcagcggggacggagccagccccagagctatagcctggagcagggcaatgggagtaacagggctgctgacactctgcaacaccccctcttgggcttcagggttgtaagcacccctgcttgggcgccactaccttccccttgtctggacaccagaatccactgtccctttgtctggacgctggagtccgccgtgggagttgcttgccacatgtctagctgtaagctctgcagagcccactctggtgcctgcgcttgaaacagctggcgggacccggcactcactcacccacacacccactcccgccaggggctgagcatacagtcatggtggccatggtatccgtgccatagtgcaaaccaggtgcccaccggtggaccaagtagatggggtatctcctgcggcgagcctggacccaagcaaggcctgggcaggggcctcgccagccggaggtctctggctgccagagtggctgagaaaaatcctgcatcacaaacaataacacctaaaaagatataatacaacagttgtaaaatagtaaacaacaaatagtacacagctgcaaatagttcaaccgtgaatgacggttattctaaaagacaaacttcacaagatatacacctggtcaacatgctccttagggagtcagggctcctgtttcctccagccacctaccacatttaagtggtgagctgctacaaatcattttaatagatattggcaatacacattacagttttccaactcagatcttaataaatttatgttgtagctaccagaaaaataaaaagtaaaaacaatcccattcagaatgacagaattaaaccagatgaaaatctttctttacagatgggggatacttggtaaaaggcaaatcagttcccacaaagaatgaatgagctaaaacttctgtgtaaaaatatttctagggctactgggctagcgatgggtttggcgctgacttaaaataatcttgctagcaaaaatggagcggaagcatgaaaggataggaaaaaaaccaacactccctatacacacacacacacactccttctctttctctctctcttaggaccccaagaaactaagacccgatgatacaaattcactgtttctctttctcgtcacggaaaagcagcttggagaatctactggttactaaattgaagacaaaaacaaaaaagatacgtatactgtgatgaacacgtcacgtttctctcctccaacctaccaataacttcataaaagttaaagagcttccatcccttcacgctcagctgcggaaaggctacgctttcgcccgccgctcgcgtccccggcccggaccgcggccgccccgttcgccgccgcgcctctccccgcccggcaggctccgccgccctccacggccgacctggcgcaagggcctgtgcagccacaacctccggagcgctccggacgggaccggaaaagcagaagctccagcgcaaccgacggcgggttccgcggcgcagtgcgccgccgtccccctcccgctcccaccgcccaccacccaccaacaccgccccgcgctcccgcagcgcccgccgccccggcccagcctggcccgcaccggcgtgccccgaggcgagtcgcggcagcccgacccgagcaggggaggccaatgataaggcgagcacctcctgcggaaagaccgacccccggcaactcctcacctgcgtccatcttcccagtccggccgccgactgacccgagcggcgtcgctccgacgggccagcaacgcgacgcggcgacgggacgccgcgggggccaataggtgtgccggcgcaggcggcgaagacgatacggcgcgcgagcggaaatacgcgggagccgccattttggcgtacggccgggccgacgcgagccccggggcgccctgcgggcggcatggggtcgtgtcgtgggacgacggctggttctgctgtccgacgggacactgtgtgccatgggtggcgcttcctcctcttagaggacccaggagcagttgtcgaggcggcagaggcgagctctgtccccgtccgagcagccatcttgcggtacggacgtgctcggcgcgcccatgtcgcggtacggacttgccccgccggggcgactcccccgcccgtctgcccgcctgccgacggacgctgcgaggggcctgcggcgccccgctggtccgaagacgcccgaacccgcggctggcgaggacgcgggcgggggctggggcgggggcgggcccgctgcgggcgcctgcgcctccatcttgccgtacggcgcggacgccgcgggccggcccacgtcccgagccgtgtcgccgccgcgctccctccctcggggcggtccgcgggcgggcgggcggctagggccggggcctggctgcgcggctgggccaaggcccgcgatggtgatctgctgtgcggccgtgaactgctccaaccggcagggaaagggcgagaagcgcgccgtctccttccacaggtacgcgggccccgggccgccacgcccccgccccgacccggccctgcggggaaactgaggccccgcggccggcccgaacgcggggggcgggggcgccgggcctcggcggccggggcgcgggggagcgggcgtgggcgctgtgtgaccttggcccggccgccgtctctgggccgggcgcctcgggcagcgcagccgcccccaccccggccgcctgggtccgccctgcgcgcgatcgatccggccggcgcctaggcttcagaagccgcacgctctggaagcgcaggtcctgggccgattgtcctgctcggccgcgactgctgactctccggaccgcgcgggccgtcggcctggatgtctgcgagcaggagcgaccgggcagacgcgacctgcgcctccgtagctgacagcccccgagagggctttccgggactgggcccccgagcccaggacgcgggtacgcgcggagagtctacgggacggccggctggggacggcatcctcctgcgctcccttagagcctggcccggggctctcggccgcttcccacgtgggcccccgcggcagggcccaaacccctctaaggccttgtgagttcagcctatttcagtgagatttctgcggattacacgcgggaggcaccagaaccgcgaacagactttaaaaaccactttggagatgtttctgttttatgttgcatggtgttatttaagttttaaagacgggaatggcacgtgttatttatagggttattgaaagttcacagtagtttgctgtaagtcttaaatcattacaatgtattataagaattagtaacattagattatttcacaagtcagccagcgcactttcttgacaatttccttcagagcttgtgtcctagaagttttgttattgttttttgaaaacgaggcaacgtgttgcaacggtctaacatggtatgggaggaaaggacatcggaattgggggtgggggggtacctttgcagttggcctcacagtgttcagaaaggaggttagaaggtcctgttgcttagaacggcccagtccatcctgttaggatttgtcctggtccacactggcctcaggtggagcaaatagcagttagaactgaccaccctgtcccttatgtgcacattagggcctggtttttttttctttttttctcttttttttgagaaggagtctccctctgtcgcccaggctggagtgcattggtgcgatctcggctcactgcaacccccgctcctgggttcaagctattctcctgcttcagcctcccaagtagctgggattacaggcaagcgccaccacgcctgtctaatttttttgt

SEQ ID NO: 2607 - DNA, 4001 bp, Homo sapiens
ctacccccacctcccaccagagccccggcttagagagacattaaaggtcccagagctccaactcagaaacacaaaggatattcgagagaagaagaggtcaaggttttcaatatggtgccaaggtgctgtgggataggaacagagatgtcagagccctgggagaacacaagccccttgctctctccatgttcttccatcaactctccctatggctgtcatatccaagaactcacacttgctcccctcggcgacgtgcaccaacaggtcctcctcccctgggggtgaatcactataggaggcctctaggcgctggtattcagtgtcaaactgcgccatcaccaccgccccctgtccaccttgaccacctgccaataaggaggaagaagagaccctgattcagttccagctgctgcccatgggctgccctgcctactgccaaaaggagaaagtacccttgggctttgtccactaccagcctccttggctcagaggcagaggagtagtgacacaagaaaggcagtaagctcagggctgggggagccttaactctggccagtctgggtgtctactgctgctttcctggcccaaagccagaatctgtccctttgttgggggctgtttcatcttctatttaacggacagaagagtccctcccccgcccatcctgggaaccctggtctcccaagagactaacagtttggaagcacttcacaaacaaatgtttgagaaaagcacatggccctaccagctccatggacagtatgtgctcctctccagccctcgatgctctgcagctgctggaggagaagatgtcaggccccagagagtgggcagtggggataaaaaggaacccaaccctcccagccatccacaccccaccaagaggaggccaagcatggggcaggaaggctgcagtggggaagaagcacccttccagcccaggactacgagcacttcctctggctgtgctaaaccgggccactcttccaactccagggtctcaagaagtaacttagggaccccatggagaatgagtgggtacagacctgaggccaggggcgcctctggactatttctccattgccctaccttagcctcagaaatgacatacttctcagggtccacaaaacctcaagagtctttcctgaagaggacctttctggtcaaccccttctcttacttccctagcaccaaagatccagccggtgagcaaaccttctggatgggaaaccttgactgggtcagtgtagacccccgatcctaggtgaatttgtgggttccctaggtcctgtaagccaggcatggtcgaggtggtactcacctgtccgtgcagcccctgggggccgtggatcttggcccagcctggccccggtgggattccctgggctagtgagagccctgcccctcagggaagtcaccactcacagggtcagtgtggaccagggcccgtggagccccggccggctgggcctgggctcaggggttcctgcggatgttgcagggatcgagtcagccttacagctgatagcccgggtgggttggcttgcctccccacacccagccgcggcgaccgtggaccggagtccacctcgccccagggtcgcccggccccaggccaagggctggcagctcccaacagcggacaacctcgcgcgcggccccggcgcccgcgcgcgcccccgtctgcgcgcgccagcaatcaaaacattccggctgcgcgcccccgccccgccggcggcgccccttcctccgttacccgccgcgagctcacttagggctccgcaggcacccctgggcaaggccagacacggggcctgggattccaataaccggtctcacgtcttacctcaggaacagcgacccgggtgattccagaggctccgccggctccgctcggctcggctcggctcggcgcgacccgcggcgctaggccgggtgtctgccactcactgtcacccgcagccaggctggccaataagcacggggggcggagacacaacggccaattctcggcttcagggacgggactaaagtctcgaggcgggtcttggacagtcagcggcccaatagtgtgctctacgtggggcggggctcaggtgcggacgccgccggttgtcctcttcgctgctccgtagtgacggggattgttgtgttgcagaaatccggcaatcgacctgaggacttgcgagccgctcagctcccgggacgtttggtgcgtcttctaagggcgtgggcgagtttacgcgggccagttgttgctggtcgcatgggtaacgaagaaagttcggctaggcaagctcagtgatttttaactctgttggactcgatttgggagccgaatgcctatttcattcttttgtgggctgagactgggggtttgagaaagtggacgggggccaaggtattcatctcacagttggtagcaggatgagagacgagaagtcttgcggtgcaggagaaaccaagtcaggcaggcaggagacgcagcagtaggatctcgtttgcaggagccctgtttcttacacgctttctactccaggagctgctgctaaataatttctgctcagccatgtcgccggctccagatgcagccccggctcctgcgtcgatctccctgtttgacctcagcgcggatgctccggtctttcagggcctgagcctggtgagccacgcgcctggggaggctctggcccgggctccgcgtacttcctgttcaggtatcctggaaggtttcgtgtgaaacgtgacagggctccttacagcgtattgcccgttcagggaacacattcttattggtattcccgagcttaggaggccaattgatttatctttctgcttgattaaattcacttaatctctgggtaatgtccagcacagcccttgttttcaaacaagtctttttgccattgcatgtatctcctcacgttaacaccattcccttcaaaaacactttaaactttgtagagataaaattctcagatgtattccacatttaaccaggccccactcaaattattcctttttgctgaatatgaaacaatttattatttgtttcgtatagctttattttttgagagtctcgctctgtcgcccaggctaaagtgcagtggcacgatctccacccactgcaatctccgtctcccgggttcaagtgattctcctgcctcagcctcccgagtagctgggactacaggcccgcaccaccatgcccggctaattattgtatttttagtagagacggggtttcaccatgttggccaggctggtctcaaactcctggcctcaagtgatccgcctgggtcagcctcccaaagtgctgagattacaggcatgagccaccgtgtcggtcctgttttgtgtaactttagtttggctacatcttttcttgcacctctccttagacaaactgtacactaattggaaatgtaaactttaaaaagcatttgggaagtagtttttgtgcagtgaaaaataattttaaactgaacagaaattattttctttaggattcacctaaacaatctgtttggctaatttaaattagacaagactcaaactcagccagtggggaggacttgcagacgctggatctcgggagagggctacgttggagaagtttaaccgaccccaaggcttttaccctcatcggattcttttccagaatgcccagggccagtttttatttacattcgttttatttattttatttttcttcatcttttttgagacagagtctcgttctgttgcccaggctggagtgcagtggtgtgatctcggctcactgcaagctccgcctccccggttcatgccgttctcctgcctcagcctcccaagtagctgggactacaggcatccgccaccacacccggttaattttttgtatttttagtagagacggggtttcaccgtgttagccaggatggtcttgatctcctgacttcatgatccgtctgccttggcctcccaaagtgctgggattacaagcgtgagccgctgcacct

SEQ ID NO: 2608 - DNA, 4001 bp, Homo sapiens
tccattaccataggaggacccaacttggcccaatggaaagcacgcaggtctggactttgaattctcattcggttgctgatgagcaaagagccaacttgcctgccacgattctcacaggtttcccatgaaaaccacagagacaagacgcaaaaagacatccgaaaatatacagttatgtatttgttaataaagtaaggcattcttaccatctgaacttgttaaacttagggaagctgtgtactgctcacatagctgggaactgcacaaagaaaaggtaataacctacctctacatggatctagaaaccaagaagcaaattttccacatggcaacaaaaagcagacagatatccttcatctctttcattctaaaatatgtttcaggggtggtcatctcgttcctcccaactctcactgccgtttattaaatagctatcctatagtttttttcatttttctacctttcagtagacttcctccctctcctcccagaatgccactccttgacatcagcaatggcatcctggttaatcatttctaagtcccttctttccatggcctagtcagctaatgaagggcttgtgaacgtgggaatgaatgatttgcaccttcatatggttaccagagattctaagggaaggcaggtaaattggaatcttcatgatgtcgagttttattaaatcaccagtcaaagtaactgaagttttccttgcataacaagtggcccacctaagttaatctgtttaaggaaggggctaagactagtgtcctaaaatcaggaacagcacgggttccaatcctacttttcccttactcaactgtttaaacttgtgcagaagatgctaaatctgtccagtgtgttgtccagggtctttctctgtcacccaggatggagtgcagtagtgccatctcggctcaccacaacctccgcctcctaggttcaagcgattctcctgcctcagccttcccagtagctgggattacaggcgtgtgccaccataccggctaatttttgtatttttagtagagacgggtttcaccatgttggccaggctggtctcgaactcttgaccgtaagtgatcagcccacctcggcctcccaaagtgctgggattacatgcgtgagccacctagcccagccgtccagggtcttaaaagttgctaaatctctctgagcctcactttttttccccataaagtggggaagtattacaccaacctcacagcgctactgggaggagtaaataaggcgttttgctgctggtgcctggaatacaatacttcctggttaatgtgatcacactcctttctgatggaactagctatgccttacctgactgccagaccagcatccctgagagcttttgcagtccctccggaagcgaccagattcaaaccaagagcggtcaggtttcttgcaaattccacaaggccggttttgtcagagacactaaataaggctgaaagagaagacattttttctcatgattcgcagcacattgcactgtgttctgcaaggccttgggagggtctgggggaggagattctcgaatcgcaaggccagcacctggaccctgcgttcgcaggcctggtccgggcctccccaggtcttacacccgcgagctgctctaaggcgggccccacgcaggctgcggcccggccggggagcggggacgctggctttcaatcccgcagcgccgcccctgcagtgccgggtcccgccggccgccgccaaggcgggagcgtggggggccgcaggcgaggacgcagaccgcgccgctccgctagggcctcaccgagctggccgggagccatggctgcaggcactgggttcagggcgagcgggaggcagcagcggcggcaccacgtgcgcaggtaggagggctgccgggatgtggcggctcaggaagcgagggggcggagctgtttccgggcttatcacgtggcccgccggccctgcccggcgccctgctctgctcagtttcagatgcaagatccgcgccccggggctgaagggaacggcgggatggggtggggctctgcctggcgcgcctgggcggagtgcttgggctggaagggatcctgcctgcgatcccgaagtccaggcgtgggagccagcgatctgcccacgaccccaaagtgaggccactccacggcctctggggcaaatgcctgttattctaggcagccggtccccagaagctggaaagtacgtaaaagtgccagaagctcccatgctgaaaactaaacaaaaggaatagttcatatagcggcaaagctggaaagtatctggacagttatctaccatcctccctttttgtttgttgtttttttgtttttctgggtttttttgttttttttgttttttttttttttttttgagatggagtttcgcttttgttgcccaggctggagtgcaatggcgcgatctcggctatgtcacgtgcaacctgcaacctccacatcccgggttcaagagtttatcctgcctcagcctcccgagtagctggaattataggcaggcgccacgatgcccggctaatttttgtatttttagtagacatggggtttcgccatgttggccaagctggtctcaaactcctgacctcaggtgatccgcctgcctcggcttcccaaagtgctgggattacaggggtgagccaccatgcccaacttgttttttgtttgtttgcttgcttgcttgtttgcttgtttgttttgagacagggtctcgctctgtctcccagactggagagcagtggcaccatctcagctcactgcaacctctgcctcccaggttcaagaaattctcctgcctctgcctccacacccgtctaattttttgttgttgttgtacttttttttttttttttttgtatatttagtagagatggggtttcacggtgttggccaggccggtcttcaactcctgacctcaaatgatctgtccacctcagcctcccaaagtgctgggattacaggtgtgagccaccgtgcccggccccatcctcctttttaataggcttaaaaaataaaaccaaggaccaatgatttaagtgagggactccagaggccacagatgacagtcaaaacgaagtgaaattgacattcgttgttgattttcacgtcataaaattataatttaaatattaatttataatactattttatacaatttagtcagtattgtaaaagtgcctaaaaactacttaaagatggtgtcttcttgcaaacctgtaaatattcctggatgagaggaatgatgacagtcaaaagaaggtaagagaagacctttcttaattcattaaaaacagggaaagcaaaattgaacacatttgtttctttctaaaaatgacacctttgccacaaaataaatacatattgtggtctatgagtcttttttgtgttattagaattatattccaaagtaatagcattgtttatcttttagtctgagctcacagctgtaaaaatgagtctattttctcattatctgcatgctatttatttttgtttttcctcttcctttctctaattcttcccatctctttactccccaaaataaatacctattgactagaatcaatttttttttttttttttgagacagagtctcgctctgtcacccacactctcgctctgtcacccacactggagtgcagtagcgcgatctcggctcactgcaacctctgcctcccaggttcaagcgattctcctgcctcagcctcccgagtatctggcactacaggcgcgtgccaccatgcctggctaatttttgtatttttagtagagatggggtttcgccatgttggccacgctggtctcgaactcctgacctcaggtgatccacctgccttggcctcccaaagggctgggattgcaggcgtgagccaccgcgtccagcctggaatcaattttttgacctctaaatatgttagccctttgctctgaacacttctcacattcctacgaggaatatattaagattatcgcatgtcttca

SEQ ID NO: 2609 - DNA, 4001 bp, Homo sapiens
ctcatttagtttttaactcattaatgagtgactcggagcaaattagcaggtacagggactgttttaggcaatcatttgctaggaatggctatcaagtgaaggtcttgctgatccgtcctaaaaaacaaaggacaaaaacctatgagtagcagacaaaagcatttattaaataataaatggtgggccctatttcaacaacaatctgaagagtatcatctcttctcaagataccacagcacaacaacgttcacaaccataactgaagtataaatttatgtttcttctaataaggtaaatacatagaatattttgaaactgcatctaaaactcttacctcaaaaaaaggaaagaaagaaagagaaagaaagaaaagaacacacacttcttcccctagggtccaaccaaaagagcgaaattaatccatccgcattccaaaacaattaattacttaagaaatccaaccagcacacatctaaggcgaagctgcttctttggtagttttttattctacagagtgctaccactgtacaaacagtcaagcgttttggttggcagacaataataaaataagctttatttccttttcttcttcccttagcaaaactccagtctgtcatcacctctgacatgcgccaagaactaccaggaatgatgaagtatatttcaaataaactttcctattaaagtgagtccttgtggttaacatcataccaaaatgctttacattttatccagcaaaacctttacacaccgtaaaaaaagaaatcttaagacacgagctcgtatctgtatttaataataaactcttatcttggccgtacttaccaaatcgtaggcttttactatttataagcctttgaaaaaactttatgcctttcttaagtaccatcaaaattttcaatcaggatttcatgcgatcaattcgcaccacagtgagagatcaaacgctaaactcctataaataggggtgttatgagtgagagggatacactgcgctgccaacgcaactgcgtcttcgagggggcaggggcgctcctggtacacgtacagtaggagctcacattcagcaaaaccagggagccaaggatcaggtgacttcacactacagacactttcagagtgatcaggccttactatcgtccaagtgactcgtaaacggctcataaccccagtttgacacgaaaatctagacttgcaccctagccacgcacaacccgcgcgaatgggttcgggagccgaggagccccgaaacgcgagcccggggacagagccctggcctgcggactgcggttccctccaggaagggtgtctaaggagctttcggacccggcagcaaggtgtctgctccccgcgcgacctcctcctccgcggggcccatcatgccctggccaccccttcctccctgtccgcgtaagggacagcgaacgcccaccagctaacgggtcgccccgccgcgtccggagctcgccggacggagcggagccgcagccgacctccccgcgccccgggcaggcggccacggctcaaggccgccccctaaggtcggggcggacacggcggcagccacgcggcgggctggcgggcagggggccgggccggtcgcagacgcgcgcgccactggttctcccagcagctactggagccgcggcccacgagccgccctttcaggccgcgcgctgcgggagcgcggggcgcggctgaggctaggcccggcgggcaggcgcggcggcgggaggagacctgaaccagccgcggactccgaccccgccgcctgcggccggtgcccgcgagcccgagcagcgagcgtctctccccatcagggccccgcggcctctgcctcgctggcccgtacctagggaggtcgtggacgagacgtggttaaccgcggcgcttgggtcgctggtccgtcgccggcgccacagcccctggtgcggttgctgccctcgcgctgcctcgtccccctccgccatcttgtaccgatttaaaattaactccccactgacgtcaaacgccgccgccgctttatcaacctcccgggagccggcggggtggccggcgggtcctagcgccgctctccgcctgtatctcctcgccctccgcctgtatctcctcgccctccgcctgtatctcctcgccctccctccgcccccgccccgcccatcgctcgctcgctccgccctcgccctgcccgcctgcagatccgtctccccggctccaagtttctggttggactggggcgggggtgtccctgccgccgccgtctcacacccccacctccctgagctcagcaccacacccccttagcgctgggccaggctctgcaaacgcagaagggagctccagagaactaagtccctccctcccaattcgctttacatctctaatcgttgattcgtgcgtcctgcacgtgaggtggctttcgcaccccttctctccttttcatcgccccctcctcatcacagccattcccctcctctctccccatccaccccccaagttgttgccagtgccctgcttttcctcttgatcttttctttcctcacccaagtccctactgttgcttcccctcccccccaccatcctaaggtttgtttgcattcgctccccatctacttatgagaccttcccccatcttctcaactgtgtataccctggccctgtgctcctagcaccttgcagaggcatgccagaaagcactctaatcggaaaatgaatcgtggcaggttcttacctaattgtgatgaaccttcttctggggatccagtgacatccagtagaaagttcaggtcactttttaaattacaagtcagcccgtggaggcgtctgtgaaacatgatccctttggatttttaccatactgccagctgcattagaaattcctcttctccagtaaaaacagatgtccgggtgtacaaacagctgttttgtccaggtcttttcataagtctaaaattcacagcatgcacaatctctagaaaagcactggtgttattaaagctttcaaaataccattctaggtagggcatggtggctcacgcctcccgggttcaagcaattctctgcctcagcctccggagtagctgggattacagtcccccgccaccacaccctgctaatttttgtatttttatagacacgggatttcaccatcttggccaggctggtcttgagctactgacctcgtgatccacccgcctcagcctcccaaagtgctgggattacaggcgtgagccactgcgcccggcccatccaaatatatttcaacagaatatggagtttgtcatcattgtcacataaatctaggagaataactatatacgtgttcttggcaatattctttgagttactaagattctagttctgggacttgaaccacctccacaatctaaagtacagttacccttccccctcgttcatattgatggcaggatctttatcaacttgttaagtgatattcctcttacgtccttgtgatatatgatttggagagctcactttgtcaagacattttctgttttatcattggcctgaaaaacgtagtattgaaaaggaagaaaaagaagaagcagaagcagaagaaggaggaggaggaggagaagaagggcaaaaaaatcttcacgaggattgttctacaaagatttatttactgtcatttactcactaaaaaacatttgcttaggcacatagaaaaaagaaaccatttacaaacagcacagcataggccatttgctaaattaaggttgatacagtcagtgacaacaaaaagctacctgaatccttaccaaagtgcagtgttcacctaagccaaatcaccctctatgcttagtataggcagtcctttggaagatattgaatatcttacatgtaataaaagaccttatggtttccctcactgtgccttcgattttaaggacttcaattctatctactaatctaggctgctaccccatgtgtttcgtgttttgctttgcttttctcttttcttttcttttttttttcct

SEQ ID NO: 2610 - DNA, 4001 bp, Homo sapiens
cctagaagcccaagcgattgtcccgccccaccacgggtaattcttgggttaagtattcttccgctacctgcgcaggggcactgtctggtgagggcagcccgcaccagccccaaactaaaaagtcccggacccaccccagaactaggctctgaagatgctccagagggaatccccaacctaggcagtcccctcggcagagctgcctgcttcaccacgggtgaaaggaagggatctgctagaaagactcccaccagccgattcctgagcccacccctggggagagggcacaggcttgtagcgcgggttcttgaggatgccagggcaaggagtgcatagcccggaagcaacctgagtgttcggggcatcaccgctggggcctgaagaggggctgacaactcccccggactgtcccaccgcagcgttccggaccttgccaccaccaactggagaaggctccccccttcctccgctgacagattcccacatttcccctctccactccgcaccgcgcccaggggactccggcaggcaaatactcgctgccataaaagtgaactatggaggctgaagtcagaagcgcagacagcgttacccccgaggcgggggttgagggcggggggtgctcgggccagagataaccaactcttatagccactttgaaaactatgatccataccctaggactgcccacacctgtctgggcaccagggtcggaccgggcggggcagcttgccccttaaacacacctctatcccgccccggccactcgcccacccattcccgcagtcgtcccccggcgcagtgagggcgtgcggcggcgagcgggtacctgcttcctgagcgcctcgaaggctgcgctgatggtgtgcacccgcgtccgctccctggcgttcgccaggagcctccgggtctgctgcagggctttgatctcggaggaggcggcagtcgcttcgcccggtcgtttcctaggcgacgcggaggaatcctggtggttattgtaaattacgtgtgaaattgacgagtaggaactttccccggggcgcgtcgggggcgcagggcgcacagtggactccgggggcgctggcggtgctgggggtgctgacggcgcggggcgcgcgggcggtgcgcacagcaagatgcgaggacgcagacccggctcccggaaaggctgtgcctctgggcccccaggtgcctggctctggggcgcaggaggcggcggcggcggcggcgtggggagtcctggccccactgcgcctagggcgaagcagcgtttccgcgcgtcggagacctcgggcgcccgagagcccccgcgctccccggctgtgtccgtgccccctcttgggggaacggccggcgccactgggactggcaccggcaccggtaccgggaccggctgcagccgatgggtcctgtcccgcagcccgttggtggctacggcgcggggctcgggcgcttccaagtccagtcggaaagttttatagccgttcgcgcgccgcgccggctccttgcctttccgcttgagcttcttaaggccgttcagctccttcacgcacacggtcttccacggcccgtcctcgaggaccgggatgtgcttcatggcgcgggcggcgcgcgaggcaggggcgtggggctgcccgggccgccgccgcgctcagcgccgaggagtctctggctctcccgcttcgcccgccctccccctccctctctccctttctccccctcgccccgggcagctgcgccgccggcttcgggaagccgccgggctgtccgttcccggagcgctcagagtgtcatctgaagtcgctgcctccttgccagcatttctggagaacgcccgctgcgctccatctgtgtttgtttagcctcagtttacacagaagcccagttcgcgagatcagtcagcgccgccgcccggagaggaggcagctcccgccgccaccgcctccccagcccgggccgcccgagccgcgagcgcctttaaagaaacaggaagcatttttcaaaacagctgggccgccggccgcctcctttgtccgcgggctccctacctcccccccacccccatccccttggcccagaacctgcctcctccggcgctccctccccgcccctactctagtcgggggcgcttctatgttcccagaggacagtccgctcctgcacaaccgccccgagcacgtgacttatgggcccccggcccttccccaaatcacagcggggccttttctccctggccttgccggcctctcggtgacgcagctccgaccttgcccacccggcaccttcccgccgctccctccgccccaactcgccacgagacagaaaacgccgggagctgggacttctgctgggggccgatggggaaggggagactccggagttgcccggcgacccacacccgcccggcacggcaacccagtccactctcacttgctggagcgggaaagcaagaggagcagagggcttaagacagggaaactgagtttccgaaagctccaaagtcacgcagcaagtcacagaggcagaggagggtggaagcttcggatttaggcagacctaacgtctgcgagcctccgcagtcacctcactccaggcgccctgctaaaccgggatttactcatctgtgaaatgagaaattcggagaacaacgcctaagtcacagcattgctctgaggaattaaagcactaggcacataggaacgggtcgtcaaatggtagctgtggttgttgttagtattatttattgaggcaaaacagctacttgaggcagatttcctgggctcaaaccccagctctgccactcactgaatgaccttgggaaagtcacttaacctctctgtgcctccctttcctcacctgtaaaacgagggtcataatcgtaccttcctccccaggcggtgtgaaaagcgtgtatgcgcaaggcactcagagcagtgcctggcaccaggtgagagctttgcaggtgcccacggttattggcaaggggcagaggtagaccccccagaccctcagtcatcagtgccattccactggagattctggaaagaaggggtcaaactagtaggccctcagatgtccttgccagaggactgcttcccagccgctcccttccgaggctcagaacagggcttcactccttgctggtcccttctctgtgactgttactccttaaggaaggtggacactaaaagccagcaaggtggtttgggagaagatggacccttgaccctggccttgaactctgatgaaaacacaagggctcacacagagtggagtgcttctctcctccatgggagaatgcctaggggtggaggaggcagatggcacgcagggtgctgggaggtgggatggggatctgggcatagctttgggggcaggagcatggagctccagccagcagccccggttgagccttggtttgtcaacgacggaaccccatgaccacgagcaagacgtttcctcccaccgtcactcttttctgtctttgaggatatttccagccaaccttctcagggtagctgggaaaggacaaagagatggatgtcaaaggactttgacataagacttcaaacatagacacacacacacacacacactgaggcatgcagttttctgaatatagtaaatgcaaaatctcattttgccaccaaggtgggtgccagcatcataaagcatgtgctcccggagacatcgtcttccctggacacctgcatattcctgcaccttatctctgtcctggagaccaggtgtgtgctgccaaagaggagccctcattctcctgtcgtttccctgctcagcctcgaaccctaaagttctggcctttgctcccaggtctcccacggctcccctttgcaacgcacactcttcctcacccttcgatgaacagctccggtccccctcctcccgcgaaccttccctgctcaccatagcctccaattgctcttgctggcctgtgtgcatgcttgctcaaaagtcctgctgcaacttagcctccactgcag

SEQ ID NO: 2611 - DNA, 4001 bp, Homo sapiens
tgggctaatttttaaatgttttgtagaaacaggatcttactatgtggcccaggctgatcttgaactcctggggtcaagcaatcctccctccttggcctcccacagtgctaggaacacaggtgtgagccaccgcatccagtccaatagagtacatttttcaataactgtagctattataattttaaatataggcaacttaaatcaatagacttgaatataaatacttggccaagttttggatagagaaatttctctattcgtctcatctagttttttggctatttttggctatttggctcatctagttttttggataaaagggtgggaaagacttgccctcaaactcttattaataaagtttttttccttcactctaatcaaaaccctacccttatttggtagtgttacctaatttcaattattgctactattacctctccagtcctactagcctctggtcgagataacactgatgcagaaattggtctgtatgcaactctggatccagctcggatctattaatgaaaaaaaaataaagatttcaatattaagaaagaatacaggtaagacttcaatgacttttctggtaccatgaattctaaaaaagcaagcagtaaaaatgaatcagaaacttctgaattgactctttgctgtttggtcatttttaatacataagcaattttaataaagtttcatgctaatgaaattgtaacgcttgctaccttgaataaaatttctaataacagttacaaagagagtaagaactgcttttgacatttccattattgtagtgccgtaagtcaagtcagaaaaaagcaataaataccacacgttctttggcaattttaagtggaccaacaagtatattaggagcgtcacaataaacatttatcattcaaaatagcccagcagttaatagccctgaccatttcaaagctatttctatatgaccattaatcataaaaaaaaatttctaaaaaaggaacttaagcaattctacatcagtttaagaataatctgtgaaatatctgaccataaggacatattccagtccaacttctctgcccttgagtgtccactaaattaaggtcacagaaaaacccttccgaaccaaaacctgattctctaagacaaatcctccagatctagacctcactttaagcctgcaaaattgttatgaaaataatactccagaggcaggaagaaagactttgggctcgttcccccaccaccttcctccgcccccacacggaaaggcaaagtccctccctctgcagcaacgagtttgacctacagacaggcactggaaagcgctgctgaggtgaactaggcctcaacggccccctacatcctctgcagtactccaaccttcgcgtcgaccccaatccaacagagaggctgagagaaggtgggggaaagggccactcctggtctagggaccagagagtttgacctacaccgagtgaggcctgacagctaggcctcggctgctctgcctcgccctagtggcaaggagagggctgagatgccctaagattaggaagaaaacggcaatgggttaataggtaaggagaaagccgttcccgagagggcggtgtgccccgcccgaaggttgccccattcaacaacgtggacgctctaggccaaaacgcccacccctcaatccccccgaccctgcctgggctacgcaccagagagggggtgcaggcgagcttggcgcaggcgaacatcttacactcttcgggactgcgcggctggagatattgggtgacaggcgacgtgggctcctctcccgcttcctctctgcggaggaaaagaggcttaaggtcaagtgccctccaggggcctgttcttcccacccaggccccgcaggctcccgtgcacgccgtcagcttgggccccgtgcccagtgaggcgccggcacaatgaatgggtccctactgggcgccgctccgccctggccaggccgggctccctgtgccctccacttaccttcccaggaggcggcggcggcacgggctgcggcagaggtcgaaggagtgggactcaatgcgcaagcgcggtccggctcttattcgcgccgcagcacccggatgaagaaggcggggtttcgggtgcaccaaggaagacactcaaggtcactttgtaacaactttattggcaactagccgggaaggacaacgacaaccacctggtgatggggcaagagggagacaaaaagaaaaactgtagattcaccccggcagagaggactaaacagattaacttttgatatgagttggctgcaggatagtgggcctttttcttcacgttggcaccttgtaagatttggccttttatcagttgctgcttctctgtagtagaagttgacttgctggtcattctcttcctctgtgaaataggactgtggctggcgggaggaaagaagggtcattcactacttaacaggaaactagggtccccagcaaagcgaagatatttatttcaaggaacctggaaaatggttccagaagtatggctaatccttcaggtgaaagagggcctgacctagaagtactggtggagccataagcaaatgagtagatctaagagctttgtcatctggggcacaaaattgcctctgggtaaagtgagggtgctcgacttttcttctagctctaagattggaagatttaagggattgtatttcatgtagggtttgagactaaaaaaagtcttaaaaaaagtctgagtattctcagaacgtactcaattttaacacctgtttttgttaagtttggacaaattatcttcttcagagggatgcagaaatatctcagaaaaatggctctgactgaacttctggtctttttagatccttgaattatgtaaatttaatttagtaattctaacaaatggctaatggaagtgatatcaacacgtcaacataaaagattaaacatctagaatgccctgctaagaagatggctggggactgaactccagcccactctgcctagagccctagcatgagacaacatcaacccagaggatcagctttttacttgttagcttaaaggtgcaatattatctagcagcaacgctggttgctgctagttctgggagaagccctcagaactaacacttgaaaaatgaataagactttgtcactaatccaacttcaaatggatcaaatgattcaaaattacaaaaatactaatcattttaggctcaatctttagctggaaaatagagataattcacgtgtactgttcaacaagcaattattcatatagtttctcaagtactcaattctaaccaagaacatggtgtcctgtggtgtctacagtagaataaacagtaaagccttgtacttcaataatagatcctccaggggaaaaaattattctaagtggatttatgtgtagagatggttttaagtgatgttcctatctctttagcactaaatcagtggcagtaactattgaggaggaagcaagaaagaagccaagatccacagtggctgcttccaagttgcatatggactagttgcttgtggcagggagagacatgggttccgaaatccagtctgttctttggaggggcctgaccatggctgtgactccacggtgctattctagatagattaattcagactttgcttggttttgcatcctaagattgcgttatagaaagaggagaatgaaggccaggcacggtggttcacgcctgtaatcccggcacttgggaggccaaggcgggcggatcacaaggccaggagatggagaccatcctggctaacacggtgaaaccccgtctttttactaaaaatacaaaaaattagccaagcgttgtggcaggtgcctgtagtcccagctactcaggaggctaagtcaggagaatggcgtgaacctgggagtcagaggttgccgtgagccaagatcacgccactgcactccagcctgggtgacagagcgagactccatctcaaaaaaacaaaaacaaaaaaaaaaagaaaagaa

SEQ ID NO: 2612 - DNA, 4001 bp, Homo sapiens
ccacagtgctaggaacacaggtgtgagccaccgcatccagtccaatagagtacatttttcaataactgtagctattataattttaaatataggcaacttaaatcaatagacttgaatataaatacttggccaagttttggatagagaaatttctctattcgtctcatctagttttttggctatttttggctatttggctcatctagttttttggataaaagggtgggaaagacttgccctcaaactcttattaataaagtttttttccttcactctaatcaaaaccctacccttatttggtagtgttacctaatttcaattattgctactattacctctccagtcctactagcctctggtcgagataacactgatgcagaaattggtctgtatgcaactctggatccagctcggatctattaatgaaaaaaaaataaagatttcaatattaagaaagaatacaggtaagacttcaatgacttttctggtaccatgaattctaaaaaagcaagcagtaaaaatgaatcagaaacttctgaattgactctttgctgtttggtcatttttaatacataagcaattttaataaagtttcatgctaatgaaattgtaacgcttgctaccttgaataaaatttctaataacagttacaaagagagtaagaactgcttttgacatttccattattgtagtgccgtaagtcaagtcagaaaaaagcaataaataccacacgttctttggcaattttaagtggaccaacaagtatattaggagcgtcacaataaacatttatcattcaaaatagcccagcagttaatagccctgaccatttcaaagctatttctatatgaccattaatcataaaaaaaaatttctaaaaaaggaacttaagcaattctacatcagtttaagaataatctgtgaaatatctgaccataaggacatattccagtccaacttctctgcccttgagtgtccactaaattaaggtcacagaaaaacccttccgaaccaaaacctgattctctaagacaaatcctccagatctagacctcactttaagcctgcaaaattgttatgaaaataatactccagaggcaggaagaaagactttgggctcgttcccccaccaccttcctccgcccccacacggaaaggcaaagtccctccctctgcagcaacgagtttgacctacagacaggcactggaaagcgctgctgaggtgaactaggcctcaacggccccctacatcctctgcagtactccaaccttcgcgtcgaccccaatccaacagagaggctgagagaaggtgggggaaagggccactcctggtctagggaccagagagtttgacctacaccgagtgaggcctgacagctaggcctcggctgctctgcctcgccctagtggcaaggagagggctgagatgccctaagattaggaagaaaacggcaatgggttaataggtaaggagaaagccgttcccgagagggcggtgtgccccgcccgaaggttgccccattcaacaacgtggacgctctaggccaaaacgcccacccctcaatccccccgaccctgcctgggctacgcaccagagagggggtgcaggcgagcttggcgcaggcgaacatcttacactcttcgggactgcgcggctggagatattgggtgacaggcgacgtgggctcctctcccgcttcctctctgcggaggaaaagaggcttaaggtcaagtgccctccaggggcctgttcttcccacccaggccccgcaggctcccgtgcacgccgtcagcttgggccccgtgcccagtgaggcgccggcacaatgaatgggtccctactgggcgccgctccgccctggccaggccgggctccctgtgccctccacttaccttcccaggaggcggcggcggcacgggctgcggcagaggtcgaaggagtgggactcaatgcgcaagcgcggtccggctcttattcgcgccgcagcacccggatgaagaaggcggggtttcgggtgcaccaaggaagacactcaaggtcactttgtaacaactttattggcaactagccgggaaggacaacgacaaccacctggtgatggggcaagagggagacaaaaagaaaaactgtagattcaccccggcagagaggactaaacagattaacttttgatatgagttggctgcaggatagtgggcctttttcttcacgttggcaccttgtaagatttggccttttatcagttgctgcttctctgtagtagaagttgacttgctggtcattctcttcctctgtgaaataggactgtggctggcgggaggaaagaagggtcattcactacttaacaggaaactagggtccccagcaaagcgaagatatttatttcaaggaacctggaaaatggttccagaagtatggctaatccttcaggtgaaagagggcctgacctagaagtactggtggagccataagcaaatgagtagatctaagagctttgtcatctggggcacaaaattgcctctgggtaaagtgagggtgctcgacttttcttctagctctaagattggaagatttaagggattgtatttcatgtagggtttgagactaaaaaaagtcttaaaaaaagtctgagtattctcagaacgtactcaattttaacacctgtttttgttaagtttggacaaattatcttcttcagagggatgcagaaatatctcagaaaaatggctctgactgaacttctggtctttttagatccttgaattatgtaaatttaatttagtaattctaacaaatggctaatggaagtgatatcaacacgtcaacataaaagattaaacatctagaatgccctgctaagaagatggctggggactgaactccagcccactctgcctagagccctagcatgagacaacatcaacccagaggatcagctttttacttgttagcttaaaggtgcaatattatctagcagcaacgctggttgctgctagttctgggagaagccctcagaactaacacttgaaaaatgaataagactttgtcactaatccaacttcaaatggatcaaatgattcaaaattacaaaaatactaatcattttaggctcaatctttagctggaaaatagagataattcacgtgtactgttcaacaagcaattattcatatagtttctcaagtactcaattctaaccaagaacatggtgtcctgtggtgtctacagtagaataaacagtaaagccttgtacttcaataatagatcctccaggggaaaaaattattctaagtggatttatgtgtagagatggttttaagtgatgttcctatctctttagcactaaatcagtggcagtaactattgaggaggaagcaagaaagaagccaagatccacagtggctgcttccaagttgcatatggactagttgcttgtggcagggagagacatgggttccgaaatccagtctgttctttggaggggcctgaccatggctgtgactccacggtgctattctagatagattaattcagactttgcttggttttgcatcctaagattgcgttatagaaagaggagaatgaaggccaggcacggtggttcacgcctgtaatcccggcacttgggaggccaaggcgggcggatcacaaggccaggagatggagaccatcctggctaacacggtgaaaccccgtctttttactaaaaatacaaaaaattagccaagcgttgtggcaggtgcctgtagtcccagctactcaggaggctaagtcaggagaatggcgtgaacctgggagtcagaggttgccgtgagccaagatcacgccactgcactccagcctgggtgacagagcgagactccatctcaaaaaaacaaaaacaaaaaaaaaaagaaaagaaaaagaggagtgaattggagtaacaccaacccatgttgatgttgattgagggtggatatttgcactgaggaagattgaagaaaaagagtaccttctgaga

SEQ ID NO: 2613 - DNA, 4001 bp, Homo sapiens
cataaggggctgggtgggaaagagctggctggaggtggctccaggcttgggccaacctgcccagaggagtgtggggttagatggtacctatagggtccctgggtatcaggaggtgggggcactttccaggaagaaggaaagcagagcatgaaggtgcagatcacacaccacactcagcacccagcaactcccgggtgcctgcagggaggagggacggcctgcagggagtggggctcatcacaacagactggcaagagtcacacatgccagctcagggctccaggcctgggctctggacccaagggggcccagtcactgcatatttctgggccttggtgaccctagctttggcctagggagtatccggacctcctatcctcccccgagctccatggggcagggcctacaggccttgcttgagaaatctgacccaccccattctcaccatttcttcttagctggaatgtgctccaccctcagcacctgcctcaggcctcaggaggtgccccacaccccagggctctcctcccatgcgcccccgggcccctttactctgatttcacccctcagctaccctctgagttcactccacctcctctcctggcctggatagcaacagaggaacagagggaggtggggtggctgcatcaggctcacttcccctcacaccacactccctgttaggagcctctggctctgcatagctgtggcgggccatgctggtttactccagtgagcctctggctctgcatagctgtggcgggccatgctggtttactccagtgagcctctggctttgcatagctgtggcgggccatgctggtttactccagtgagcagggcggcctgagaattcaccaggccagggagagtgaccttggacaaggagatgcaggggttccctttggtcctctggaccttgccccagacatctgggccacccttgcaggacaggcacaggagccacaagtagggcctcccctctgaaattgacaagggtacatcccagcacctgtagacacttccatgccccacacctggatacgcattcttatcccagctgtacacacactcaccatactcagatatgtgacactgccagaacacatacacaagtgttctctccatgagtgcacatgcacacacgtacatcacacctaagtgcacacacacacacctttgccctgagtgcataagcatgcagtcacacatttccttaccccaagtgaaggtgggagcaccccctaggcacatgctcctacctgcttatgcacacaggcaccctcctcagaacacacatacgacatgcacccattgatgtgacgcacacggggcacctatttcctcaggctgagagcgctgacactctgcactgccacacacaccactccaagtacacttaatcacaccccgcctgactctgagtgcttgggtgcacactcctcacacaggcacgtttacacaagagcaggtgcacagcacaccccactctcaggggcaactggaagctatctctggacttcgggtgttacagcaggattgggctgatgacagctactccccagccctctcttctggggtgggctgggctggggacctgcaacccttcacctgcagaggtggcctctggtccaggtggccccactgcgtcactctgctggacagagagccctccaggtctccccaggtcttgggtcctcctccttttctgaggcaagaagcggggcccgggaacctggcagcccaccccagctccccaccctgacctcacccgtcacggtggaggggctactcactgacacgggggtgggtgatgtagtttcgggtgaccgcctgcatgtgttctcgggctgcacctaggttgcagctactgccggggagccccccaggcctgctgtctatctccatggccatggagcagtccccagctgggagcccagtgtctgagcctgctgctggtggcagctctgagacttcaggtccagctggagctggagagagctgctcagccttcccctgcagccacccctcccctctccccctcccctccctctcctcctcctctaggttgacagtaaacaaggaagcctggggctctggctcccaagctttccccacaccaagctgtgcaggtctgggaggggcccccgtcacctgagagctggaggatgtggagggagaagggaagaggggagggctggctttttccttcttctgtgctaggcggttcctccccgccaaccccaaactgtatgaattcaattcctcccctggaccatcaggtgctgtcaacattcccacactcgtccctcaccacagctctttctggtctctccacacccaacttctggcaggctgccctttcttcactgttctcgcaacctgaccttaccctgcactccttgccctgactatacctggatacttctgccccctgacaattccatcgtcatctttttgaacatctgtagagaattatttcctggtcagcctcagtgccatctcctacatgaagccttctctggattctctagcagccaagatttactacacatctagcctctttcctaagtcatgccctttaggagaggcctctcttgtccctgccactgggctgtgagcccccaaaagctgagcctgtgtctcaacccacagacctgggtctcctgaagcctgtctgtctcatactattgagagttcttgagaatgagggctggtctctctccatctgatcatagaaccgtgtctcatcttctcacattcacctccagatttctatacagcaggcctgccctgacctttccagcccaggtcagaaagtaaaatggaggtccctgtattgtataactaaatacctggagttataaatcaaactatgtgcacagcctggcctgggttccacccaagacctcaccactgcttcccaagaactctctcttcatgtcatgaaactaagagttgtggtttctcctggtgagtggagtgtggtacagttcctctgggcaaggcagggtggaccctgggtggtagctggacctgcccaacccaaggtcttctagtcacccccatgcctcattctaggctcaggatttctgcatttctaagctcctccccaaaccataccactgagcagagggaacggcagaagtacatttgcctagggatcactgtccccaagcacccactccaggtgactcaggacagccaatttgaaaccaaagcagcagctactatgtttctcagagcagactggaggagactgtgcttgttatttctcttcacagagtcaaaatcttaccccgcatcctccctcctgaggacccatttcaggtctctggttcctaatgcccatcctttcaaagaactctcctgtggagggcgggggtgggtgtgaccatcaaggagcagcatgaggaagatctctgtggtgatggaacaggtctgcatctggattgcagcagtgagtccatgaatctataaaatgacatggcactatgcacacacacggtaccaatgccaatttcctagttttgatattgtactatagttagggaagatgaagcctatctgtctcatactattgagttcctgccaatggaaggaacttctctgtcctatctctgcagcttcctgtaaatctataattactgcaaaataaaaagttaaataaaagagtcttgagcaagactcttatttaactttaaaaaaatttatattgtttgagcaatatgaaatatatataatatgtatgtgtgtgtgtgtgtgtgtgtgtgtgtatatatatatatatatttttttttttttttgagtcagagtctccctctgttgtcaggctgaaatgcagaggcatgatcttggctcactgcagcctccacctcctgggttcaagcgattctcctgcttcagcctcctgagtggctgagattacaggcgcccgccaccatgcccagctaatttttgtattttgagtagagatggagtttccccatgttggccaggct

SEQ ID NO: 2614 - DNA, 4001 bp, Homo sapiens
agccaggatggtctcgatctcctgacctcatgatccacccacctcggcctcccaaagtgctgggattacaggcgtgagccaccgcgcctggcctcattcttccttaatgttggtttcgtttgaactttgccctccactccaagaacccttagatgcctgggcatgacccaaactctcttctgtcaccaaattccctcccttcccctccctcaggaccaaagggatcctagatttcctcccctgcccccaggtcaagagtacaatcaaggctgaagccccccaagcctgcacatctaaactatatggtgggtcttctgagatgttgcagacaaaccaggaggagccagaggaacacccaagagaacctgagtgtgcatttaacgtgcttcccactttttgaagcattagacactgctacccacaaccttgtccccctgttcattccttcctgtggctgcatctacataggtatcacaatttatttgggactatggcatgatatcccacctagcccatcacctccccgtccatcctcaaacctcagcttgtcctcagagcccctgctttgccttgatactttctccttggcttcctgaggtagcaacctgtctccctctcctgtctccccctgaccaatccatccctttttcactcctccccaagaattttaccttgaagtcaggaatagcgaatttggtattataagacaggttggacttggaggttacagtattcatcctctccagagcttgcaaattttccttatcgccaggggcagaaattaaccaaaactccgacatgcttccagtcttctcttacccagtgactgcccagaaccaggacaaacatacacaaacagaaacagaaggagagatgtgtcagatatccccgcctcaccactccctaccctccaattcatcctttctaggatgagctccaaggacatccatttgcaaaagcaaagctcttatctccacctgggcagccctcaggtgttcccgaaactccaaagctccttggtccctgcagtggttctggctggttttcaggagcagaggaggagggagaggttcctttctttctctccacctcagtgaacaacccctatcaggcatcataaaacgggaggacagtaagctggaggcggacaccttctgggggaatatttgtcttccttccacactgcatcttctgggatgcaggatggggtggaggaaggcgtgggatgaggaagggattttcacaacaggctaccaggtcaaaccgcaggtcaaactggccaaccttgtgattggtattagctttaaaaatagacttcagaggatttttttaaataagaaaaaaaaaagtagtagggggtgaggggaactactaaagtcttttttccactaggcgaggtgcccgctcagcagtgctgggtcccttgcccggcgtggccggtggtttcgcggccgcgtctgcagcctctacggccgattcgattcgtgctgctccttcacaggtgtccacacccgcacctttccccctcggccaggttccccctttccgcttgcctccccgcggcgtctccggacggctgggggaaagcaggataagctctgaggagccagagacccctggtggaacctcttcctttcggactcccggtcccgctccaatccgagggcattttgttctctcctaaccccgcgcagacccaacgcagctcctttccgccttgactgcccatggcctggggacgaactggcccgccgcagcacctgcggagatgctaccagcccggccgcggggaagcgcgcggaggtgcacgctgcccacgtttccaatgggaaagcgcaggctggtgcgcagccggaccccgtgcctgtgtccccaccccgcccctgcctcgggtccccgctccgcggtgcgtccttaccgggagccggcggggcgcgggccgcgcggtagggggctgcgggcgacgggcggcgggtgcggggccggagcgctctgccggctcccgggaggcagcggcttcgctgccccgcgccccgccccgccttttatcccgggctctggaggcggccccggccccgcaggatatttgcatacgggccgtccgcctcccgcctcgctccagccaggggcccgagagccggggagcaggtgcaggcgccgggcaggaaggcgcggaggagacgcgcagggtctccagtcccctacgcgcgagggccggggccctgggggcttctgcggcgcgtcccacggggtctcctgccgcacgactgcgctgccgcgtccgggacgcgtggacggctgagccgggtgggagtcgggaaaaggctctgagctcgggaccaccccgccctcccgctgcggccgccgcagccccgcttgcccacccactctcgcctcacagagacatgcgcggatctcaggggaatcacctactcccaggtgtctccaggccagtgcaagagacagggcccacctgtggggagccgcgcaacaggtgcgcaggtgctcgggacgcacctgcgtagacagcgaagcttttcctgtccgtgtgggcgcgggtgtgcgcccggttgcccaggaaactcccacctcaccctctccaccttccgaattgccctgtggatggggggtgggggggcggttacaactcaccgtacgacgatcagagatgagttcatgatcggtgctgtctggaaccaggagggggaaaccctggaaattaacgtgtgaaggttaaaaacaagacaaaaccaaaggaaaactcggagaattcattttctctggaccgaaggagaaggctttaaagcatccttccatgtgggcgatgttttcagtggtttctgggaaagatgaagatctcaagagtgtccttcgagggggcattggagacggtgttcttgcttccttaaacgtggactccccctcctgtgtaaactagccttatctatcaacccattcttgtgaatgcatcagggtctttggcagaaggatttgacatcatctgagacttaagctgtaatcacatagggtgggatgggaagccccagagacgggacagaaaggtggctttaagatcacagtggggtcgtactgccagcctaggttagacttggaagtcccagcacctgcagcaggcatcgttattgggacactaatgtgcattagtcagtccttgcaacatcttcctgagggaggatacctgaaaccaagggatggggaaactccggtatgtttgaggacattaagtggctattccagggaaggagtggcccagttagacattaaagcggggtggtctccaatcttggacgttatccaggcacgacattttatccagccagggaaaacatcttagagctgggggcagatctcatctgcaaacaagggtggagatgcccacagaagttacgtgaattgcccagtgtcacacagctggttatgtcagagctacagttggaactcgggcctgtggctgagtcttatgtcctttctactgctcccaacaagcctgcaggactagataatcagggtgaggaagaacacatgctttctattttagtccacattttcccatctgcaaggttcaaagccatggacctggcttctcagagactgagcaacacatttagaagtatctgtgacctggctcgtggcaccactctttctatacacctggttacctgtaaatactttgttttgtgccaggtgtggtggcttacacctgtaatcccagcactttgagaggccaggtgggcaggtcacctgagatcaggagttcgagaccagcctgaccaacatggagaaaccccgtctctattaaaaataaaaaattatctgggtgtggtggcgcatgccttaatcccagctactcgggaggctgtggcaggagaatcgcttgaacccagaggcagaggttgcagtgagccgatatcacaccattgcactccagcctgggcaacaagagtgaaactccatctcaaaaaagaaaacaaaaaacccaa

SEQ ID NO: 2615 - DNA, 4001 bp, Homo sapiens
aacaagttaaaaatggaattaccatgtaatccagcaatcccacttctgttcaaaagaactgaaaatagaatcttgaagaaatgtttgcacaccaatgttcagggaagcattattcaaaatagccaagaggtagaaacaatctacaagcttactgatggatggataaaaacagtgtggtgtatacataaaatggaatattataaagccttaaaaaggaagaaaatcctgtcacatgttacaacatagatggactttgaggacataattctaagtaaaataagcccatgatagaagattaaatactgcatgattccacttatgggatatctaaagtagtcaaactcatggaaccaggaaatattaacagaatgacactttccaggggtgggggtaggggaaatggggttctgttcaatgggtgtagttttcgtgatgcaagatgaaaaagttctagagacctgctgtacagtaacgtacatacagttaacagtactgtaccatactcttaaacatttgttacacacacacacacaacacacacacacacacacacacacacacacacacaaatgctatcccagaaacccgtaccacttcccaagcttggtggaaaaaccacccagtgtttgtgacaaagaccaagcccttgggttcaatcttacaaaatgtcattagaagtcagaaagaaaatttatttgggccatccactcctcattactttaggatgtacttttaaaaaaaacctgcattttgtaactacagcaaaagcattttctgctcctaaataagacaagtcaattttgtgtgtgtgtgtgtgtgtgtgtgtgtgtgtgtgtgtgtgtgtgtgtgtgtgttttaaggctccccgggtaaccgtgatgctgaccagctttaggaaccactgtcaatgaaagcagacatagtacaaggtctaggaagccccaggttacgtgtatataggaagaaatatatcaggtgaagccttaccagtcccctgccaggggcctgcctttgctctggcgttgggagtctgcacacagaatgtggaacttggaacgcacgctggaacctggcactgttgcttccttctttgtacagatgacccttgcagtctgaccaggcagcttgaatccaaagagccaggctgtcactggggaaggctggccaagtctgccaagaggaggctaaaagggatttccttggcacccggggccatgacgggggttatccttgcacactcagaatctcagttaagttggcacatggtagcctttagctctggggcgggctcaccttaacaggtatgcatggtgacccaggcagccagtttgctaatttactaatgaaaaatacagctgtcatgttggcggatcatggtctcctttccctctatgtgagttgcacgtgaagccaaatctgaaggttgtttaataagaaaccagcacaagcaaaattcaccagatggtctttaagagagccacacccacaacaggggatgctgtgttccagctcatgagggagggcatcctcttcatgcccagacagggcctaatgggcatcaccagcttccacggtgtcggcgtggactctgcagtcagactgacggaattcagatcctggttctgcacttaccatttgtacgactttggcaaagcagtatacccctcaagccctcagtttcttcatctgtataataaaaataatagcagctacatcattggattattgtaaggattaaatgaaagaagtgagacgtttaacacaatgttaggcatggttaatcttcatgtctggtagttattattatcatcatgaccactactactattattgtcctcgtctcctctgatttaggcctcactcttcatcatagttgttctgtgtgtacaggatacctatgaatgattaggtttccactcactaaagtggaaacatattctagtcttgcctgtttgtaataaacttagcagccctgcctggagttggtgaccctcctctccacaacacttcatggtacctttgcccacagtctcaggtgaccagtcatatcctttgtgatggtggtggaagctcctgaatcccaggattctgaactggggatgaggtggaagtcatctcacagcctgtcacacatccttgtgcctgaatctgcatcctgagttcttgtgtcccctccctgcactcccacttctaaatagctcattagtgctgggacatgaaggcagctgcagggcagggcagggttaaaaggcagggattgagcaagtccctctgcaggaaagcgtgtgcccatgtaatgtgtctagcagatgtaacttctcgtctgtctgggatggagattatgagcccacatgggcctgtgacttgagcaaaacaacaaaacaaaccaagaaatgtgaaacgcacatgcctgtccttatacgagggctcagacacttctaccctgctgaagcaggtggatgctctaagtggcacccactccgcctgtgctggggacagcagaaggggccctccaagccagactcggctctcgtgaacccttcacgactggggcctccccgctaaaacagcctcattcccacttaacagctttggctcatgctgttgtcttggctataatgcttccctccacttaataaatcctgcccatatattcaggcccagtttaagccccaccactccttgatctctggactcctcctccaaatgacagcatggtctgttttccagatacaattcagagctggattcggtgtttgtttttccagttatttttgcttcctctaggaaacttctttgaaaatgagactctccttccctagcaggggctgggtgcagataggtgttcatttaacgtggattgattggattaagggcttggggatggaagggaggcttttttttttcttttttgcctttttcaaaattatgaaatacaaaatgcagtcagacaagtacatgaaacggcaatgtctggcttaatgaatattacgaggcaaatatcctgtaaccaccatccagatcaagagaacattaccagcatcccagaagcctctccatatgacctttgggaagcagacatttccaaactggtgattgtatatctgtgggcgtgggaaaggtctttatttcatttttagaaatgggtctcaccattttgctgaggccgatatcaaattcttgggctcaagcaatcctcccaccttggcctcccaaagtgctgggattatggccatgggctaccatgcctggcctgggaaggatctttagaggaagtgtgagctgggaaatctcttcttgggcccttgcccacatgagcttgtgagtatcttggggaagtaccaaatccacagcaccatgagagggaggaggcagccgcagggagttcttggtgggcaaaatatgtctgtcaacctggagccctgcccagaccctgaagcaactgttcttcattccagctgggatttgtaagcaaatatgaggtcagatgtgtctgggtgtgtgcttcctacccctagccaaaagggaagcaggaccaaacgtgggcctccagacacttagagattgcagactgaggaaggaggagaaggggctttccagagcttggagcacagggcaacttacagggcccaggaagtgggtgagaaaatgtagagaagtaatgactcctttgggggattttaaatattgagtatgtggaagtggggcatcccctcttctgtctttctttcttctctttttctttttctttgagacagagtctcactctgtcgcccagactggagtgcagtggtgcgatcttggctcactgcaacctctgcctcctgggttcaagcgattctcctgcctcagcctcccgagtagttgggactacaggtgcatgccaccacacccggctaattttttgtatttttagtagaggcggagtttcactgtgttagccaggatggtctcgatctcctgacctcgtgatccacccgcctcagcctcccaaagtgctg

SEQ ID NO: 2616 - DNA, 4001 bp, Homo sapiens
cattaaggatcatgccacgttatttttttcttcaatatctactgctatccattcctttattctacaaatatttactgagtccctacaaactgcaaacactgggagaatgttaaaaatatgtaacacagtattttggcctttgagtggcttacaatgtagttagaggaacaagagcactgcccaaaaataaaagcactgtaaacattaaattacaatataaaagaaaccacaggacagtgtataaatatatttgagtggacactaaagattacaggaagtttttaaaaaaggtattactgaatcgcttgaacccaggaggtggagggcgcggtgagccgagatcatgccattgcattccagcctgggcaacaagagtgaaactccgtctcaaaaaaataaataaataataatttaaaaaaggtattactctggaacttagtagtagtaaatattcacaaaagatgttggaattgaaggatggatatttcctaatttggtagaggaaggcaatttcaggtatggagagaggcctgaacaaaggtggaatgcctttgagggcaggcaaatctggctggtgcagaccattatggaggtttgagcggacaagtaattggaaataatgttggaaaagtgggttgggactagtatggtacttaatggtttgaattttgtcctgagacaaaatttaatactaaatatagtattaaagcaagagagtgataatggaaaatgttggttttctaaaagcttaatacagagaagtatttaggtagatgaaggaaagaagagaatggaagcaaaacataacattttgagtttgaagttagggtgcactcagtaggaaatgcttaataggaagctagaggtacccgtatgtacctggagtgtggaaaggttaaaaaagacactaaagagatctagttttggtagacatctgcgtgatgattacagctgaaaccataataggtggattctttaaataatataagggtataaaagcagccaggctaaggaatggcctgtatccagcatctagggatgtcttcccctcaccccaagatggtgcccttctgattcaggcagcaacgggcatgcagcattagctctcgtgtcgttttacaataaaaggccacttttgacaaattttgcacgctccctggacattgggtgcatatctgcagaagagaaagaaacattagaactccagaaagaaaagccaagaaaagaacaaacggcgatcaagaattaactgccagtacacgtttccagaattcctctaacacggggccgataaatggataaacggctcgtgtcccacccttgtaacaggctaggctaggagatgccatctcttcctccagagtcctgcgccgaatcagctcccgacactttcagtaccagatatcgcacagggaaggtcctcatctctgaagatcactattcgaacttatttattatgctttctgcagagacttctcaatctgacagccctagtttggcgcggtgtaaaacgaccgcaggtacgtaaagaactcatcaagcattacaaaagtacagccctaccaccgcacgatatatggcgttcgtgcgtagagagattacacaagaggcagaggacccgtctgtagaaagaacttaaagttattctaaaattaaggggcgaaatcaagtttcacaggtctttgaaagtcggcaggactggggcgccgaaggcctgcacgacgtgagtacttgggaacaggacctggctgggcagggtcgggaagcgtcagggacgaaatcagaaccgcaggcccgccgaggagaagggggagccgctggcgagcgcgacgcacggctggccagcgaccctgcttcagcccgacctcaaacttgcttctgtacctcgggtagcgccagagccctttccacgcccagagcgaggagcagggcggcagcccagggcaccagggtcgtaagactacccgggtcgtgaggcgccattttccgttcccttggtgctccgctgctcgcgcgacccggccccgcggccccgccccgcagcgcgtcaggccctcttccccgggcgtggcctaagcggcccggtccagtcgccctggggctgcttgggggcttttcctgctcgtggagctctgcgctggtcttcatgcgccctagccctctttcggggatactggccgaccccctcttccttttcccctttagtgaaggcctcccccgtcgccgcgcggcttcccggagccgactgcagactccctcagcccggtgttccccgcgtccggacgccgaggtcgcggcttcgcagaaactcgggcccctccatccgccctcagtaaacatggcggcacggcgagcggggcgggcagggggcgggcagggggcggggcccccgcgggctcccggccagggctctcggccgggctctggctacccacgtgtggagaccgggcaggtgggcctggagagcgtgagccggtgccgagaggcaccggggagcggcgtctgagccggggcggggacaagggggcggggaggggcggagcgagccggcctccggcgtgggtctgagatcttaagtgcgagcggtaaggtggtggtctccgccgcgtagagggaagcgggaaaccgagaaagaacgagggtgagggtgatgagggaagggcaaacctcaaactccagcgggaggacacgagcctggatcgccccgggcacctagtcctcttcacctcaatgctgatagcgcatagcgtcccggagcctggcgaggaggtaggagcgggatagacgcttccctaactcattttctttgccttcccaggaaaagggagcgatgttgatctcaggaagcacaaagggaccttcctagctctgactgaaccacggaggtaagggagtgcgttgctgccccagggtgggccagcgccctgactgaagggcgccaggggatccctgctcccggcgcgacagtgttggttagggccagccagaaagctccttaaagccgacccaagtgatcatctcgagtagccgagccaggcttcccttccacattacccccatggtgtctgcctggaagttcctgaaaggtttacgtttagctggctggcaaattttctaaggtgttagtagctattagcattttaaggagggcccccaaagcctttcacaccttgaggaattataggccccaggacagattttgagggaatctttttggaacagttagtcctgcagtggtctcattgccttttgtaggagtcaatgcgatccactgcagtgtgtgaccaaagtgagttcaggtttttatttttatttttatttttattttgagacggagtctcgctctgtcgcccaggctggagtgcagtggcgcgatctcggctcactgcaagctccgcctcgcgggttcacgccattctcctgcctcaacctcccgagtagctgggactacaggcgcctgccaccacgcctggctaattttttgtattttttagtagagacggggtttcaccgtgttagccaggatggtctcgatctcctgacctcgtgatctgcccgcctcggcctcccaaagtgctgggattacaggcagtgatgtgggaccccttttaaaaacctgaacttggcctggcgcggtggccaggccaccgatccgccaaggcaggtggatcgtcatgtcaggagttttgagaccagcctggccaatatggtgaaatctcgtctctactaaaaatacaaaaaaaaaaaaaaaaaattagctgggcgcggtagcacatgcctgtagtcccagctactcaggaggctgaggcagaagaatcacttgaacccaggaggtggaggttgcagtgagccgagatcgtgtcactgcactccagcctgggcgacagagcgagactccgtctccaaaaaaaaaggggggggggtcccacaatctgctgtttgtgccttggcatgttatagttgtagtgaaacaacagctagctcttgcttttggccgccct

SEQ ID NO: 2617 - DNA, 4001 bp, Homo sapiens
ggagggcgcggtgagccgagatcatgccattgcattccagcctgggcaacaagagtgaaactccgtctcaaaaaaataaataaataataatttaaaaaaggtattactctggaacttagtagtagtaaatattcacaaaagatgttggaattgaaggatggatatttcctaatttggtagaggaaggcaatttcaggtatggagagaggcctgaacaaaggtggaatgcctttgagggcaggcaaatctggctggtgcagaccattatggaggtttgagcggacaagtaattggaaataatgttggaaaagtgggttgggactagtatggtacttaatggtttgaattttgtcctgagacaaaatttaatactaaatatagtattaaagcaagagagtgataatggaaaatgttggttttctaaaagcttaatacagagaagtatttaggtagatgaaggaaagaagagaatggaagcaaaacataacattttgagtttgaagttagggtgcactcagtaggaaatgcttaataggaagctagaggtacccgtatgtacctggagtgtggaaaggttaaaaaagacactaaagagatctagttttggtagacatctgcgtgatgattacagctgaaaccataataggtggattctttaaataatataagggtataaaagcagccaggctaaggaatggcctgtatccagcatctagggatgtcttcccctcaccccaagatggtgcccttctgattcaggcagcaacgggcatgcagcattagctctcgtgtcgttttacaataaaaggccacttttgacaaattttgcacgctccctggacattgggtgcatatctgcagaagagaaagaaacattagaactccagaaagaaaagccaagaaaagaacaaacggcgatcaagaattaactgccagtacacgtttccagaattcctctaacacggggccgataaatggataaacggctcgtgtcccacccttgtaacaggctaggctaggagatgccatctcttcctccagagtcctgcgccgaatcagctcccgacactttcagtaccagatatcgcacagggaaggtcctcatctctgaagatcactattcgaacttatttattatgctttctgcagagacttctcaatctgacagccctagtttggcgcggtgtaaaacgaccgcaggtacgtaaagaactcatcaagcattacaaaagtacagccctaccaccgcacgatatatggcgttcgtgcgtagagagattacacaagaggcagaggacccgtctgtagaaagaacttaaagttattctaaaattaaggggcgaaatcaagtttcacaggtctttgaaagtcggcaggactggggcgccgaaggcctgcacgacgtgagtacttgggaacaggacctggctgggcagggtcgggaagcgtcagggacgaaatcagaaccgcaggcccgccgaggagaagggggagccgctggcgagcgcgacgcacggctggccagcgaccctgcttcagcccgacctcaaacttgcttctgtacctcgggtagcgccagagccctttccacgcccagagcgaggagcagggcggcagcccagggcaccagggtcgtaagactacccgggtcgtgaggcgccattttccgttcccttggtgctccgctgctcgcgcgacccggccccgcggccccgccccgcagcgcgtcaggccctcttccccgggcgtggcctaagcggcccggtccagtcgccctggggctgcttgggggcttttcctgctcgtggagctctgcgctggtcttcatgcgccctagccctctttcggggatactggccgaccccctcttccttttcccctttagtgaaggcctcccccgtcgccgcgcggcttcccggagccgactgcagactccctcagcccggtgttccccgcgtccggacgccgaggtcgcggcttcgcagaaactcgggcccctccatccgccctcagtaaacatggcggcacggcgagcggggcgggcagggggcgggcagggggcggggcccccgcgggctcccggccagggctctcggccgggctctggctacccacgtgtggagaccgggcaggtgggcctggagagcgtgagccggtgccgagaggcaccggggagcggcgtctgagccggggcggggacaagggggcggggaggggcggagcgagccggcctccggcgtgggtctgagatcttaagtgcgagcggtaaggtggtggtctccgccgcgtagagggaagcgggaaaccgagaaagaacgagggtgagggtgatgagggaagggcaaacctcaaactccagcgggaggacacgagcctggatcgccccgggcacctagtcctcttcacctcaatgctgatagcgcatagcgtcccggagcctggcgaggaggtaggagcgggatagacgcttccctaactcattttctttgccttcccaggaaaagggagcgatgttgatctcaggaagcacaaagggaccttcctagctctgactgaaccacggaggtaagggagtgcgttgctgccccagggtgggccagcgccctgactgaagggcgccaggggatccctgctcccggcgcgacagtgttggttagggccagccagaaagctccttaaagccgacccaagtgatcatctcgagtagccgagccaggcttcccttccacattacccccatggtgtctgcctggaagttcctgaaaggtttacgtttagctggctggcaaattttctaaggtgttagtagctattagcattttaaggagggcccccaaagcctttcacaccttgaggaattataggccccaggacagattttgagggaatctttttggaacagttagtcctgcagtggtctcattgccttttgtaggagtcaatgcgatccactgcagtgtgtgaccaaagtgagttcaggtttttatttttatttttatttttattttgagacggagtctcgctctgtcgcccaggctggagtgcagtggcgcgatctcggctcactgcaagctccgcctcgcgggttcacgccattctcctgcctcaacctcccgagtagctgggactacaggcgcctgccaccacgcctggctaattttttgtattttttagtagagacggggtttcaccgtgttagccaggatggtctcgatctcctgacctcgtgatctgcccgcctcggcctcccaaagtgctgggattacaggcagtgatgtgggaccccttttaaaaacctgaacttggcctggcgcggtggccaggccaccgatccgccaaggcaggtggatcgtcatgtcaggagttttgagaccagcctggccaatatggtgaaatctcgtctctactaaaaatacaaaaaaaaaaaaaaaaaattagctgggcgcggtagcacatgcctgtagtcccagctactcaggaggctgaggcagaagaatcacttgaacccaggaggtggaggttgcagtgagccgagatcgtgtcactgcactccagcctgggcgacagagcgagactccgtctccaaaaaaaaaggggggggggtcccacaatctgctgtttgtgccttggcatgttatagttgtagtgaaacaacagctagctcttgcttttggccgccctctttctggagagatgcgagaccatagcgtttggatcaatgtagggtgtttagaaaactacagatctgttctcagaatctggtctgttgctaggtcaggtttttcctgtcttccctggggctctctcaggccatccaggggaattctccatacatcatgcaaatagaattttatcaggaagtcccatcagcagagtgtctttatttctgtacctccgtgtcccatactgggactttccttcctgtctctggccacctacctctctaaaccactaaccctatagttagttctttgttctgtgttctttgcacacaggagacc

SEQ ID NO: 2618 - DNA, 4001 bp, Homo sapiens
aagcagggaccccgcctccaccctgtctgtgcacccgaccacctgttgtacacggagtgcaaactcctcattcgcttcccctagttggcgatgaacaggacgaagccacctgcaaagaaacaatccagggctatgttgtgggcacccagggtagaggctgtcaccattccccactttggtacctctttgcatggtgggtgggaaaatagtaaatactgtaaatactttgtgttgcctctgtggtagaaccttgatataaagatctacaaatggacagggcagaggccactaattccttgaccttgaggtgagcctctccccagcgaccaaaatgtgaggacagttaataccttacttgatacaccgtgaaagggacgaaaagtgaccacagcagttctgagacccaggaggcatctgacaccgtctgaggggagggcatgagatgaggcctaagccagggccagggatgggaaatttccccttcaagccccagagattccctgttcaacacacactcaccacagagaccaggggtctctgaacttgcagggtaagaggttgtaccacatcttggatagaaaatggccaggaactagaagaggaaggagaaagtaggatgggaatccagccagcctagtcagcagctcacacctgccttataacaggcaactgtcaaactctacaagcacataattgaagaatgaagggattcaggagaaagaacttaaagtggacagaaaggaaatgaactggagatgatggggtctaagggccgaagaaagttgtaaaaactcaagggcccacaagcttgaccacctacccagctggcgccccatacctgtgctaaacccacctgaagcgcaggagcccctcccggccattggtggcctcttcctcagggaatagcagcagaggagtggggggaagcctcgtggaagcacagaatctcttgagtgactccaccaactccccccgcccattcatctccatgaagccccgagaccagcacacaaagctggggggactattgagtagaggctgggaaccaggagaagagaaagcaagaagaaaaatattgaggaaaatgaaaaaaaaaactgacatgttgggtagaggatcggggttaggggtaaggctcagtatcctccatggggaacgcgagtggggacaggggggccttcagctgggccccagggaaccgccccgtggcgctctcggcctcgctctcactcacggtgctacaggtggtaagcaaattgactatgttgtggtcgaaaggtgtcacatggttggaaatgaggaccctgacactgtgatcccggagtccggagtcctcctgccgggccacgagccctagcaccgcacacatggtccgcactacgaatctggggacacaggaggtggtgactgtgtggcctcgggccagacccagctctgacactccccgaacgcccgcgtcggaacctgcgaaggacgctgtctggcagcgcgcagctgaccaggaagacgtggatcccgagaaagaggcgcaggacgaggaggcagaacccgactggcgcgtagagcagcagcacgagcagtaggaagcagtcacccggaagcctgggggcgagaggcgaagtggtcaggcgccgaaggccgagagcacgcggggatcggtctcttcccgccgggtctcttaccggtgcgagtcaaagagccgctccggccccggccctgagggaagctccataactgctgcttcaggagcgcccggccgtcgccgccgccgccattttcgcgcccggccgcaggggctcttgggaaggcggagtctttgggcatccgcccggggtgaggggacccgaagtcctgaggcgcgccggaagggctagcggtcccagcataccccgcggccccttgggccgtctcacaactcgcgtccggcggagaccacaattcccggcattcgtggggcagggaggagtcggcctcccggaatcctggtcccggcgtgcacttctgaaggacttcaggtaccggcgtgccccgcgtcctactgtccgcctgctcgcgtcctgggtgccgcctctgagtagggcgggcgaggaggcagccaaggcggagctgatggctgcgccgagggcggggcggggtgcaggctggagccttcgggcatggcgggctttggggggcattcgctgggggaggagaccccgtttgacccctgacctccgggccctgctgacgtcaggaacttctgacccccgggcccgagtgacttatgggacccccagtctctgggcccggttgtctgttggggtcactgaaccccgagcatgcctgacgtctgggaccccgggtccccgggcacaactgactgcggtgaccccagataccaggacccgggaggcctcagagaactctggaacccgttcgcgcgcgtggctggcggtggcgctgggcgctgggggggcagtgctgttgttgttgtggggcgggggtcggggtcctccggccgtcctcgccgccgtccctagcccgccgcccgcttctccccggagtcagtacaacttcatcgcagatgtggtggagaagacagcacctgccgtggtctatatcgagatcctggaccggtaatggtgggggtagaccgggaggcactgaagccacaggctggagggcgggcgggtaggaggggtcagagcctcctcttatctgtgctttccctccatttcaggcaccctttcttgggccgcgaggtccctatctcgaacggctcaggattcgtggtggctgccgatgggctcattgtcaccaacgcccatgtggtggctgatcggcgcagagtccgtgtgagactgctaagcggcgacacgtatgaggccgtggtcacagctgtggatcccgtggcagacatcgcaacgctgaggattcagactaaggtgggggctggggtaggccaggtctggttggagctgcttatttgctcgcatcttcagatgacaggtctcttttacccattctcccttaggagcctctccccacgctgcctctgggacgctcagctgatgtccggcaaggggagtttgttgttgccatgggaagtccctttgcactgcagaacacgatcacatccggcattgttagctctgctcagcgtccagccagagacctgggactcccccaaaccaatgtggaatacattcaaactgatgcagctattgatgtgcgtcctgataggagagaaatgacaaatgatgggggaggggggagaggctgtgtggtacaagcaccaactgatatatggtggatgagcctatatagagcttaggctgcaaaaatgtggccacttattcatgggctgagaaagaagagaatttggagaaagtacctacatcctggtatgcccccagacttagaatccccagatctctttcatgttttctccttgtcctacagtttggaaactctggaggtcccctggttaacctggtgagtgagacatccttccttccaagaatccctgccccaggtcagtgtgggaagggtaggtttcccctaattcaaggatgtttggtcaagtttctgagcagttctttgttggctatctctcaatatccaaccagatctccccaacacttgctggtacttttgttcgggtgcccccatcccctactatttgtttaggctagggaactgggggctgtatccctgcaggatggggaggtgattggagtgaacaccatgaaggtcacagctggaatctcctttgccatcccttctgatcgtcttcgagagtttctgcatcgtggggaaaagaagagtgagcctgccttatggggaaacgggttcctttaatgtggtggaaataggggaagggcattcagtgggacttcctggagggtggtctactgggagaagagggcagggaaggaaggatgtagctgggtggggctcatttgtccctctgtcacagattcctcctccggaatcagtgggtcccagcggcgctacattgg

SEQ ID NO: 2619 - DNA, 4001 bp, Homo sapiens
tggcttaagacaattaaagtttgttgtttgctcaggttacaggtccattgtgggtccatgggttggggggacggagaggggcactctgttctttgcagtcacacaggctccaggctgaaggagaaaaccacaccttgagccacatcaccagtcagaatgtcacaggggaagggagccagggagtcctgcaacagcaattaaatgctccagcatggaagtgccatagatcctttctactcacaactcactggtcatcccacatcccatagccccaagttatctggtcctttcatgtgcccagaagggaagggaagcagggagagctctcttgactctcacacctcccctaaccaccctttctaaagcaggttccacctcttcactacctgagcaccctgtttgttttcttcatagtgcttattgcaatttgtaattgtattatttatttattttctgttttgtttttagtctgtttcctccattggacgctaagatccctaagaggaagtattatttataccagcaggctgattccataaagctgttctcaaaagtacccaatcggcttcatatatttaaaatactcagtatatttgtcttgaacttggagaatccttatgagtataatctcatgtctcttagtctgtgtccacccgtttaggctgtgtgctgacgctgctccactgctcctcatcagagggtcctcttgcgactcactgtcaggggctgaaacaaactgcacattccttccaatgctgtcagtaagcggagggagaaaactatcaactgaaaccttagagaaatctccaaaggctgtgaaaaccaacatatccagtgcaaattactatgaattttgtaaataagaaccaggagagaggcatttggtgaattggagttttgttgaacttgcttttggaaaaatagctcacagggaattggctcagagctacccgccaccttccactaacaattgtatttcagggtctgattctgcttggcattttgaagacactctgaaataactgtcaatttcatggacaaggaaactgtagtttagaaaggttaagtaagtggcccaaagtcacagaggctatgatgggaaagataggagtgtcatccaggtgacctcttgccagcatggtgcttctttccctgaatcacagtccggataggctgcaatcatttttatttatttaatgtgccatttagtgtataaaggaatattctaagtatttatcttgctttttatcactttaaataaaaacattttaacaattattcactattttagagacttttaataactgtaccatcattttctatgcaaaatcctattattttcaactgaagtaagaaatgattgaagcacaattgcctgtgggatgagtttacttcagcaaagaagtttcaagaatcaattagtgatggccttggagaaatgggttttaaataggaattgtcttaggtcatctaaagcatatctttagttacctaatagtttatcttaaaagaggccaccactaaaatgtttcatagacacttgtaagtatgaattttttaaaaagacactcttttaagctatgagtttttttctcctgtatctttcagaataaaggctttttcctgcacgtcctacacatgtatcctggaacttaaaatacaattaaaaattttaaaaaagaaataaggcttttatggcaaggatattttgcatactatagcaggtaaacattaataaagaaaaaaacctagacttttctctctgctcattagtccttagacgctgatttctgattttgtagagttgctgttatttttcctcgacgctgggctgcataactgagaaacgtgtttctcgcctacctggtttctcgcctacctgttggctccagcgtgctgtgttttccttcttcttactacaagttcaggaaatcaagcatggtctccatctgtgtgaggaggagattcaaggtgcccgtgccaggagcaagctgcgtagccctaagtggacaccaagaagagagaaaaatttagaaataacggaaatgaattgggttcagagaaatgaaaacagaactgccactttaaaaaaatatttctatttaaggacaatacaatacaaagaatggcatgtgggtaggcgttgaatagaggtggactgaatgaaaaaagaatgaagaaattaacctcatttagggtttcagctggtactaggattacaaactcagatgccttcaagcccatgcaggtggtatcaatgagccagcagactgggtgtgagataataaggaatggtgggtactgtgatgagctactgagcccatgccccacctgaaggggcagctactgctcaggtctagttgatgattttgactgatgccacaaagataaacaggcccaatgatgtcacaacgtccaatttttagggaaaaacagaaatatagattttttaaatgtgaaatattttgagttttgtactttaggatctaattttaaaaataaaacaaaactgcacaggtcagacaaggctaaaaccaaagtccacgtgaggggtcaggattggcacatggatggccagcttttacctaaggtcttctgcaacatcttaactttccaagtgataaaaaaggtccagagggctgaagctgcctttgggcaaagacatttggttcattcacggcacagctgggattttaggcatgcgcaccttccctttcacttaagaccttttagtgtcacttatgaccactctgccactggctgaatctgatccagacctgtttgtttaaataacaggatggaagccaactagacctgccttctattgatcagattcttgggtctcaagctatatatgtatacaaagcttcataataaaaagtggaatgttctattctaactaactgttcatgtatatcatagagtaagttctgggtaatgctgagtgactgaaatgtgatgggtcctcatatgaaataaaactcttatcaaaggcatttgtttgggatggtgtttcagcagtgtggccccatgtgaacaatatggacagaggcacaagtggattccagtggatccatttgctggttccagtttctgttaaaagactctctgtttctatgataatcactgttgtgtgatgggtaagtgtatgggttgggtttagagactgactcagccactgatgatacttaacctttctaggtcccatgtgcaaaatcatgatgacggtacctgaatcctagagttgtcatgaggttcaaataaatgaatacatagaaagtgcttaggatggtgcttgcataggtagtcatcaacgttagctagtatttgtaacaactacccacatttactgaatgcctacaccaagttacttatacgtattatctgtcatcatctccacaatcctcttagttttgtattattaccttcattttaataatgagaaaacatgactgagggagagcaagtctattgttcaatgtcatcctgggattagtggagccagtgtttgtttgaacttagatctactcagcctagacagctgcttaacctacctctccagtgccttgtcatttgttcaattgaagacaaatttcagaactttaaaggagagcacgtctatttggccaaacagacaaacaccaactgcttatcaagtcaaataccaaagcaaaagagtcccagaaacaatcaaaagtattgcaacacttgggaatcctttgccttatgtaaaaaatgtcttattctaataatgggagtgtaccatgtaagtaagcataagacaggagagcatgtagtcagtttttagtctgcatgaaccctcattctgctctttaaagtgcatatagcacttactagattatttgcttaataatattgataaaataatggaggtagcttttaagaatttaaacatgtactgaatgttgacattggaaaaatagcacctgaaagattttactctacgatatttttaaaacatttccttgcttttgtagaat

SEQ ID NO: 2620 - DNA, 4001 bp, Homo sapiens
tgctgtagggagaaaaagcaatattccgaactaaaaaagtagtttcaaacagaagatctaatgataaacacatttgtaaagtctgagcagggaggaaaaggattactcaaattactcaagtacagccctatggggctccttcacttctgtgttcttaaaatctaatctggtttaagagcgcatgggctccgagtaaaactctcccaaattcctccaggcttaaccaccctctactcaaaagaaccaggagcaggagttaggacaatgggaagtgaccgccctgccctgccctgccggtcctccctccgggtcagctgtcagatccgcatgggtgcgactataagccggcaccggagccccgggactggctcggccagggtccccgccttttcactcccagtcccggccctgtcggccacctcgtttaccacctccagaggcacaaataattataccggaagaatttgttttaacaagtagaattctatattcaccaactggcttcgctatcggatattacggtagggttccaacaagagaagggcaaaagaatatagtttaattgttctaaacaatctttctgagaagttggggtggctgaggcggccacggggatacagctcaggcacctgtgagctaagcccactctacaaactaaccacccctacgttttgggcagaagagcgccgcctcgccaacccaggttataaatgtacatatttttaaagatgagctttgacgctgtgacacttgtggggagtctcccgacggctcctctacttgatgggggtacagggagttctgcggctccccagccccgagtttcaaataccgtggcctggaaattaaccgggtgactcggtttattgcctccagaagggtccgcctgccgtgctggagtagccgccagtcccgcgcccgcagccccggcagggccccccacgcccaccttcccacgaggggtgtctcgtagagtccggcttcaggcgctccctggcctggcagcacccaccccaccccgccccaccccacccccacgactcgggctagcagcctggttaatcattcaacgcaaacagtgtggaatattttttttaaaaggtcaaagcgaaaggttttccctaagtttggcagaaaccagttttgggggagccggagacagaagtggcagaggttgggggtggggggtggggagcggctgccggcggctctttggctcacaaaacacctgatctccccatgcggcacgggaggccggcgcagtgcgagggtggggtgcgggggtgcgagcgaggaatcacgcgcgcccccctccccgaaatgcccgcgcgccccggatgaggaggcccggccccagatgccccttgccaaagcccgcatcgccccggcgccggatcccccggaagttggggtgcagcgaggagggggaaggtccccgggctccagggcgaggtgggcacggaatgggttgggaggttccaaagccccgcagcgggcggtgtccctctcctctccctctgggctgaggttgggtggctgggacggcgggaaggtaagggaggcttaaatgcggcaggagccacctagggacggcttcctccaccggggcgcgggtacgaagccggaaccggcgaggaaccgggcgggggtagcagggtgtccggaaggtggggccgggaagcagggaggcggaaggggactggtagaggggcctggcggtgagagggcagcggggagggagccggcgggggtgctcggcgcccgggccctaccttgtccgggagcagctccagctcggcggggcgggggcaagggcgggagatcgcggccacatccacgtcccggccgctccgcgcggctcagcccggcgaccgccgcagctcacgctccatgcgcggcgccccggacgggcggcccggcggtgtcggcggcagggactgctccggcttggctctgctagcctccggcacttgttgccgctgctgccgctgccgctgcgcctcactccaggctccggttccaggcgcagcagccgccgcgggcgcccggccccgcccctcccctgcccgcccgccaatggggcccggccccgcccctcacgtcaccgcccgacggccccgccccgcgccccaagttttgggagggttccgctctccccacccggtaccaggacccacccgggcccgcgctccctgcggcttccagggaccctccagcccccacgcaccctcctgcaaagccgagggttaagctggggaaagggggcctctaggaaggcgacccccctggaaatgcctggcagctccaaaaacactaatgaaactcagctccagcctccgcccctccagttgtgggtggcccctcttgcggttcgtctgaggctaggggactaggcgcatcgcctagcgagactccagtggccttttctgtccagtttgtaaccggaactagaccgaccccggccgccccctccagtgctggggcgggtgaggaatggccccgccggggaggcgggggagggaggcctgggccaccctggggtctgacctttgctccacctcttaggtgctcacgacccagagtggtgccctgcttggtactgccactggatcctctggcttatgaagccgtccaggacaggaagggtggggggtggtccttagttctcttcgtggggtcatgcagagtggtttcctcgaggtcccacgcccgtctcaggaagccagaaacgcaagatgccgggcgctcggcccgaacccgtgccgcggcccaaggggcaaggcggataccgaggcaaggcctaaagggccggactctgaccgcaccctccggacactgcagggctccgccggccagaggcggccttggcgccaaccacacctagcagcggggtccccgggcccaccgatgcgccctcctagccccgcgctccttcgaggggttccaaggtgactcagagacgcagctgacacaattctgaggcccccaggtaagcctggcgataccggatggagaagttacctggtcttgaaaggcccagtccagccagcgagacccgcgtgcgctccgcggggaggcaagcctaaccaggggctcacctggaagcgtccccgccccctggtccttatctctgaatcgaaaccgaacctggacccatctagataattggactgagcaattaaggacgcttcgctcctaactgttagcattttttcctaaggctctcggaggcggaatcagctggaaaggaacattgctaagtaggaatttcaggcacctgtgaactgagcccactcaataatcggccctttcccttaaccaaactcagcaaaggaagaaagaccaagttgctgcggatgcacagagccacgtgggtgcgggtcctctagaaacaggaattcagagtcagtagatatggaaatgttatggtttgcagtcttcggaccatgctgctttcatgctgttcacatgattctcctcggactgcgaggtaaagtccaagaaacaagtcgaatgtttgtattttcatagaaaaaacatctgtaagggtgcacaccgactgttaaccacggttacgcggggaggggaaacaagggagttacatttttttactcccttgactttggattttgtatttttccagttgtatttactttcataatttagaaagctaataaaacatgtttaaagaaacagaagctagaaattctctaagaactctaggaagtagaggccgggcgcggtggctcacgcctgtaatcccagcactttgggaggccgaggcgggtggatcacaaggtcaggagttcgagacctgtctggccaacatggtgaaaccctgtttctactaaaaatacaaaaattaatggtgacatgtacctgtaatcccagccacttgggaggctgaggcaggacaatcgccgaactcagggaggcggaggttgcagtaagccgaaatcgtgccactgtactccagcctgggtgacagagtgagactctgt

SEQ ID NO: 2621 - DNA, 4001 bp, Homo sapiens
gggcacaggctcagtcccggagtccctaagctgtcagggtagggtcccgcttcctctcccaccctgccctttctttctcccaccctgccctctcctcaaggagcactgtggaatcaggccctgacgcttacaagctgaatgagtggtttacaaccactctgagccacgatttcttcttcccccaaatggggctaaaacacaggattggagtgctatataaagtaccaggcagcgggtgcacagttaggggaatgctgtcaccttaacaggagggcctcaggtggaaacctctgccctgttccccacgcctggaaccccaatgcctttcatttccctgcggtgtacctacccacagcagtaggtatcggtatcattaggtgactcagagccagagtcattgagagggcaccctctgatcctctgtgccgcccgggagctccatcacatgtggggcacattggagagtggctcgagcttgggacctgaggaagactggccctcctcccccttctccagtctgtctcacccaacaaagagcagccctcatggttgatggaggcccaaggatgcagtgagcacctctagcatggcactgcccctcacccctaccttaacatccccagctcataacaccccattagaagacatgaggctacagctctactccctgggagggggcacatttgcagctccagcccttgagggacccttcttgcccagagacccccccaccccaaccccggtccacacccatttcggaagcagaaattagagctctctgccaggagtgctggtcgtcccaagccctggggcctgagcccctgtcctgaaggacctcctctcttcatctcaccctccgggggctgccaggacacctgccccaccctccccagtggagacctgggggctgagagctctggggacagcagagtggccttccagggccagcctagcagagagatggcgctgacctccaagggggaggagcagggtgccaggagagacaggcagcccgtggagacgcctgggttgccctgagggctggtccggttgcaggtccaggccccagggtgaatgcaggctgagccccatagagcgacattttccccatagggtccccaggttgctggggcatgtggttggaggaagacaggggcaccttaggtgcaggctggggggtgtgacccaaggtccagctctccggggaggaaacggagggctccggatccggccctgccagccctaggggttccagggaagccgcccaccgaggccgggacgggggaggtcggggggtgcaccgggaaggcggcgaggccctgggctgcgggcgctccacctgccgggtccgctccattcgtagggaaagcccgggaggggcggagaggggccgggcgggcggcggtccgaggtcccgcggaaggaagccccgagaggaggagagtggcccggacgcagggggccctcaggggtctggaagggagaggggacccagctgccggcaagacctggggtcccagccgccagggtcctggagcggtgtccagggccgcggggccggggagctgagcgcggcgccccgagacccctcgacgtcccccacgggtccggggccgcgtaccgcgaacatctcccgccgccgccgccgcgcccgcccgcccatccgcccccgggaaactgaggccggcgcggcgcgcgcgggggcatctcctatcccgggagtcccggcgcccgtctgtggccacggaggagggggagccccgggcccacgcccccgcccaggcccccgacggcccccagccccactcaccacagcgacatggcggcccgggccggagcggcggaggggcgagcggctcgcagctctgggcgccacggctcgggccggcgggacggcgggcgggtggggacggagaccgggccgcgcccccgccgcgactttcctcttcccggccgcgggaggaggggccggcaggggcggtggcccaggtgccttaaccccttcggcgcccagggcccgccccgccgccgcctggcggggaccaccccatttctccgagacggcccctaggctccccaagcgcgcctagtagacagtgcatggccgaggcggggcttcggaacccacgggggtcacctccaatcccggggacgcctgtccctggcggagcctcccggggcggggggagggcggtcgccggtccctcctgtacttgtgcgaaacctgaacacccggtcccctccaagaccctggggcaccccaaggcccagccatttccctctggccccattcggacttgtctttggggccagaggcagacagggtgtccttttctccctctgctaccttctgcccctgcacctttcccctgaccagacggaccccttgcccagctgttgggctacctagggccaggagcaaagccagccactagggaaagaggccgtatgagactgggctccatgtcaggactcgcccaggcctgtggctctggaagctttttttgtgcccccaccatgtccctctcttcacctctggggttcctcccacctctgagggctccccaccaccaagggaaggcctgttggcccagccctatctcctttcttttttcacttatcactcaaaaccctttttgtcctcaagcctttattagtctgcttgtgcacatcaggcctagcggctctggggagtgggctgacagagaacacggagagggcttggtccagccaggtgacttccagaatcctccagcagggagagccatcgctggtcctgttgttgctcaggttgttctggtcttgttccgggttgaggtttcggtgcttagcatccagcaggacctccaaaaggcccacagaattgaaacggaagcacgttgtggtccaatcataacagctaacgtccactgagcagctacaatatgccaaacctggttctcggcccatgcatgactggctcacttaatcctagagacatacgctattattcccaccttacaggggaggaaacgggggtgcagaggggaactcccagccagctcagagaacagcgagcccagagttagtaagcacatccaggaggcctgcatggcctgaaggctggctctgaacccttcctgcctggtctgaaggctggctctgagcccttcctcaaccttttttcctttcccagggacagcagtgacatggagctactttcctgcccagcacacagggaggctaggagtcctcagctggatcttaagccctcgaggccagggtgaggagccccttctgccctatccttaaggttcaagggccctttggagggggaggagaaacttaaggtaccatagaatgttctggaatgttgtaagtgccaattagggaatgtgaagggcctttcaggcagaatttcagaggagtatcttggggctgatgtcctttgtaatggccctccaaaagttccagagcaggggaggggctgacctgcagcccaaagcccctgttggcctggctgcctgccactgagggccacccgcagattctgcagctccacggctcccttcatcccagtgtagccttggccaccggttcccgcagggcaccaagcattttgctccactgcccagccttccgagttccccacttcaccctgcaagtgtggccctggcttccctggctccacacaggtgccctgctgagagctgcctccctggcttcagcactgacctctcacccggtgctgtggggtctcctcctcctgctgaggggtggacacagccgtccctgggaagggggttttgagcccatgtttggggatggcaggcatgggcgttgggtcagagtcttgcacttcctggttgtcactgggggcaggtggcttttccccttgagacctcaatttcctgccagctcagggccttgtgagatgacgccaatgaagcacagacataggcatcccctatgtaaagaacttggtggcaggccggctactgttagtgttatcattgatgtcc

SEQ ID NO: 2622 - DNA, 4001 bp, Homo sapiens
attagtattactcatatccggaaaatgagagatgaataacttggcctactcaatagtgtcaaagctagaacctgaactcaggcattctgaccacagtctaagtgaagcccgatgcttccacataggtatgtgccaagggaatgtctaactttcgttggactatcaaggtgtgaactataatgcttctgttattgcaactagcagtgccagttttaaatttcctattctcagatgacccatgtgctacaggaaaacaaacacacaactcaaatgtcttcatgtactcacttatctgagtgtcacttttctaagaagtgcaatgtcattttgtcacagatattaaaagttttcgtcaaagaaaatataagtgcaaaactctgacagttaagtccttttcatttttaaagaaaaagtttggccgggcaccgtggctcacgcctgtaatcccagcactttgggaggcagaggcgggcggatcacgaggtcaggagacggagaccatcctggctaacacggtgaaaccccatctgtactaaaaatacaaaaaattagccgggcatgatggcgggcgcctgcagtcccagctacttgggaggctgaagcaggagaatggcgtgaacccgggaggcggagcttgcagtgagacaagatcgtgccactgcactccagcctgggcgacagagcgagactccgtctcaaaaaaggaaagaaaagaaaaagttgtgttacttatactttatgcaactaggtaacttaagttctgcaagttagaaatcaaaggggaaaaaagtccaaaaaggatataaacttttgacagctacaaataacaaaaaaactgccagtgatcttcatacagaaatacttagctgtacacacagcaagtgctcaataaaaatgcttttcagaagaaatgaaaatgagacaaacctttcttgggttttacaaaccttcttggtttgtatactagaaagagctacacgaaaaaaagcaagaagtaacactcatgaaaatgtctttggacggaatgaaaaccctgagaggactcccataatgtgacagcatgaaggaaaacaataaacagcatcactaagagcggggacaccagacatacagtcttttgagcaaactaagaaaatgagaaattccgtgccatcttcaatctacaactatggtagatatccgatgctccatcccatctcactcgaaaaagctggcacggagaaaatgtcaaaaaggccagtttaacttagagtggcagctgcttctaatttagagggtctccggggcggcccgccagcccaattcgccacagctcccggaaagcagcggggtaatccagggccgggtaaaaaatgcagaagcctcagccccaccccagcccgattcaaactctggaggcgcgaccgggatgaacatttttttagccacacctccagacggttcttcagcccgctgaagttcaaaaactaccgtttcagttggattcagggcaaggggaggccggtaagtcgcccaaaaataaagtgaatgagaagcagaagttgttaatactatatcccccggcaggtgctaaccgcacgccgacccgactgcagcgcgggaacggaaggaggaaacggaagatttgaaaagattctgccgcccccagaaactgtgcgacccgtgccctcgcagccacccccaagaagctccgtctttaccaacgcgagcagcgcagcagcttctccaggcggtcgagcgcggcgcgactgtgggcccaggcaccgcgaccatccggttccatggcgggcgcggaacgaggctcgttcccggagcggatcctcggctgccggttcctcggctgccgattatccggcatcgtcccgccttcggatgaaaggctcctcgcagagcgggaagcaaggaagcctcgggaaaccacagggaagctgcaggccagcgactcgaaaccggccaagctcttcccgcgtctgggacggcgggccgccagaggggcggggcgcgcggggaggggcggggcacggcggccgcaatgctcccaaaatagggactcgcagggcacaggggcggggccgcgagagccagccgctggccgagtgggcgggacctaggggtggggctggaggctgaaacttgccaaagtcccggcgtgtgggacttaggggaggggccgcgagagccgtgggaccgagggggcggggccggacggctgaaacttgccaaagtcccggcgcgcgggtcctaggggcggagccgcgagaacacgccggggacagagggggcggggcctaggagcctcggggcgggacaggacggtcgaaaccgaagtcctggcgcgcggggcccaggggcggggcctaggggcctcggggcaggacaggacggctgaaaccgaggtcccggcgcgcggggcccaggcgccgtgcagtgagagcacgccgcttgaccgaaggggcggggcctgaaggctgagcgcagtcgcgaggctgtagttggcaggagagcgggcggggcctgaagcccctctgggctgcctggacggatgaagtccaggtggaaagccagtcgacgtttcccgggagctacgactccagggaccctcatccgagcttaaccgttggaacaatcacaaacccagaaacttttagctgagtgttatttataaaaagcgctgttttgactgctgttggacttggaaaagctttgcccacgatactgaaggtaccactctttgttcctaagaaagcaaccttttctttcctctcacctcagctgtggcgtatattgtaactgagtaaaaataaggaaagtttctaattctaactagttaacaaatatcagctcaaaggcatgtctgaaaagatctggtttacttttaaaatattggtataaaatttcaaaaagggttttttttgttagagagtgtgtccaccttcctcctccagatctttcactgatcgccgtaatttacagataagacctacagagcaacccgtcatgccttcctgccgcgccccaagttcatttccaagtccttgcattttttccccctaacttgtctcgaatgcacccattttctctccgtctctgctccacaacatccccagttgcctcgtcctcgcctggtttcctgtcgtagctttctagctgatatccaagtgtctatccaggtcccagccagtcccgagactgcggtgtggccgcctaaaacatttccaaacacaaaactcatcgtggcacttccctttcttaaaactccttaaagtttttctctgctctttgactagcctcttgtcaaaacctcctctggccatcatggtcccaaccccacagtgcgttcccttaggtcattaaaagcccctgcaccttgctgcctcatggcttttgcgcaaagattcactttggaacctggaattggcctcctctccattcctcatccttcagaatacagctgaagtatcactccttaaaggttttcctagttcctagactggattctctcaggtgcatcatatcacctgtgtatgtagatacacacacatacgattatgtgcgtgtccccttctagttcaaaacctccaaaaggccagagattggctgcatgtgactcatttcccaatatcgcttcatgtggcacatgcagtgcttggctccaggtaggtgctcagtgtttgttgaatcattgaactacctacccaagccagacccagctttaagtgctttcctatgttaatacctgccttaagccttatagggaccctatgaaatgggcattagtatctgtagtgtcacccccaaattcatatattaaaagttgtaaccccaacgtgatagtatttggaggggacctttgggtggtagttagatttagatggggttatgagggcagagcccccatgatggggttaatgaccttgtaagaagagagagttctctctctctccaccacatgaggacacagcaagaacgcaaaagaagagggccctccccaaaacccagtc

SEQ ID NO: 2623 - DNA, 4001 bp, Homo sapiens
gataacagttgaaacctttaaattaaaaaaaaaagtacacaaaaaccagataaataacaaatgacgcacaagttttttaccattttttgcatataatcttccacctgttaccaaaacatacaatacgcagacttcgtatactgattttgagagcaaaacacaaaaataagccacacaacttatcagtaacctgtaagttacacaatcctataaaacaggagaaaaattaagcaaaaaatttactcttgggaaaatttctccgtaaagtttacatgacgtcactgggccccctgaacattccctaaactttgagacttatccagacacacttcctaatacttctttcctttcctcaaaaataaaaaagagagagacttgggaataaaattgcccaagatggcgaaacgcttgttgtttagagggcaggaaaaaaaatggaggatattgtaatatacacaaagggataaatttcaacaactcggccaaggactgcagctgcttccctctttataaggaagcaacagacaaaagataaatacagagggagaaagaaaagaagagaaaatctcccaaacaacagagccagctctgactcttcaaacacttccttccccttctcaaatcccaattctggggttcgtgaaactacttaaaggggagggagccgcgaaagagaacgggggctggggggaggggtagcgacaagaagattaaaagagggaagcagaggagttgggagctggcggtcgttcccggggaagaactgctaaaacatgagaccaaggcacagaccttactgtatgagaagcaatgctcctcaaaccttctgcgtgctgacatagaccttcccaggtatccagatcttttcccaatcccacctgccccacccccacccccgctcatcttcagtaaactcagagcctccagctacacacgggagagctagaggcccaagccggggagtgggggtggcagacgcagctcgtcagtccgacagggaagagggggcggaggcaaaaaagggcagcaggaggcggacgggggtggggggtgatccagaaactaccccggcagggagtgggggagcagcggatattccggggtaggaacggccatcgcaacgctgacagaggttgttttttaagaagcaaaactgttggcggcgacctgagcgctggaagccgaaggggaagaggaaggagacgcgaagccagggcggccggcacaaaggcggcggactcgcggcggcagcgcctgcccggccgggagcacaacccacggccctactccagcgaagtcccgcaccggcttctaggaataaagtttacgttctcctgaggccgcaccccccacctcccacccaggacggcacatctccgtgtcctcctcccccaaactccactcgggaccccgagaaccaccccagccttccggccaccacaacaaagagccgcaccgaccggcgaggataaacagcggcggagggcgagagggcggcggggcgagcgcctccacgcagcaactccggagtcccccgcttgcccgagcgcagtttctccgctgctgtttccaccggctttgtaacactgggaatttacatcctcacccgcacccctcacgcccgaggattttaaactcacctttactctcgaactgagagttgcggtagatgggatttttgccttttccccagatggttgaaggttaagatttttggaaaccccaccacctccttatttctattattatttctgcaagaaaagtataaagagagttgtagtggaggtgagatttgtgatcgggaaagccttcgactccctccttctccgtcttccgcctctctctctctgattagttcctatccagcagcagattgaagcaggagatgattcttctcaaggtttgttcagcagcttcacttctaggcgaaggcttcatgaaccaagtgacgtcaaccaacaaggcttctctctctctcctctctctaacaatgaaagttgctgttaacaagggaaaaaaagagagagaattgtttataccatttcagttccaataataaatgacctatcagctcctaaaggagccaagggagggggttgcttcttctttccaagaatactgtagctttgagtttgcaccgttccttgtcccaggaaaaagttaagaaacttaaaatgttttgttttgcttttaaagaagacaggacagaaaacgggatttaaaacttagtttttaaaaaaacaaaagctacagagtagggagcataggtcaaccatctccacctaaattttttttgttcctaaactcagaattctacaacccaactaaattaatatgccaagattttgcggatgttaaaactcaaaaaaagcagtatgcaagacggtcccggggtaaaattctactgcctttccacggacaagttaaactggctgtaatgtttatgcactaagttaaaataaaatttaaataaaagacgttaaaatagtcgttttaaagttatatgcacacactgtaaaaggtaatctcgatagctttttttcaagtttctgagagattagaaaaaaagcatagcaaattgtaggcactgaacactttttaaaaatcaagttatgagtaagactggtagccctttgctcctttaaactacaaatgcagtcatatgctatggtctacccccagaatctcttccaactttgtttttacccttccactcccccaaccccaattcccaaatcctgcaaccaatcaagttaaactaaagatacaataggccccattccctcccgcaccccatcctatagattcctaaaaacaatttttttaaaagccttaatcttgataacactttattagccaagaagatacgtatttttttttttagaagttcgttgaggtaccgttttttccctccagaacacaagaaagtctcaaagttcatataattaaaaattgcataatttaattttcaggatgaagagtaagtaaaaattaagctatcggagaataatttgatcatctatgtatattttatacatatgtggataaatgtatcttaaaagatgctattgttttatgtttcctcttcagccactggctgtgattttaattgtgctggaggatcttcattagtattaacacatggggagatttcacaaagctgcttcattaggaaaaaaaaaaagcttggcagactcggtctttttgcatgcactgagaatgtcagccttacctcggtcatttgtaacataataagtgcaagtacaatgattgcaatgcaggagcactgggggaagggcagaaatactgcctgtctaatagggatatctgaaaagaaggctgctcattacagagtaaaatgtatgctaaaaattagtgaagatgatgtctcaggagactgatgctaaataaattaatgtgctgatatgtttttaattattatttttgtagtagtttatttcattctcaggattcacattgagcagcaaagctgtgctagcacttattgattttttttccctgccacattcccggaatacagattttaatcatttcactacaccacactcagtaatttcattaaaaactggaatcttccatccccagaaaagcatttaatttcaatgacatacaatttctcttttagcagcaaactgtctctacagtaaaaactggcctaaggttcaaatgcataatttaatcctgagttttccatgctctgcattcctttcaagctataatttgagtaactacctaataactgtaataaggacaataatttccttataatatattattaactcatatttaattaactcggaggccaagctctgtacatgtatgactgggtcaacagttctataatctcaaaatttactaataatgttccagaagaaaaatatagattaaaatataagtatgaatgcacttagtatctaagacttctatcccaagtcacatacaaaaaagttaatgcattgttctataatggtggtcattaa

SEQ ID NO: 2624 - DNA, 4001 bp, Homo sapiens
agaagttgaagtccaaaatcctgagctaaaaatgttacaatctggctaatttatctatttgtacttccaacctctctctgcagcagaccctgcctttagctaatgaggttacagctccaagactgcttctaacgctaaattcttttcttcttttctggaatactctcctcctgtctaccctgacaaggctctgcccattcttcagggaacaactcaaatactatgaatatttattcttcttcaaggacttcaccaggtagaataaattgttctgtttctatgagtctcagcttttcgctcattttttcagaatggtatttaccacatttattatagtggttgtctgtatgtatctcctgcactagaacggggggatatgaatatcatttcctattattttctgtctctagctatcggcccagtaactagcacgtaataaaacatggataaatgtttactaatgttactgaaacggacttttgtttggattaagaaccctacaagaaagacagaaaatgtcgccgggcgcagtggctcacgcctgtaatcccagcactttgggaggccgaggcgggcggatcacctgaggtcaggagttcgagaccagcctcaacatggagaaaccccgtctctactaaaaatacaaaattagccaggcgtgttggtgcgtgcctgtaatcccagctactctggaggctgaggcaggagaattgcttgaacctgggaggcggaggtcgcagtgagccgagatcgcgtcattgcactccagcctgggcaacaagagcgaaactctgtctcaaaaaaaaaaaaaaaaaaaaaaaaaaaagaatgacagaaaatgtcatagaaagtgcgcaatatgttactacagtccgtaattttacgaattcctttctctttcatcttcttaaagggtctaacatgttagcattagatatctagctatacttaacctgagaaatttatcaatatttcatttttccatctaaggaggtgaggtccatgataaggaacgattccatctaaggaggtgaggtccatgataaggaacgattccacctaaggaggggaggtccatgataaggaacgataagaagtagctaagaagctccatgccattaatccaggaatcttagctttagcgtttctcaacacttagtaacccaaccggcatttcccgccctggattttggagtaggaggtttctaaccactttttctttacgatactttccaaaaacatggtttctatttaatgtatgataatttccaaaaacaggttgcaaaagaagactccttcttgttggtgactgatatgaataactagatgaaagcttaccaaggacataaagtttgcgcggttagtaatttttgacgactgccttactcccacctcccttattttacagacatgaggattctagcttgaatgatgaagacatctgctcaagggcccacactgtgggtcgatattacacatctacttttagaaccctagtttcctgagtccctgacctacgttccttccatgaaactgaaatcccaagctcacgtgggtgtatacgggacgctaagccccgggtggccccggtcgtgctcaggttcacattcctgatccgtcccgcgggccaggatgggggaaccggaggtcgcatgggaccaaaactgtgtaatgccgatgcgctcttgccgcggcgccggcctcgagagggccacagtggcccaaccagcctgaggtctctcgaggcgcggacgaccggcgcaagcctcccaccctcaccagggccgcgagctgcggaggtgcagtctccgcccgcgggtccctaacgcgcacggcggcgccctctacagggttgaagatccctcgggaatcttggaaactcactgcgcggacaggtcgaaacggacatcccgatcctcccaaagcgcatccagcaccgacatggtgaacaaggcccgtggcaggatctctccacagccgtgcaggcctagctgcgtctctctggctccaaggcaacgggccgcctctgtcacgacgtctacggcgggcgccgagactcaagcttccgcgagagtgcgcgcgcgtcgcccagctctttcgcgtcgttaagccgatttgagatgcgaggcaggatttaggagtctctgagaagcccagctgtgtccgccaaggggagcgtgcctgacctctgggcgaccttccttgcctccaaacagacatcctttagccattttacccctctccttatttctcttcaccgtcaagagattcaggttattagccgggcatggtggcttctgcctgtaatccctgcagtttgggaggccgaggctggaggatcacttgaggccaggaattcgagactagcctgggcaacatagcgaaacttcatctctacaaacacaaacaaacaaacaaaaccaacccaaaattagccaggggtggtggtgcacgcctgcaggctcaactactcgggaggctgaggcgggaggatctcttgaacccaagaggtggaggctgcggggagctatgatcgtgcctctgccctccagcctaggtgatagagatataggatcaacaggttcgtatgcctgctgtgcagtaacaaacccattacacgaagacagcagagtttgcagcagggaaagagtttaatgattgcagggcacctagcaaagagatgggaagagatcctcgaatctatcttcccaagagttctgggctgaggtttttaagaggatcacagagggcgaggggctggaaaattggggtccttgattggtcggagtaagggagatgaaatcatcaggatagggaagctgcattctttgctgaatcagtttctcacgggttcctcagaccagctggcatcagtgggatccttcaggccagctgaggcagtagtttcattggtatgcaggatctgaaagactatctcaaagggaaaactgagtatttcataatgttcaagttgttctctatagagcaatagaagggaactataatcttgtgacagggtctgcatgattctaggacaataggcaccaaacaactctgagcaagcaggtcagagaggaagctgacctcatgattaatgccgaattggctgcaagcttggtttatttttgtcccctcccccacactttcttccctgattacttttataaattttattgggatggttttagaatgaggaaaaaagaaatttagagttaaagcttcaaattccttacctgggcctagctcaatgtggccctgcctatgtctgcaacctccaaccaccctcacttctggctgctctcttgccagacagggctcagagactttggagggcccccttcctttgcctggaacactgtttccccagacctctgcataggcctgccctttgtcacttaaatctctgcttgggctgggcgctgtggctcaggcctgtaatcccagcactttgggaggccgaggtgggcggatcacctgaggtcaggagttcgagaccagcctggccaacatggtgaaaccccatctctactaaaaaccccaaattagctgggcacggtggtggacgcctgtaatcccagctactcgggagcctgaggcaggagaatcacttgaacccgggaggcggaggttgcagtgagccgagatcacaccattgcactccagcctgggcaacaagagcgaaactctggctccaaaaaaaagtcaaatcaaatcaaatcaaatcacatctcagctcacatgtcaactccagcagtccctgatccttctgccccacctgctgtgaacaacccgaggacagacacctgatctatctagttgactgctttgaacaatacccagcacagagtaggacccagtaaatacttcttgaatgaatcaaagtcccttttctcaatgcatgacaattatttaaattagtggttcacaaagactgatctggatccctacagggggcccacaaggtcaaactatattcataataatgtgaagacatcatttgc

SEQ ID NO: 2625 - DNA, 4001 bp, Homo sapiens
gggcagggaaagcacgtggtgacctcctcgcggtcccgagctgtggacaagagacgtctgagaaagtacccagggcggaggggaggggaggcgcagaacgcgcttttacagttgccctgcaaaataaaaatgctttgcaaagccgagtttcacccagccgatttcgcagtctgggaggtcgagaagaggtctcggcattgtgctgggggcggaccaggaccacgggccaggctggcgcggagacactgcgtggcctgccgccgtgcctggcgggtgggcgccgggcgccgggtgggcgatccggggctgggctggggcgcggcgaggtcgggcaaggcccgggcgaggccaggccgccgccgccgcctgctccggggctgccgcgccgcgctcggtcctctgtctgtttgttggcaggaggctcccgcacacgcggtgcttgtaaacattcagacacgagatttttcccaatcaaaatccacttccactttttttgaaaatcttccaaaaaatagtaagaggagggagttcctctctccctctccgtgccgtcggcgccctaagtttgcaactgaaggggtttgggggaagagggtgattgtaaatttttttctagatgagagattgtgagatttttgcaggggggctggtgggggagtcaaagagaaggccgtcacagaaaagggttggcagagcgtttggcttcggtttgggggcaagaaattgtacattctcttgccttgttttatttattttatttttatgtatttatttatttatgtgccagtcttctccttgctgcctctgaggttcggtcgggaggggagggcagcggcaacccaggaggcagcagtccgggctccctccctccctctcccgcgtgcccccggccgcctcctcccccggccctagctcctgcccttcggcggcggcggcggcggcggcgcgggagggcaagcgcgaggagccggcacaaaaggcagcgggacaaacacccacctctggccggaacaaaaggcggcagtgccggccgcgtctcccgtccttcccggtcccacggctctccccgtcgccgcggcccctctcccgactccgcggactcaggagcgccgggggcccctttccacagtgccactttctcactattgtggggatgactactttcctcccgctgcacacttgaccgtgagcgcgctggtgtccaaaagccagtctcacctcttttctccccgggaatcgttttttagacttgtactcactccctccctacccccccattttcttacggtgagtgggaagcaacctccctttccccaccagctcccacccccaggtttgcatgtgagttgttcgcaaccttagcattgttcattattttgcaaaactggcggggcggggggggagtggaatcattgcattccttttcgaaaagagaaataaagcggcggaaaggaggaaagaggaggagtcaaatttttgtaaaattaaataaaattaaaaggtgcgtgctgtctcaaaagtgcatacacggcaatggttccagatgggatgagggttttttccccctttatctcttttacctcgactctcggaggtttttctcgtgaaaaatttaaaaatgcatgcacacacccctctctccccctcgcttttgcttctagtcctgcgcgctctcgtgattattaataattattattactattattgggttacttacgcgagaattcccgtttgcttaagtgctggggtttgccttgcttgcggcgagacatggtgggctgcggggcgggcggcggcggcggcggcggcggcggcgggcggacgacggctcggttcacatcgggagagccgggttagaaagaaggagactccagagaaaatatcttcatcagtgccttttgacatccaaaataaattagaaataatacaaagatggcgcagggaagatgaattgtgggagagccgtcatggcttttttttaagcaaaaaaaaaaaaaaaaaaaaaaaaaaaaagagggagagagagagaagagagatagagggagagagagagagagagatgaaaaaaatggcaaaagcccccctgagctgcaagttcaagtgcggacgtgacgtccctgcgaacttgaacgtcaggagtctggatggacagagacacacaaaacatgggcagggcgagcaggagagaaggggaggagggaaggggaagctcacaccaatggacacacatcaggggctggacatgaaaaagagaccaggacaagccaatggccagtgcggggagggggaggtgcggggcggggggctccgcggacgccagacgcggcccccgggggaggggcgggccgaggggagggggcgctggggccgcgggctcaccagtggccgcagcgagcgccgcggcggtggcgtggccgggagagaagaaaggggtggcaggggtgggaggaaagggtgggggggagcaagacgtgcgccctgctcccccccacacacgcggactctaaaatgaaagattattcaaaaaagaaaaaaatagagcgagagtgcaccgggaggctgcagccccgggctggggaagcgcgggcggagggaagccaggtagagttgctcccggacaccctcctccgtacgcacacccacttcccctccccgccgccgccgcgctcgctccccgcgtgtggacgccaggggccgaagtaaaagccccgagcccgcggctgcgctcgggaaactttgcccgaggagaggacagcaaagaaaaatcacccgaagttgagagctgagcctccaagttacagctccgcagcgggcgaggggaggtgggagggagcgcacggcaacgcggaatccagcctaagtttggagggctgcgggtccggaagggcagcgcccaagtctccaggagcccgcgcggcctggaaagaggggaccggggagaggcaggcggcgcaggccggggcccgagggcgcccccaaggccgagccagggaccgggaatctgagcgccccgccaagcgactgggtctgaatgcaactgaaagcgccgagtccccggctcctaagggtcgcagaaagagagcccgaggaataaagaacgaggagccagagtctggcccccggaggggagcgccgggggcctgggcaagagaggcaccgaggcgtccacctctctgagaggccgaggacaaagcgcgggcagtcccgggagtcccagtccctgggaatgtgctcacggcgccgcgggaggtccccgagccgggtccctgggagggacacaccccctcccactccagagcaactgcaaaagcacagagggatgggaagaaaatgtttcttacgggcagagcacaactgttcctgtgctgttacccagggaaagagaaaatgggaatggagagagagcgacaggctcgcaggagcagcggggagaccacggtggtgagatgaccgcctcgggtcaccgccgcgctccccaggcgccgccggccaaggcgcacacccaggagccagcagccccctctcgcctttctgcagacgttccctggaaattagggaagacctgttggaaataaaaccctgtctctttaatgcacacacgcacacacacgcgcgtgctgccgctgtcaaaaagcgggcttcactctggcgtgggatactttcagttttacgtaaaatgtacagcaacagcaccccctgcgattggaaagtttattcagaaacgtgcctgtaaagtcccctggcgcctcccgcctcccagcctccctgcctgccagcaccactctgcagccgccgccgccgccgccggggagatcgcagtccgattccaaatctggaaggagttggggggagaggagaatggactcaggtccaagggaggtgcggagggtgcagggtggagacgggtcgccatggcccgcgagaccctgagctgcaggtggatatgtgtgagtgtgtctgcagagcgaggagccctccttccctctcctcggagcggttcc

SEQ ID NO: 2626 - DNA, 4001 bp, Homo sapiens
ttcccttcagagcgcagcgtccgggccagggaccaagccccgcggcgtccggcccgcgcccttcgccgaccgggcgccccctgaccgtcaccacgaaagcagcgcaggagacaaagcccgggactcgggttcagagtccccggcgcagcgcaaagcccgcgccttcccgccagcccgccgccgcgctccgccgggcagccgagggctccgcacgccgcgcctctggcccgcgctgccccggccgcagccgccgggaacatcctccgcctcctcccgctcctcccctcgcgctctgcgcccgccgccgccggcaccgccgacctccccgcgccgctggcgccgggtgcccgcgttcccaattggtccgcgcgcggtcgctccgcgccgcagccaatcggcagccgcggtgggggcggcgcctacgggtcaggccgccaaaggcgaggcgattgttgacaaactcgcctccgagcgctgctctggccgtggtcgtggcggctgccgcttcgtcggaggatttgagggccggctggcccggccaccctgcccatccctgtgctccttccggacacaagccttagcagctcccgccgtcctggacagccagtcacctggagacaaagcaggacttgcgccgcgcccggacccgcagggccatccccaggcccagtcctcgccacttgtccttgttttggcccgtcgggggcagaccctaacggccgtcaccgccctggctgtggcaactattctcctccaacaacttcctctctctcctggtgcgccgcagacacgagtcaaagccgaagagccacccctggccgcggacgcgcacgtccgcgaccatcgagtaaattcacaccctccgccctggcgtccgtcgggccctccaccagcagcgccaaccctggggcaacaggtcccagagggcacggcgccgccagcctgcaccgcgaaccgggtcgggtgtgctcgggcatgcgtgagccgctaagatagcccggcccagggaccgagcaggttctgccggccgcgactagtcccctgcgcggtccaggtggtcaggggaggacctagatttctcgctgccagggaatcgtgcggatggcacaggccgcaggactcctgcagagcaagcaggggccccaggtacgcttgagaaagcgaacgcagcagtggccccgaaaccttggcctgaatgagtaaaaggaaaagccgtgtctcgtcagttaaatcaccaccgcagttccgcaaatcctccgcaacaggcccacgcgccccaaaaaaccaagacacgaaacaccctcacactgcgcggccgctactctgagggcgccggagccggcggcgagactttccagctgggcgcacagcccgatactacgagcaggtcctcagctcccgggccggcgccgaaaggcacgcgctgcctctcctcctgcccggacctacgacccttcaccaggcccgcgcgcagcatcccgtcccaagccgcacttcggccaagagcctgcaggttccgcgtgaacgacttttctttaaagagaacctgcccgagagggaacccgatccacacggatccccacctcccgccggcgacaagcggcgccgatgcaagcgtctccgctcgcacgtgcacgggaagcgggcagtaggtggtgccgttcgggctccagcgctagtcttccttcggtgccaggcccgcgccccgggatttggaggtatttaccttgcgtttctcagtccgagagtcagagtcagacatttgggggaacaagggccaagaaagggcgccgaggcggtggcggcgggaacgcagcgaaccgaataccgcgatgatgcgatcgcagtgtggcagggttcgcagggtggctgcaagaatcaagtggtggtagtggcggcggcggcggcggcggcggcggcggcggcggcggcggcagcggcagcggcgctggacgcagagctccaacaaactgcagaccaggcggctgcgcggagcgaagtgaaacctgcgcggccctgcagcccagctctggctggcggccccgctcctacgcccaatcactgcggaccccgcccccgctaggtcccgccccggcgcgcgggctggcaagctccgcccccctcggcgccgcggccgccggcgcgtgcaggctcggacaggtaaaggcgggggttgccccgctgggttgcctcccgcgcgcgccgccgtccctggcgtgtttaccggagtaactctgcctgctggcggccatgtgcgcgcccatcccccaccccgaagtgtaccctagcctcccgctcacctaccccaacccggcggcggccgcggcgtgcgcggcacagagggggcgctccggtcacagcctccgctggcccggccggcggtgtgaagcctcgggaggcgccctgcgctctcactgtgccctgagtttctaagccgctctggggcaggcgcggggactgggttggtcctcgcgaaggcgcggggcgaggtctttgagctctcctccctctgagggtccctggcgccgggcgggacgcggatcagcaggctgcgcatcttcctcgcccgggcctctcgcgggactcaggcaccctcctcctgccaccccgcaggggctctccagcttttcttccgcgcccagtcgccctaagagacagaggccgtgggggcaggacgcgcccagaaaacggccaggcgcggtcccagtgggcgtcttcgccgcctcccgggtgagggcgggaggcatgtgcaaagcaggtaaaatagggaaatgaaaaaagcactcagaaaaaaaaatccttttaggaaaaaaaaaaacgaggtgaatggcggcctccaagtgagagagaacgttgcgcactgcatttggctaggacccccaagatttgctgggctcgcagataacctcgtaggagctccctcgactggctgaggccagtgaaggcagaacagctgagttcgggccgcggtgcgggagcgcaaaataccccgtccctcctcccctcccgcctccccacccatccctttcctccctggagtccgcagcacctcactctacctcccaggagaccaaactccatgccgcctctccagtcctctgagtctgcacccgggtctgctctcccaacgcgtggctggcgccccaaccccggccctcctgtctgctcctcccgcgcctcagttccccagccccagcttctagacaactgcagcgggggtgtgggaggtggatcgggaaatggaacatcccgcaggtgaggtcaggctagatggattaaggaaactctgtaaagggaccaccctacacaccaccgcagccggcagggagaaggaaggggccttgccgtagaggagcaagtgaggaggcgttgtcccgccgtccggccgcctggagcagtttttaaattcataagcgcttctgtaacgtcagtgggacacagcgcagccccatgccaaagtctcagcgcattttcgggtgaattttgagcgaggtgaaggaggccttgggttcccggagtcgctggaggacgcgcgtcgggccccgcccagttatttcgctgcaagagggaaaaggcacgagcgtggacacggctaagtagactcggaggccggagatcggtcctaaccgggcctcgaagttcctaccgcggacgaactttgctcttcgcggccgtcccgcgtcgcacccggggaaaagcaacacaacttgctgcgcgggctgagagcccgaagcccgccgcacgccgcaatgctccgcgctccccgcggggtcgggcgactcagacagggaccggaaaagaaccacgcagaagaaagccctatttcttgtcgtctgttcctgtgcagccttgcagcctcgccgcccccgcgtcgctcgctctcgcgaccctgtgaacactttgaaaaacaagagtcgggggaagcaacgggctaagcgctgctatttggggcactaaaaggaagccggccagaggtggcgggttcatgcgtcccccgagac

SEQ ID NO: 2627 - DNA, 4001 bp, Homo sapiens
cccatgggctcaccccggcctgcttattccacttctccaaactgctcatctgatgtcaaatgtccccatccctgcaatgtccctagaaagcctgcctgtgccatcccacaccttcctccaggatgttgaagaaaacctttcggtcagtgcccagggccgtgaaggtgacagattcccaaggagtccccgtctgcaagtctatcatctgcatctctcgacttcgttctacccgaatccatttcccccgatacctgaataagaacgatcaaaactgagtgagtgaatgggtcaaacccagctcccatcattcttttctactctcacagccctccctagctccccaccttaccagataaaatggtttccagggctggggacaaattcaaacttagtggaaatgcggccactctcatgctgaaggtacgaagtctcgacactgaggtgctgagtacgggtactgtggcgggtgagccagctaagcaaccaggcatagctcctgtctcgagcagggacttccagtgtgatcatgtaatggcgccggaatgccaccaggcccagttggacacccttccgggccagggccagggctgtgcccacacccaccagcccaaatccagccccaaagtagggattgtccttcagagccagaataaagtctgaaagtggcatcttgaaagggaaacaccaaaccttacaggccctggggtgttacgaaaacctaggggtggggaacagtggagatgggacaaagcacagattagaaattggacctccccagccctggccacaggtcagcattactgtgtgggtcaataccctccttttgtggggtaagggtggtattggaatgcaagggtggaggctccaggtccctcatcccattttgtccttcattagtctactcatacctgtttcctaccagaggaccatgtctggagatgccttaaaccaaaaagagctatataaacaggcttcacatcagggtaatggatggacaggatttttgtggtccctgggaccagctatgataaaaaggggtccattggctgcagtcagcaagggagaagcgtccgttgacttgtcagtaaccctatgtcttgttatgagtaatgtccttcaaatatcctcccccttacgtccccaatatttaacgtcttgtttagacctttattacctcccacctaaactgtctttaaaatcgtagttcttgaaatggcattttaataggtcttcacctcctgcttcacggaacatctacacaagggtccagatctttcatcatagggatcagctccaataccatatctctctctgctccagcaccttcaatggctggctcccagcagacccctgaattgggtataaactcagcctggtactcaaggctctctacaatacggcgcccacctacctttcatggattagctcctaacactacctgtttagcaaatatgcaaatacgcaacaaatatgttcaacaagtaagcaacctcccaactccttgctcatgcagtgctcttggctcggaatgcccgttcttttctccctcattctccccaaatgaaaatctgcccatctgctactttctccacggatcgtcacatcgtagacaataagatcctgagggacaagagcaaagttgtttctagtacacctctcctccaaccccgaaccccggccactttgccctgcgcctggcatgcagggaggtgagctgacagcagtgacctcggctgagcctcagaactgggatccagaattccaaaacacctatgcatggaaggccacagacaaagctctcccgtccccggcccctccgcgacacccaggaaccccctcctgaacctcgcccacaccccagctcgcgcctccagccacatggtttggggtaacccgtcactcagccctctcaccgccgtgactctctggccctccgtctcgatggtttcaccgcgcctgcaccttggggaagctgcgttcggccccgccccgggtcctttcatctacttcccgccacacccacagagaagcccacgccactctaccccagagctctcgatggtgcttctccggcttcagggctggagtgggggtggagggcgggaaaaaccacagagacaaaacatagagtaccccggcagccggcaagaggaagagagagtggcttccacatccccaatatcctagaggcggctgagccggaggcggtcgcacaaagcgggccccgggggccgttccagccgcggccgaccatagagatgcggctcccgccggctctgggtctggaggtgagtgagcggctgcggggcggaactgggaagggaatgcgggtggagcgagctggaggcaaagtttttcgagccccgggatcagggtgggcctgggcgctgggaactctcggaaggaggtactgaagggagcacccagacgagctgggccccggcgctgcagtcgcgtcacggttctggaccccgcccgggtacctgctgctctcaggacaaaatcatgacgatgctccatcccaagccttccaggttacaaaccgcctttccagttcgctggctcttatgatccagctcctgcccgacgatgtggacactgtcatcacctccattttacagataggaaagctgaggcccagagaagcgaagcgactgtgtctgtccaagaccacgcggtgagtcagagccagaggcaggtgggaacctgggtcgctaggccggggcccgttgtttctccaggccttctctctgccttagtctgtcctttctcttcctcagccctcctgcccggaagataagcgtatttcttctctggtgcccacctgtctcctacctcaccctgccctcccgcaggtgaaggttcttaatcttgacggctcagcgtcctccttggctccccccggaggccatgtatggtcaagcttgaagattccccagaacagcgataatattcagtaagtggaggctgcagtttccagagaatccctctgaccacgggagtgcactttccagccaccttgtgaatccctgtgatctgttgttttgagtccatgggattctggaaatagggactatcagattgcaggatcttggtttttgtttgttttttttttgagacggagtttcgctcttgttgcccaagctggggtgcaatggtgcgatctcggctcactgcaacctccgcctcccgggttccagcgattctcctgcctcagcctcccgagtagctgggattacaggcgtgtgccaccacaccctgctgattttttgtatttttagtagaaacagggtttcacaatgttcgccaggctggtctcgaacttctgacctcaggtgatcggcccgccttggcctcccaaagtgctgggattacaggcctgagccaccgcgcccggcctggtttcttcttctttttttctttttgcatcttgtctgtgactcaatttcatgaagtgattcccatcattcttattaattactaattattcagcttaaactcattttagccatgtataacagggtatgcaattcaattgtcattcattcctcagttatgttcccatatttagtttgaggccatagtcagttaatgagtttgaaatttctccaaatgtgttacgttataggtgaggaaccactggttttgtacaagatacctagctttactccaatgcagctccatatctgtggttcttcactggaatcttcgattgtgggtgatttgtgttcgttgaagtgataatgtcagtatcacaaagtaatatcattgaagtgataatgtcaacaaattactaaaaaagctatacatctagggagagagactgacaggtaaacaacagtgcagtgtgacctcgtttctgatagggctgtgtacagagtgcccttaggacgccagaagagagaagataagagtttcgggaagccaggcccggcgcggtgcctcacgcctgtaatcccagcactttgggaggccgaggcaggtggatcacctgagttctg

SEQ ID NO: 2628 - DNA, 4001 bp, Homo sapiens
gctgcctgctccaggcacacagatggattacccagtcatggcagcccggagcaggggtggctgcatctgtgctgccacccccccaccccacaacctgaagtcttcccagcccccagccagctattcctggggctttaatccctcctcctcctcctcctcctcctcctcctcctccttccctggggtggggggttggggagctgggtctgggcaaacctggacttggctgagggcccttccttcaatgcacacccacccacctccttagccaggaaacacagggatgagcagtaggactctgagggaggtatggggaagctctaggcgcccccctctcccccatcccccagcaatcacgtggttgcatccttagggagcccgcgggtctcagaagcaaaagtcattgtttataaacagccaccaggcctggcaggggaaggccggcctgtccctgcgcctccacccggcggccgcgcagcgggtgggagagggggcaggcctggccgcggggcactggggggccaccctggcagaaacacagattctgcaatctcagatttcagagttggagtcgtcaggggaagtggcgtcagcagctggcgtgatccaattcaataaaccagaggtggcttgggatagacaactgaccgggtgcagacccccgcccctcaatctctgcatttcctgcacgctctgggcaccctgggaggccccggctccatcccccattccagctctccgcgaggaggggtcgggtttcctgtggcgccttccacgcgcctcctccaggccagctccccacccggccgtgggctcccaaagccagtgccgccacccgctccccggccgccggaaacgctaagcccctgctggggcgagggcacctccttgcggggtgcgtagccctgggctcccggtggggccgggctgggcgggagcttccaggccgcaggcacctctcgggaaaggaaacccaatccctccttcggcccacggagaacgaaagtggagaagcagtgggaaggaaggaactgtgggtgccggttcgagaagcagccttgggagtccgggggaatagtgtccccaggggcagagggacatactccctctcgccccgagcgccggcccagcctaggttgcctgcatgggcctggagagctgagggtcaccacctggcctcccagcctcccggcccttggcctccaaagcggggtagcctggagcgcgcgcctgagaagagcctggagcagggccggccactgctgtgcagccgagccacgaaggtgcaaagcggggccctgtcctgccccggccgggtgtggggagacagaggacgcaaacctaagagggcacccagagcgccggggaacgcagcctggggacctcgaagcccctcgaaagcgctcctctagaggtgacagcaccagatcctggcgaaggaccaggccccggggtcggaggatagggggacaggtggccggggctccgcggcggctgggactccgcggctgctggggctccggctcgctcaccttctcctgcgcgcgggtgagcttcttctgcacgttgctggcgatctttcccgccgtcacccctttactgcccatctctgccatcgcggcgcaggcctcgcccggtggcaggggccgctctcgcgcggggagatcttgcgcgccgcgctcccagcccccagccccggccgcgcgtccagaccggctgccgctccacgccgcgcacccgacagcggagccaactgacggaggcggagcgtgcgccggacgggcgagcgagccagcgagctagccagcgagcgacgcggggacagagggagggagaggggaggggccgggcctcaggccgcggtcggcgccccccgcccgccccctccggacaataagctgccttttaaagggccactccgggcgccggcaccgccaggtccgcgaggagggaggggcgcgcgcggcgctggggctgcggcgagcgggactcccctgacgctccagctgcaccgccccggggcggggactaatccgccggcctggcgtcttggtcttccccgcaagcagtaatctcctgcaacccaggaaaggagactaggtggaggagaggagtgctttcgaaatcaaagagaaagtgcggcgaagggggcgcggccctgaacagaggagccgcggctgctgggagaacgcgcccggagccccctccttttccaggggctcacctcccgcccggtgcccggtgcccggtgcccgacgctccgcctcctcccagccttcggccctcgggttttcgcccggataccctaggcgcctccgggacatctccacatctttgcctacggcgcctagcccagtaccaaccggtgcttggtcttcccgttcgctaaaaatttattataataacaacaacctagcattactgagtgcttactgtgtactaagtgacttgacaggcattatttcattcggtctccgtggccctagaggtaggtgctattactgttcctactttacaaccaacgcgccgggatcgaggaacgagatctctgcctctgtctcccaggtgctccaccaccatacgccgggttgtctcctacccccagcaggaaggaatgattagtgatcattattcctggagaagataaggttattgctaaccagctttgccaatagaccaatgacacttcttttaagttaataaatacgtattgagtctgctgatacccacccccattcagccctaaaacatgtcaggggctacagcactttgctgcccctggaaatttctaaagaactgttgattgagttgagcagagagataggtcccgctgaagaggcctagacgtgtctggtgcacacacaggagccagggctatggcctgcaggacccgcagcggtcagaggagcagagctggccagggacagaggtccctgagaggcttcctggaggaacaggaagggctcttgcagaccacaaaccaagcagtttgtacaaatggagaaatcgagtcccaggaatgagaggttcagcctgggttcacacaggccattccctcttccctggaaggccctcctgctctttctccggctactcggggttcttccaccaccgctcagtgctgccccatggcccagtgtgttcgtctgtcctcttccgggcctattatcatgatgtccctcggtatcccccaggggactggttccagcacatccgtggataccaaaatccagggatgctcaagtccctcatatgaattgacacagtatctgcatatagcgtacacaaatcctccaaaatactttaaattatctctagattcttgtaatagctaatacaatttaaatactatgtaaatagttgttaacgctgtattttttatttatttatttatttatttttagacagagtctcactctgtcgccagtctggggtgcagtggcgcaatctgggctcactgcaacctctgcctcccgggttcaagtgattctcctgcctcagccccccgagcagctgggactacaggcacgtgccaccatgcccagctaatttttgtatttttagtagagacggagtttcaccatgttggccaagatggtctccatctcctgacctcgtgatcctcccgccttggcctcccaaagtgctgggattataggtgtgagccaccgtgcccggccttgttttttatttatattattttattgttgtagtcttactttttattgtatttttccaaatattttcagtccacagttggttggatccatggatgcccaacccacagatgcagagggctgactgtattcttattctgcaggaagacagactgaggcgccgctgatgtaggtcacacagacagcaaatgataagcagagattctgcatcaagccttcctgcaccaatgccctcaaaagcaccaagcgctgcatgagtgaaaagcatctgtcaaaattattataaactcatgcccgatttgtgagtcacaaaagcaaaaccta

SEQ ID NO: 2629 - DNA, 4001 bp, Homo sapiens
gcatggtgttcactgtaattactcttcataccttttcatacttgaaatacttttaaatgacttttaaaaagaaagacatccaattaccaatgagcatctccctcttacacacagtgagaagccattatgtccaagttgcagtaactgttcactgctacatctgggccaccccatcatttacctaagccaagaaaagaaaaaattacaaacctacctcccaaaactttctcttagatatgttccaagtttatatcctgaaactatacataatccaattctttcacaactctcacatcaacaataattaacatgtctaatttcacgtttgcatccctaaattgccatttactcttacaaatgccttattactcacatagtaaacttttccttgttcgtctacgttaaaatacaagtgaattggttgaccacataactacttccacttggctaaacgcagacagttgtatacattacatctctatgcaggagtccgattcactcatacactaacttttcaatctaaacctacaacatccaaattaagccacccatcatttaaccacaaatgaaatgtcatctccgccaaatctaactcagccagggccattccaaaaccactccagtccgtccactgagcatacacctcacgcatctgaaagtcccgtccctggaccaaggtttacgccacccagaagtgctctcctccaatggtgagactcagacacaccttcaaatcctaattttcggctcgctgtgggaaaacaagtagagacagcctgaagttacaaacccaaaggaatctatttcatacaccacaggtcctgactttctcgtcactggggcgtagaagttggaagccccgagcaaggggaccaggtctagtcgtcttcggcgtccgcagagtcctacagtcgtcgaccaagcagttcaggcagctggcccgcctacttccctccccacccccaccacgacccaccccacccccaccccacccccacccccacgctgggcgcacagcccgcggtctgtcccccgcactgcgggacctgagaacagcagactgccggctcctctcccacaagggagggcttggttgccggctcagacgctccccgcccctcgcctccggccaccagcctctccgcccggggtcaacccttccagcctttcgctctcatctaaccggacgcaggaccgacagcctctccagggcctacccgggcctcgcttcctccggtgccaagctccaaggtctcctcacctctcgcggaggaccaagccagaccggacgctccaggcccgaaaggcaactcccctcccaccactccctgactcgccggtctttcctcccaactgcagccgctgaaaaagccaagtcctaaggtccccctccatcagcttccgggcctcccttcacggctgggcccgaacccccagccctgccctctcgccatctcgcttccccgagtcgcgaggccgagccccggggctggacggcttctttccccggcttcgcgcccgcccggcgtgcggaagactcaccactgagcgcggaggcctgcagtgtggcccccgaggtgccgtcgatgactttgatggtcccgcggctagtgacggccaggatggcgttgagcgcagggtggtaggacaggctgtgcagcccgtcggcgtcgcagtgcatgcagccgtcccgcagcaccagccactctgagaccccggccgcccccgcccccgccgccgaggagcagccggggcccgaggccgccgcagccgcagccgccatcttccggcctgcgctcagcacaatcacactgggaagcggctcagtgacagtcccgggaggtgcagcaccaccaccagtcaccatccggggccagggggcaagccgagcgcgttagccggaagtgaagtcaggcgcccgcacgcacgcggaacgtcgatcgcccggccggaggggccaaactcggagggaggctgacgggagagggggagaagcagggagggaggcggggcccggggcgcgggctggaggccggcgggtggagcatgcgcgggagggctcgcgcgtgccacgcgccgcgggtctggccagttccgcgtccgcagcgtcccagtttcttcctgtgagcctggggagtggcggctgccgagtccgccccgctcctcgcgggggcagggggaggggttggcctccgtgcatttccgctaggtggggacccccgcccttgcgacctgtccggtacgcccggaggccttttgcagcggttccagctgcgccttgaccgttcccggtacgcacggtgcagctgttcggccgtggccggaagcggacctctgggtctcggtcacggctctggtgtgagaataaacaatcagaagcctctcgtttggattggaaggaaccgagcgaccttcccaaacctgtaccttttaccacgcctgccctccccattcccaaggctttctgttgaacagaagtaccagatacgaggtgctggaagcgcatagttaagcttagtttctctatccacattccaaacaacccgagttaccggaattaataggagtgtgggtctgtgtgagtgtgtggtggggtgtgttggaggtctagaaaggactaatcaatttactaatcatccccccttggagaatttttttaaaactttttattttgaaatagattacagttgaaaatatactacagacctctgtggtctttctctccaaaagccataacccctatctaactatgagaaaaccatttgacaaacccaaactgtaggacattatttttataaaatacctaaacactactcaaagatagtacagagagatccaatttactctttacccagtttcccccaatggttgcatattacataattctagtacaatctcaaaaggagggatttgatagttgtatgatgtgtgtatagttcaatgtcattttatcacatgtagacctacgcaccatagtcaagatgcagagttgtatgttctatatgttttgtgatcattaggttattttggaaagaactagttttccttaaaaacctaatcaaagatctgttgtgaggattaagaatcatttgtaaaatgtgtagaagagcatctgacaagtatatactacgtgctcaataaaaattataaaagttaattgccctctcacattcatgcgaacttccttcaggaaatcttcatggattacctgaactacatcttaaactattagccatcaggctacatctgaaacacttagagatttgactgtattcctctcttcttgggggtccctaaaatacactgaagttcctgggcctgccagagagtgacattccttactcatctgtggttcttttttttttttttttttggcttttttgtttgtttttgtttgtttattgagacggagtctcactccgtcgcccaggctggagtgcagtggcgtgatctcagctcactacaacttctgcctcttggattcaagcaattctcggcctcagcctcctgaatagctgggattacaggcacctgccaccacgcctggctaatttttttttttttttttttttgtatttttagtagagatggggtttcaccatcttggccaggttggtattgaactcctgatctcgtgatccacctgcctcggcctcccaaagtgctgggattacaggtgtgagcccccgcgcccggccactcaggccactcacctgtaagtctgggaacaatcaggccagtttttcaaacgaagactttattggctccataaagtcaaccatagctccttaatgccatctggtcatgtttgaaaatatgacattccagtcaaaacctggttaatacaaccagtgcctccaattatgtcttgttacaggagaacacatttttatagaaattatgcaaataactatattgccataaaaataggaatacttggccgggtgcggtgactcatacctgtaatcctagcactttgactagcctggccaacatagtga

SEQ ID NO: 2630 - DNA, 4001 bp, Homo sapiens
acctggatcatccagatactctatgagagaagtgagaacggaaaacgtttctagttttccaggggatgcaaacaacattttctcacccacaccctgagccagacacttagggctcagtgctgagaagtattagggagggttcttacaggaggaagttgttcattttcaattcagactcacctccaaaagcaatctgtaatctcaacttgccatttccatgagaaagatattatgaattataaattttggcagccaactcaattttaaagggagataatatcttagggactaaggaatacctactcaacatttattccagtacctagaatattaagtaactcattagtagtcactaaagtttgatcagcacttcatagtaaatggagtgctttcttatctgtaacctcctttgagtcactcaactatgttatgtaggtattattactcccactttatagatgaggaaattgaggctctgaggcatcagctaattattcacaaccactaagccaactagctctcaaaatcccaaatcctgagctatttcttcactattacctttcttctttcaagaacatctggccaatattaacgggaagcttcttttatacctggttagtgactataaaagcataactggcaaaaattaaattagttcctttggaccttcagcttctactatagatatctagatatcaggggttttttttcctactaggaccatattaaccaaaaaacaaacaaacaaacaaacaaacaaaaacattaacttgctagctcattagatttagttaccaaatttaaagacctaagagaagaaaacacacttttcccaccaataattcaaagcttgtacgttgctctttataaagacggaaatgatgagctggatgattaatgggccatctacacttcctggaaactgtaaacagtgctttaaggatgtacatgacacatcaaacaacacagccttaggaagaatctttaaaatatatttccatcctgtttgaacatttcttaaataaggtcacaaaataaaaacttatcaaaagtttgaacaaaacacaaatcacaatttgatgttttttgactgtttttaccctttttattctaagtagaagttgagaaattttttagttaattaaaagcccatatggcaatcaaggcctatttggaaaatgacaaaggtacggcagtagaccaacattaattctttgtattacttggtgttcaaattaacattttttaaaaggacccaattatgatgtcaaattgatagatgttttgtggctttggattaaaagatgtttgtaagtatttttcgaggttcctgaaatgactatataattggtatagaacaaaatgtgccttgtttttgtgtatccatatgtatttaacatccttatatagatgtatttacccttacctatatcattcccatgcattgtaaatttacttattgtgtcttgaaaaaaatcctagcaaaatttcatcagcaaaaacttaccttcattcttgaaactcctaatgatgttggcagagggcatggaggtccgatctgttgcaaatttgttgtagagttccaacatgtactctggtgggtccaccttggctgaatcctgcgtggggatgtcagagaggtttagtgtcttaagaaactcatccttcatgctctggagcagtgtgttaaagtcgacaccgtcttgctctgagaaaacatcaccaaagagggacatatcttcttccagaggagactgctctaggttcatgatggggctgccagaaaccaagtaagctgccaggcagaaaagagcgcacagtgtcaggaccagagagcccatgactccgctcgagctcctaggccaagccaggaaggtttagcttccctgggctctaagtggcagttttatcttgtggaacgtaaatgtctcctgtcactggagacaagtttggaaactcttcctctctctctccctccccctaccactcttcctctccccctaaaagtcaggttgcagtaattggataacaaaatcccctataggggcctagcctttcttatctccctagtgtaaacttgtgcaccagaatttgtttctatcttgcaatccctatttcttttaatgagcattttgtaaacatttccacattctgacactggttgagagataggacaattttctctttgcaaaggctctgcttctcttcccttcaattcacttcctttcagcaggaatgcctaaattctgtttttatggggcttagtttcacacatgcatataataggtataagaatcaacataatgcacatcaatggtgatacatgttaatttgagaggtagggctcagataaacacttgtgaagacagaccaaatatccaaactttccaagtttaagttaatagctataaatgaattatataaatttttagaagtgtacctttttagaaacaggaaagtataaacttcatgattgacaggctttttcctacctatttgatctggctaaaatagcatttgaaaaatagggcaagtgcttagttatactggcaactagaatttattagatgcttcctacaaacaggcattgtactgagtgctttacacctatcatcaagtgtgctcctgtaataaccgtatcattatctccatcacatatatgggtcagtgaagtgccatagcttgccagaggccacaaagttgcaaagtgatggggccacaatttcaaccaaggcagcctgattcttatgaagaataaaacagtcacacttttaaaccactcttctaccagactagggcatgggcaataatgctgagaggccaacacgtccccagatcagcctggaggcaggaggcaggcagaaatttgtagctggatgtggacctcaggtcctccatctgtgcaatgagttgttaatataaccaacatctctgcgaaattcatccttctgactcaatcaaaattgtcatcaagaggctccagcaaaagcttggtgtgatggttaatacttactgtcaacttgattggattgcaggatgcaaagtattgatcccgggtgtgtctgtgagggtgttgccaaaggagattaacatttgaatcagtgggctgggaaaggtagacccacccttaatctagctaggcaccatctaatcagccgccagcacggttagaatataaagcaggcagaaaaacgtgaaaagacgagactggcctagactttcagcctatctttctcccatgctggatgcttcctgtccttgaatatgggactccaagttcttcagtcggggaacttggactggctctcctcgatccttagcttgcagacagcctattgtgggaccttgtgatcgtgtgagttaatacttaataaactcagaaatatatctccatcccctattagttctgtccctctagagaaccctgactaatacactcggcaaacaacattactaggcacacaaaaaacgccaaatgccttggtcctgaaaataaaaatggtagaatcgattgtgtgtccagattaggaaagacaaatcaggttcatcacattttccattctaactagtgacagtagcagccggggtgcagccagagaggccctgcggacaagcccaggggatgtttttcccactgaggtggtagttctggtatctttctgacgtgcacaccattactcacgcgtcctggtgctgtgttccaagggctgtgtcaagatatttggttcactggaatcctttctcagtttctaggttaaattttcctatattcatgctcatcgtttagctacaatgtctccacttaactttttctccaggctcacttaggtttctagtcatcttttgattctttttcctcctaaaatgtacaatgttacagccattttttaaattaccatagaaagaaccatattttgtttagtagttgttaattgtctatttgtttaatagttttgattttgattcaatgttcaattttgattcaaactttctattcccat

SEQ ID NO: 2631 - DNA, 4001 bp, Homo sapiens
tagaagataaggtctttttcctaaggtttctgagaactgaaatgaaaatatccaaaggaaaggatgactaccaccctttagactttagtgaaatgtcaaagaactttcggagtcaaatctcctagaagtctaatgtcaggtcaaagttgtctcgacagcaaagccaatagatagatgccagatgactaacagtaaagttatcaaaccgtataatacaatatatcaagaatctcacagttctggcttcctcaacatttattctattcattcggtaacatttctgaataatgaaaggaacatggattcccagagtgatctaaatttcaaaataaggttcaagtgtgtgttctctagttgatgttctttttactataagccaaaaccgcttctttataataataattttaaaaatctacaggtctgtttccagagatctcataataagcactgttcactggtgattaaaatattatttttaatcgttgcattacctcacagctaaaaatgtcaagataccacacccaatatgtctttttcaccccgtaaaggggggtggggtgggaatatggaagtggggataggaaaatacacaagaatattaaaggcgatttccctggaaggcatggggcaggcgcgcaggcaccgggtcgcagctccgctgcaccgcgatcggggggacgcatggcgaagggcaagcacaggcctcggcctctgcgggctccctccctcgccacccgcaggggcagtggccgggacgtgccggccggagctactcaccagccgcagtgctgaccagcaggatggtccatggtagccagggcacccgccagggccgctgcagcgaggaagtcatccctgggccagccaagaatcaggagggcaaagaaaagaaatatgggaagtagaccggcggagaaacagccgggaggctcgtcttctctcccgtggactgatcctgcccgtatcacaatacagtttgaaaggacaaatggctgatgagaggacctagctgcagagctttcatgccgctgcagaaattcccttcatttctctccctcgcggctgggggggttccttcgcctcggacggggtgccgcggccctccaaacggaaggcatgtctgtggggaaagcagggagccaagaagaaatcccccaaattatttccctcgtagtttcacgatatcaaaaaaatatccaggtctgggagaaaacatatccagggtgcggagggcggggattcgatccggggtcggggggcgagggtcagaactagttcccgactgccgggaaggacgaagccggacgggcggcggcggcgcccggcagccctagtcgcatcgcccgcggctccgggaaggcaggattccttaagtttcgcttcggtgcttccttcactctgatttcgaaaacaacaaatcctcttccttgactggatcaaaaaaggtgcctgcctccatggacaagctcacagtccccacgccttcgcagaacaaccgtgagagggttggggaggccctggcgaaggctgaggagaggtaggagcgggggaggggaggggtcgcggtcgcggccccggtccgggctccccgagacggcaggcggagtgggtgtgagaggctgccccttctagtcctcccggcggcgctcccttcccttcctcgctttttattcctgcggctcgatcttgcctgaggtaaattccaccaagaaagcctcctcttctcccgtcaatggctcctgtgagcgaatcacaaccccccgaggaagccgctgctgctgccgccgccgccgccgccgccgccgccgccgccgcctcgttctcccgcagctctgggctcctgacggaactcgggcgtcgcggaccgagggcggggggcggcgggagggcggatgaaggtagccggggaagggggtgggcagggaggcggcgagacaccctgcgtccctccgggaggcacttccagtggctccgagcagaccagacacaaaggggggagtcgccgcagctgccagtctgcggcgctcccggtcaccggagtcgccccgcctccgccgccgcctccgcctcctcctcagtctccggctcttcccggccctgtctgtctctagcctgtggtgcagagcgggcggcggcggcggcggcgccggcggcgggatgaagcccgcactgcgcctgcgcgctcacggccccgcccggccccgcccctcgttcggggctggctgagggctccgaggccccaccgcagcgcgtctctccggtgaatggccgagggctgggtggggctgcggtgggcagcggtggcctttctccttcacacacatacacatgccttccaaatgtgcatggcttgggattcgcgtatttgtttaagagacgacggccacatccttttgttcggcgttcagcagactcctccgagttccgggatttctcccgactgaggcgtctccgtctcagtactctcggaggaaagcctcgaggggcagaactgccctctgttgtttcacggggctggaacctccctctccgcagcccaaagaatccggatggacccgcctttcccagaaccggagaccttggcctcctcaggctcccctctgactcaaacaaaagccggaattggaaagaccacccctttgatgtgttcgctgtaatcgacgtcctgctttcctcaaccgcccattcccttagccttcttagttgacaggaatattgagtatttgcaaggatgcgaagccagaaaaaaaaaaaagacttttaattctataaatcgtcccgctgcgtgcgcgcgtctgtccgtacagcgcggtgcccaccccgagagagggcctggattcaccaaggctgggggccttgagggctttttagggcacgtgaaaggaaaatggagttagagttgtgtcgggatagagagtgggatcattttgcactcaaggaattgagaagatcccgttggtaccgcagtttccaaggatttgtgtagtgcgttttttggatctggtttgtacaagcgaccagtataggagacgggatccctcccgcccttacaccccgctgcggggtcagccgacgtgggtgggattttgctggcggcgaggggagaaggtgacgtgcgtggcgccatgatcggaagtctggactgaattcttagctgcgaggtggaaaatgcgcgtgggagggcgatcttgaggggtgaagtctggccttcccatctcctaccaggcaggagggttatgctgaaggctggttttgctggtctttcattgtggctaagggcagttccacagatacagtcatagatagactccttaagtcatgctctgcttgcttcttctagtccgctgttacctctttatctgaatttgatgtaaataaatctccacattccttaaactggttctgttatactaaacatcttccataattaggggttgtagcaataccaaccccggattctaagactctttttagttgaaatatgtttatgctgtttaccctttagacagagaaaaaaaaattctacctagtaaaatcccttaaaaagacgaagagcatatgctttgattcattagctttatttatttaggttttatttatttatttatttatttattgaggcggagtcttgctctgtcgaccaggctgcggtgcagtggcgcgatctcgactcactgcaacctccacctcccaggttcaagcaattctccggcctgaacctcccgagtagctgagattacaggcggcgccatcacgcccggctaatttttgtatttttagtggagacagggtttcaccatgtttgccaggctggtctcgaactcctgacctcacgtgatccgcccgtctcgacctcccaaagtgctgggattacagacgtgagccaccgcccccgaccgattctttatagctttattactgtattttgttttgcccaaaaggtctaaattagaaacggtattgttttaccatttgtctttcaagaactgagagtttctagc

SEQ ID NO: 2632 - DNA, 4001 bp, Homo sapiens
tcatggagccccaccaaccccctagctcccacccagagacctctccctccttctgaacttctcagatgggactccacctcctcctggaggctctgtgctggtccccatggattctgtctgcaccccacacacactcctgggcaggccaggtctacacagctttgctctctgggcccagcccaccacgtaagggcaggggccacctagagcccatgccagcgccagcctgagaggaggcagcgtgtcccctcacggggtcgtgccctccgactccaaccccctgcctggagagccaccgattcagtttcacctatgctgtcacctccccttcccgggctcagccacaggcgccccatgtgccctcttcgggcatcacataaacattcccaggtgacggccacagcccagctgtggtgaggggactggacagtcacagtggggctggtccctccctcttgggtccagaccttggagacggtgggggcagccagtggaccgtgtgtgaccccagaaccgagcacccccagatgtcctcacagcaccaacgaatactgaggttttggctacccagcccggtgggcgcagtttccaatgggggggcctcggaggcctcggaatccagagggcagcgggcgggatctcggccagtaacagcaagaatctgttttccaaaataaacatcgggacacgtgctcctacaaagggtttctgtgcccagctgagaacaagggtcactgtggaagcttagccacccactaatagattattctttctggagctttctattgtttatggccagcatgactgaaatctgggctgagcaggcagctgatgggggggcctgtggcgtgggaggcctgagagggcagatccgggagcacccgcctgggtggccctgtcccgagcgcctggccgtcccaggcagggggtgggcgcccctgggccggacccccatctcggcctcggagggaggctgcggcccagcaggggaggaggcgcagctggggatcccaccagggcgcactcacccaggcgcagcagcaccgcgcacacctcagccaggcgtcccgggaccggcgcggcacgctcgggcgcgctccaggagaggccggcgcgcagcagccgcgcgtgcacgtactcccggcccagcgccttggcctgggccaccagctccttgtctgtgggcgagcggtcaaaggcgtccatgatctcggcggcgaagaccgaggagcgccgcagcacctccatggcggcgacgcgggtggggggcgccgcacctgcgggcacaagcgctcagccgggtggagggaggcggcgcggggaacggggcgcgcggggcgccgggctgggcgtggccctcgggaagggccgtagccggcgccgggtccgctctcgttttttgtgccccaaatctttaaaaacccagcgccaccttctttcagagcccgaattcagctacagacattccccgaggctgccagggaccggtggggccgcggggagacggcggtttgctccggggccgccgggcccgccctcgaagacgagtgcgtgggcggcgggggcggagggcacagcccagcgcgtcccccacggcgactgccaggacccggccctccccgccccggcccggggccgcccacctccgccgctggcgtcctgcgcgcgtgtccccggcctcgccgttcccgtggcaccccgggcaccccggcacggacgccacgcccgccgcgctcacctctcccgccgcatggcgcgggcgccggggtggagttctggcttcaggatctgctcgccgccgacgacgacctcgacccttccattcagacccgcgaggacgcgcgccccgccccggcgcccgccccgtccacgcccgagccgggagcgccaggtccacggggcttcccgcgctcttggggggctcctgccgcggcgtcgggggcctgggcagcgaggtgggcagcgcgcgactcccagctggcgagaggctgggcttggggcttggccttctaagggaaaggcaaccctgggggcggagtcggggagacgctttccgagcttccccgcttaaggaggaccgagcgagttccctggatgcgcccggagaaggcgaccaggccggagcggcccccgcaaggcagagcagtggggacctagagccagccccagccgcctgggtgttccccggggtccatttgaaaattgggttgtcttcttcgttcgtagaggttctttccagagtctggagacgtgttcttggtccggacgcatgccctttgtattgtagatggattattggattcgcatttattgaagttattgcaaatatcttcctctattttgtggtttacttttgctttggatgaacaggagttactcttagtgatgtccaatttatcaatattttctttatggttagtacctttttattgggatatcctcctgtatttccttttagaagcttgttttagggctcatatttagatctatgattgattacatattaattattgtgaatggtgtggtacggggctagagctcattttttttcgtgtagatatccaattgacctggcatcatttattgaaaagcatcattttttttccaccgaattggaggagtccccaacatctcaacataaatcagctgaagagtgtgtgtgtgtgtgtgtgtgtgtctcggaactctatcccactggtttatttctttatccttgaatcaacctcacacagtttgaacaataggattaaccaacttggcctaattcacgtgtgtacaacactataaaatacttattcttcccatgtgcacataggatgtttatcgaaatagaccatatcatggaccttatacaagtctcagcaaatctcaacggattgaaatcttacagtgtgtcctctctgaattaaaagtcaataacagaaaaattactggaaaatctgcaaatgcttggaaattacatgtcacacttctaaataatcaatgggtcaataatcacagtggaagattaaaatatgttgacaagaacagtgaaaaataagacatatcaaatgctgtacagtgcaactaaaacactgcttagaggaaatttgatagctttagaagaaggattgaaaattaggccaggtgaaatgactcagacctgtaatcccagcattttgggaggcctaggtgggcagatcacctgagctcaggagtttgagaccagccgggtcaaaatggtgaaaaccccgtctctactagagatacaaaaaatgagttgggtgtggtggcaggtgtctgtaatcccagctactaaggaggctgaggcaggagaattgcttgaacctgggaggcgaaggttgcagtgagcagagatcatcccacctgcactccagcctggacaacagagtgtgattccatctcaaaaaaaaaaaaaaaaaaggaaaaagaaaaataaaattactgctctaagcttccactcaagaagctagaaaagaacaataaaactaaagatgaaaggaaataataaaaataagagcagaaattaatggaataaagcaaaaaatagagaaaatcaacaaagccaaaaattggttctttgaagagattaatagaactgataaatccccagaaagattgagtaagaaaaaagataacacaaatttcactatcaagaatgaaaaagaggacatcactgtagatactacaagcattaaagggataaaaagatagtatggaggactttttgacagtgcatttgaaattttagatgatacacaacttaccaaaactgacactaaaagaaatagaaaatctggatagtcctacaccaattaaatgcattgaatctgtaatttaaaatcttcccacaaagaaaattctaggttcagatggtttcattgagaaattcttctcaacagttaaaaaaataccaccagtctcatacaaacctgcacagagactaaaaatgagggagtatttcccaactcattttatgaggtcaatgtaattttaatacc

SEQ ID NO: 2633 - DNA, 4001 bp, Homo sapiens
aggagtatctgtaggttgtttaccattggcaacaacaccccttccccaatggctaccatgggggaacctgtgtttgtgtttcctttttttttttttttgagacagagttttgctctgttacccaggctggagtgcagtggcacaatctcagctcactgcaacttccacctcccgggttcaagcgattctcctgccccagcctcctgagtagctgggattccaggcacccaccaccacgctcggcaaatttttgtatttttagtagagatgaggtttcaccatgttggccaggctggtctcaaacccctgacctcaggtgatccacccacctcaacctcccaaaattctaggattacaggcatgagccaccacgcccggccaggggagcccatgtttctgatggaacacgtctcaacagttagtagtgaaggagcagaaaagcaggtcggcagtcacttggctgggctgagtgcatgctgaaaaggcagactgggaatggagtgtggcaggccttgaatgccaggctaaagattgtggactgtatgggacaggagatgggactccaggtgatagaacccaggctcatgggaccaaagtaacctgcaggaaacagtgccttctggagcgagtcaggagagatgcccaagtaagaggcattacaatgatggaagcaccgggcactggtccctgactagacgtggatgacaggttggaggacactagggccgttcatgggtgctggtgctgaaggtcccacccctctacccctcagtccttcctgatagctcagagcagggtcctgtgtcacagaatctcagagcacctcctttaaaatgagctgtgcactggctctctcaccactggtcttataggccaggaatgagtccggcagcatcccagagctgaccccagggcaggccctcagaggcacttggtgctggatgaatgaatgagcaggggaagaactagtcaattagggacagaaatgcaagacaggagaaaggtccagagtgtgattgtctgcctgctgtgtggagggacagaaactcgatgttgagaggctggacaggattgccaggagtgagggtggggtggagctgcttctgggggcagaatcttgagggtaaaggcagagagtaaccagatggcagacagaatcggcagctactaaggggtgagagaggtgagcgttgcagaatccttgggagaagcctttcatcttagcggatctgtgggcagcggcctttagtggaacaatcaactgacatccccagatgatcactgtccacgctgaaagtcaccgcagtggaagaacttctcttcatgcacagggcaggcaggttcagaaccaggggagaaggaaaatgaaagttaagagaaagaatggtatgagctgaagcaaaggatggttcagaaagggggagagattaggagagcgcgtgggaagtgccccctgcttgggttctgctccggtagtgtgggatttggaggaggatcaaggtcagaggcccagtcgaccttcccaaggccccggccccgctgcagtccctcgcacccacgccttgactctgggctatgactcctgtcttctgctcggtaaaccaatcctttttttttcctgtgcccgcagtattatgactgttcatgtgtctgtccgcctgacctccaacctccacccagctcgggagctcccctagagcgcgccagagcttgaaatttcgaatgccgttgtcgctgagtgaatgaatgaatgaaagaatgaatgagagaaaggaagaggagccccccattgccagtgccgcgcgcgccctccgggagccagtcctcaagccccgacagccgccggccccgcggtccctccgcagctcccgtcccggggagagcagccccgaccctgcccacgctcaccccgcggatcccgcggaggagaggcgctgccgcggccgggctccatgcagccatgcccggccgacgtgacccgccgcccgaggtcactgtatgcccgaaagacgcggagcgggggaccgagagccgccgccgtgggagaggccgccccctgccgcccggaggccgtcagcctcccggccccgccccggaggcctccggtcgcctggctccggccccaccccgccatcccctggccctggctgactcgccacccccgacactgcagcgcctgccgacctcggggccccgccctctgccttcgctcgcgccgctctccttcagtctccccagggcctgtttcatggatagggtccccttgcccgcgtgaaagtctcattcctcctcagctcagaaacactccaaggtctcggcgccctatactggccttccctcatccgaatacccctcgtgctcctgatgtacttttccattcccactccctactctggcagtctagcttctaagctgaggagtttggccttcgctccaggtgcggggactcgtggaaggatttgattcgcgcttgagaaagatcgctccgctcctgtaaggaagagagcgtgtaggggctgcaaccagagacacagtcagaagctccgaggctaccgcgatggtccaggtgagaatggaggggcctaactaaaccagtggcgggagggatggaagaatgaactgagacacttgggaggtgaatggaatcgagcgactgcatgtggaggtgtgagtgggaaggtatctgagatgactccagtttctggcttggacaatgacttggatggagggttaggtgggggctgagcagagtccacgaacagttcttaatttgcctgagtttaaggtgccacaggacacagcctaacagaggcccaggttggagccatggaccatggagtcatgagaatggaagggaagctgacgccatgtgggatggggtagaactgtccgcaaattcgtcccgcctctggagtcttcagaccagtcaaggccgaaattcaaccaagcctctcctctctctagctgttatttgtttgcagcacgcggtctggtggcaccctgcaggatttaccagctttttgccaacattctggcctatgcaatcaatacgtcccttcagcgttgcacttggatggattggacctatagttgttatatatggatattgtctaatttatttattacagtattaactgactcctatgttctggccttcagaatttctcctttggatcaattactagcctgtcttacattttctgcttcattcttttaaaatgtttagagatgatttgctaagttttcttcattgctgtcaatgatgcaatttaaactgtcaaaaaaattttttctcaagcagggtagtaatggtgaaccattcccttgctattcagacagcatggtttagatgaggcgcacctatccccagctttaggaatggaaacaggacccaagtctggctaatcagagactggtttagggtcggccccatggtctgagccagaccaatgagaattggtagagggacttccttttgcaacttctattttagaatcgggggtatatatgcaggcttgttacagaggtatattgcatggtgctgaggtttggagtatgaacgaatccgtccttcaggtaatgagcatagtacccaataggtagtttcaacccttgcccccttcctccttccccagtcttgtattccccagtgtctgttgttcccagacattgatctttttcctctatgttgctaagctggtagaaaggctggagttgctggcaaccatctttgcaaccatgcagggagaactactttggaaatgaagcaagataaagaagaaaacagataaaaggagacaaatgtttgactttgtacagctggaaaccagcaatgctggaaatgagcactgaaggcagtttaatgggtttgtcacttgtaaccaagtgacccatggcaagctcacagatttgtattggcagaattcctccttttctttatttaaaatggtacttttggccaggcaaggtggttcacacctgtaatccaaagactttgggag

SEQ ID NO: 2634 - DNA, 4001 bp, Homo sapiens
atttcttcaggagagacctgctcatgatatgccaaataggctgaaggctaaagaatacagtataacagcagtctaatacatatatatatatatatatatatatatatatatatatatatatatatatatatatatatttgagacagtcttgctctgtcgccaggctggagtgcagtggcgtgatttcggctcactgcaacctccgcctccctggttcaagagattctcctgcctcagcctcctgagtagctgagactacaggtgcgcaccaccacgcccagctaatttttttgtattagtagagatgggttttcaccattttggccaggatggtctcgatctcctgacctcgtgatccgcccaccttggcctcccaaagtgctgggattacaggcgggagccatcgcgccaggcctacaaaatattttaatgttagcaatagcaaggctcaggtggaggcaacatctaagttcattataaacaattagcgatgcattgagttaaacaacaaagaaagcctgaaattccactagcaataattccgcatgtgttacggaaacacctagatggggactgttgccgggtttgaaggctcctccgtttgctaaaacttccagcactagagagtttattaaactactcctccaaagcaatgtgccctcactggcccctccccttgagaatcaacctcgagatctagcatctattttgcaaacgaagacagcaggaacgggcgggctaaccgtcgcagtcactgcctcggcgctcctccccctccaaggccagcaagttgcggcactgggggaaatggccgcggcgacaacttcctcgagttctctcgggtcatcgtgaacttgggcaccgaaacgaggatccaccccctccccaccaaagtgcgggagggaaaagaaggctagccagcgagaaattttgccccacaaatccgccagcagcagtggcgggaagcctcaacggcagcgaccccgccgctggcctcgtgcgcagctggtccccaccctcgcgcggcgctccctgattggctgctggcggcgggacggggcggggcgggatggcacgttgccgctgcgcctcgggcctgtgcgggcagtcctccttcacttccccaagtccaccctgactggcttgggtgcacagccagggctagagtgtccgggtcccgcctgggccacaggcgggccctgccaggtctctcagaccttccggtcctcgctgaccagtcggggagtggaggcgtcgaccgccctggcaactcctcgccttgggcggctgggtcgagttcggccgcagggagcgtcaaagacgctgcctagcccaatttcggcgggaaagcggtttacctgctcggacttcgctgggtgcctggcagcccgccgcctcccgaaacatccacgcctgaggtcccctggcccgtctacacccagtccaggccccgtggcggcgcctttctgacccccatgacacagccagacgaggtctgcgggcgggtggctcctggcagcggtcgatggggcacctggccacgtttcttcccaaccagatagcgagcgtttggggccttcacctcgcccctccaagccctcagggacaggctccacgctgctccttctccccgctatcccgcgccctggggccctgatcgccgtactcaccggcccggactcggtttccatcttcctctctgctcttcagagacgcggggtagggaaaagaagcctaaagtttgaaaccaccttcacgccaaggcagcagcgctgcttgtcctgcctgggactctcgccccctggcggcgagggtggctgtggcagctgcagggaagcaggctcggaccccggccctgaacctgccacctggcgggtggggagaagcggactgcgtcgcctcgggtggcaggtggcggtgcgggcgggcgctgcaagccggagaggggcgcgggagggcgagtttcggctgtggccctgggactccgagccggggcgtctcaggggcagagcgcacggcacagcggggcgggcgtggggcgtgcggagcgagggctcggttctgggacccctctcgccttctctcagacggctggggaggagagagcgagcggtcaggcaaagctccatgcacgccttcccctctcctccacttgagaagagtcggcctctgggactggtgggtttcgagaggttgaggtgaccttaaggctttactgaggtagaagaagccggttgacgggcgacttccgaagactggtgtaaagcgaagaaggttctagagtcaaactctgactctcggggcctgactcgcaaaactcgggggctcccgagaagccgcggacgccgctctgcacctgttgccgccgtcactcatcccgccaggcgggcggggccgcgcgggtggcttggtcaggacctgccattcagcccagtcgggctccggtgctcgccccggacggcgccccaagcgggtcccggccccgctgagcacctccagcagtggcacagcctctggaggggtccgggacgaagccacccgcgcggtagggggcgacttagcggtttcagcctccaacagccttgggatcgcctttggaagaagattgcgctttttttcttaaattaatgaattaatttactaattatttttatttttgagacggagtctcgcactgtcgcccgggctggagtgcagtggcgcgatctcggctcactgcaacctccgccttccggattcaagcgattctccttgtctcagcctcccgagtagctgggattacaggcgcccgctaccacggctaatttttgtatttttagtagagacggggtttcaccatgttggccaggcttgaacttctgacttcaagtgagctgcctgtcttggccgctcaaattgttgggattacaggcttgagccaccgtgcccgtccagttgactaattatttagacacgaaggctcactctgtcgcccaggctggagtgcagtggtgcgatcacgctcactgaattctcgacctcctgggctcaagcgatcctcccacctcagccttctgagtagctgggaccacaggcaggcccacgccaccatgcctggctgaaagaagactgctttgtaaataatacgtatttctagtaggtagctaaaatgattacaactggataaacttatagtaatgattatcattattatagctgccatttatcaagtactcactttgtttcaggcacaatgctttatgatcagtatcatttaatcttttcatgctcacagcaacctttcagatagatgctccaattatcgtcatagtacgtgatgaagcagagatttgaaggataagtaatttggtcaagatctaaagctgtaggaggtttaaccctcgtctcccccccaacccacagttcttgatcataaccattttgccacatatttttaaagaatcagcagtaacaactgttaaaatttacaccagtaataactattgtacacactactataaaagtttgactttgggttactttgccttcaagatatagaattaaaaacagagtgaatatattaatttttgatttattcaaagattagctcttcatattattttacccaaaataaaatgggaaacaatttttgtttatcttacccgaagaatccctaaagtcattatacatttctgcatgcaatttaagctcattttaccaggtttcagtctctgtggaaatcgagaatacaaacctatttagatgaaaactcatattctaaagcataataatcttactgttcaataccagtagaactaatcttctttgggcatttttttttcctaggactgttgctggatttgggtagatgttactatcctctcttgcccaaaacattttgactaaaaacacttattttcaagaactacattctcttaaaaaatgtattcagcgcagtaggtgtttaatctgacaaaaatttacgtaatttagggaacgctaactgtatttcaaggctggtg

SEQ ID NO: 2635 - DNA, 4001 bp, Homo sapiens
aaaacccaagacttgagaatcacattgaagagaaaccaattcaagaactggtgaattattttccatctggaaacactaaacacacttctgagacaaaccccataatatcctaaagacaaaccccataatatcctaaatgtgtgcttcaaaaaacttgaagtaaactgggtgttgtggcttgtgcctgtaatcccagctgcttgggaggctgaggcaggaggattgcttgagatcaggagttcgagaccagcctgggcaacaaagaaagaccccatctcaaaaagaaagaaaaagaaaataacaaaagcttgaagttcataattccaattctctgagaaacaaactcatgaaaatgaatctccagctcaggtaataaagttgttctttttcaaatttgttctgctctttcttctctggccaatacaatcacaatccctaaattaatctttgcaagatgtacagagaaatgactagggcaggagtggcaattgggctataggctggaccttatgggctctcttccccatccagccttaaggaagtatgtactcctaataagggaatatgtaaatacttcttttaaaacacagaaaagccaccacatttaataattactatgttgtagtttccaatgaaagaaactgggaatctaatcttaacagctttctctctgggcacttggaggttatttgtgacttcagtcacttcgctcagtaggatataatgctcagaatgggtaattctggaatgcttagtatttttcaactatggattttgtattgctagagataatataacagctctagtagatgtaatcttgtctttctgcccatttgtttacagtgtcaaaattacctatttgctaaatttaaaaaatcattcttcatgaaattctcttattgaaaataagatgtactaatatgttcgcaagtttaagtaaaagacaaaccccattatatttcattgagagaaggatgaaatgaacggaagtaaacagtgctttatttccaatctcgagaaactaaaggatactccctgagaaaagaaaaacaacctttcacactcaattcacttcattctcctccactctctaaggctctattgtgggctcgctctgcttaagttttctccctcatcattttctaacatacgatatagtttacttagtatgtttattatctgtctccactattatgtaatgcaccagggcagaagttttgcttttttcatggcagcatctaaagtactgacagtacacagcaggtgctcaataaatatctgttgaatgactaaaagtgaatcatttcttcaggagagacctgctcatgatatgccaaataggctgaaggctaaagaatacagtataacagcagtctaatacatatatatatatatatatatatatatatatatatatatatatatatatatatatatatttgagacagtcttgctctgtcgccaggctggagtgcagtggcgtgatttcggctcactgcaacctccgcctccctggttcaagagattctcctgcctcagcctcctgagtagctgagactacaggtgcgcaccaccacgcccagctaatttttttgtattagtagagatgggttttcaccattttggccaggatggtctcgatctcctgacctcgtgatccgcccaccttggcctcccaaagtgctgggattacaggcgggagccatcgcgccaggcctacaaaatattttaatgttagcaatagcaaggctcaggtggaggcaacatctaagttcattataaacaattagcgatgcattgagttaaacaacaaagaaagcctgaaattccactagcaataattccgcatgtgttacggaaacacctagatggggactgttgccgggtttgaaggctcctccgtttgctaaaacttccagcactagagagtttattaaactactcctccaaagcaatgtgccctcactggcccctccccttgagaatcaacctcgagatctagcatctattttgcaaacgaagacagcaggaacgggcgggctaaccgtcgcagtcactgcctcggcgctcctccccctccaaggccagcaagttgcggcactgggggaaatggccgcggcgacaacttcctcgagttctctcgggtcatcgtgaacttgggcaccgaaacgaggatccaccccctccccaccaaagtgcgggagggaaaagaaggctagccagcgagaaattttgccccacaaatccgccagcagcagtggcgggaagcctcaacggcagcgaccccgccgctggcctcgtgcgcagctggtccccaccctcgcgcggcgctccctgattggctgctggcggcgggacggggcggggcgggatggcacgttgccgctgcgcctcgggcctgtgcgggcagtcctccttcacttccccaagtccaccctgactggcttgggtgcacagccagggctagagtgtccgggtcccgcctgggccacaggcgggccctgccaggtctctcagaccttccggtcctcgctgaccagtcggggagtggaggcgtcgaccgccctggcaactcctcgccttgggcggctgggtcgagttcggccgcagggagcgtcaaagacgctgcctagcccaatttcggcgggaaagcggtttacctgctcggacttcgctgggtgcctggcagcccgccgcctcccgaaacatccacgcctgaggtcccctggcccgtctacacccagtccaggccccgtggcggcgcctttctgacccccatgacacagccagacgaggtctgcgggcgggtggctcctggcagcggtcgatggggcacctggccacgtttcttcccaaccagatagcgagcgtttggggccttcacctcgcccctccaagccctcagggacaggctccacgctgctccttctccccgctatcccgcgccctggggccctgatcgccgtactcaccggcccggactcggtttccatcttcctctctgctcttcagagacgcggggtagggaaaagaagcctaaagtttgaaaccaccttcacgccaaggcagcagcgctgcttgtcctgcctgggactctcgccccctggcggcgagggtggctgtggcagctgcagggaagcaggctcggaccccggccctgaacctgccacctggcgggtggggagaagcggactgcgtcgcctcgggtggcaggtggcggtgcgggcgggcgctgcaagccggagaggggcgcgggagggcgagtttcggctgtggccctgggactccgagccggggcgtctcaggggcagagcgcacggcacagcggggcgggcgtggggcgtgcggagcgagggctcggttctgggacccctctcgccttctctcagacggctggggaggagagagcgagcggtcaggcaaagctccatgcacgccttcccctctcctccacttgagaagagtcggcctctgggactggtgggtttcgagaggttgaggtgaccttaaggctttactgaggtagaagaagccggttgacgggcgacttccgaagactggtgtaaagcgaagaaggttctagagtcaaactctgactctcggggcctgactcgcaaaactcgggggctcccgagaagccgcggacgccgctctgcacctgttgccgccgtcactcatcccgccaggcgggcggggccgcgcgggtggcttggtcaggacctgccattcagcccagtcgggctccggtgctcgccccggacggcgccccaagcgggtcccggccccgctgagcacctccagcagtggcacagcctctggaggggtccgggacgaagccacccgcgcggtagggggcgacttagcggtttcagcctccaacagccttgggatcgcctttggaagaagattgcgctttttttcttaaattaatgaattaatttactaattatttttatttttgagacggagtctcgcactgtcgcccgggctggagtgcagtg

SEQ ID NO: 2636 - DNA, 4001 bp, Homo sapiens
aaactcatgaaaatgaatctccagctcaggtaataaagttgttctttttcaaatttgttctgctctttcttctctggccaatacaatcacaatccctaaattaatctttgcaagatgtacagagaaatgactagggcaggagtggcaattgggctataggctggaccttatgggctctcttccccatccagccttaaggaagtatgtactcctaataagggaatatgtaaatacttcttttaaaacacagaaaagccaccacatttaataattactatgttgtagtttccaatgaaagaaactgggaatctaatcttaacagctttctctctgggcacttggaggttatttgtgacttcagtcacttcgctcagtaggatataatgctcagaatgggtaattctggaatgcttagtatttttcaactatggattttgtattgctagagataatataacagctctagtagatgtaatcttgtctttctgcccatttgtttacagtgtcaaaattacctatttgctaaatttaaaaaatcattcttcatgaaattctcttattgaaaataagatgtactaatatgttcgcaagtttaagtaaaagacaaaccccattatatttcattgagagaaggatgaaatgaacggaagtaaacagtgctttatttccaatctcgagaaactaaaggatactccctgagaaaagaaaaacaacctttcacactcaattcacttcattctcctccactctctaaggctctattgtgggctcgctctgcttaagttttctccctcatcattttctaacatacgatatagtttacttagtatgtttattatctgtctccactattatgtaatgcaccagggcagaagttttgcttttttcatggcagcatctaaagtactgacagtacacagcaggtgctcaataaatatctgttgaatgactaaaagtgaatcatttcttcaggagagacctgctcatgatatgccaaataggctgaaggctaaagaatacagtataacagcagtctaatacatatatatatatatatatatatatatatatatatatatatatatatatatatatatatttgagacagtcttgctctgtcgccaggctggagtgcagtggcgtgatttcggctcactgcaacctccgcctccctggttcaagagattctcctgcctcagcctcctgagtagctgagactacaggtgcgcaccaccacgcccagctaatttttttgtattagtagagatgggttttcaccattttggccaggatggtctcgatctcctgacctcgtgatccgcccaccttggcctcccaaagtgctgggattacaggcgggagccatcgcgccaggcctacaaaatattttaatgttagcaatagcaaggctcaggtggaggcaacatctaagttcattataaacaattagcgatgcattgagttaaacaacaaagaaagcctgaaattccactagcaataattccgcatgtgttacggaaacacctagatggggactgttgccgggtttgaaggctcctccgtttgctaaaacttccagcactagagagtttattaaactactcctccaaagcaatgtgccctcactggcccctccccttgagaatcaacctcgagatctagcatctattttgcaaacgaagacagcaggaacgggcgggctaaccgtcgcagtcactgcctcggcgctcctccccctccaaggccagcaagttgcggcactgggggaaatggccgcggcgacaacttcctcgagttctctcgggtcatcgtgaacttgggcaccgaaacgaggatccaccccctccccaccaaagtgcgggagggaaaagaaggctagccagcgagaaattttgccccacaaatccgccagcagcagtggcgggaagcctcaacggcagcgaccccgccgctggcctcgtgcgcagctggtccccaccctcgcgcggcgctccctgattggctgctggcggcgggacggggcggggcgggatggcacgttgccgctgcgcctcgggcctgtgcgggcagtcctccttcacttccccaagtccaccctgactggcttgggtgcacagccagggctagagtgtccgggtcccgcctgggccacaggcgggccctgccaggtctctcagaccttccggtcctcgctgaccagtcggggagtggaggcgtcgaccgccctggcaactcctcgccttgggcggctgggtcgagttcggccgcagggagcgtcaaagacgctgcctagcccaatttcggcgggaaagcggtttacctgctcggacttcgctgggtgcctggcagcccgccgcctcccgaaacatccacgcctgaggtcccctggcccgtctacacccagtccaggccccgtggcggcgcctttctgacccccatgacacagccagacgaggtctgcgggcgggtggctcctggcagcggtcgatggggcacctggccacgtttcttcccaaccagatagcgagcgtttggggccttcacctcgcccctccaagccctcagggacaggctccacgctgctccttctccccgctatcccgcgccctggggccctgatcgccgtactcaccggcccggactcggtttccatcttcctctctgctcttcagagacgcggggtagggaaaagaagcctaaagtttgaaaccaccttcacgccaaggcagcagcgctgcttgtcctgcctgggactctcgccccctggcggcgagggtggctgtggcagctgcagggaagcaggctcggaccccggccctgaacctgccacctggcgggtggggagaagcggactgcgtcgcctcgggtggcaggtggcggtgcgggcgggcgctgcaagccggagaggggcgcgggagggcgagtttcggctgtggccctgggactccgagccggggcgtctcaggggcagagcgcacggcacagcggggcgggcgtggggcgtgcggagcgagggctcggttctgggacccctctcgccttctctcagacggctggggaggagagagcgagcggtcaggcaaagctccatgcacgccttcccctctcctccacttgagaagagtcggcctctgggactggtgggtttcgagaggttgaggtgaccttaaggctttactgaggtagaagaagccggttgacgggcgacttccgaagactggtgtaaagcgaagaaggttctagagtcaaactctgactctcggggcctgactcgcaaaactcgggggctcccgagaagccgcggacgccgctctgcacctgttgccgccgtcactcatcccgccaggcgggcggggccgcgcgggtggcttggtcaggacctgccattcagcccagtcgggctccggtgctcgccccggacggcgccccaagcgggtcccggccccgctgagcacctccagcagtggcacagcctctggaggggtccgggacgaagccacccgcgcggtagggggcgacttagcggtttcagcctccaacagccttgggatcgcctttggaagaagattgcgctttttttcttaaattaatgaattaatttactaattatttttatttttgagacggagtctcgcactgtcgcccgggctggagtgcagtggcgcgatctcggctcactgcaacctccgccttccggattcaagcgattctccttgtctcagcctcccgagtagctgggattacaggcgcccgctaccacggctaatttttgtatttttagtagagacggggtttcaccatgttggccaggcttgaacttctgacttcaagtgagctgcctgtcttggccgctcaaattgttgggattacaggcttgagccaccgtgcccgtccagttgactaattatttagacacgaaggctcactctgtcgcccaggctggagtgcagtggtgcgatcacgctcactgaattctcgacctcctgggctcaagcgatcct

SEQ ID NO: 2637 - DNA, 4001 bp, Homo sapiens
cagggcagaagttttgcttttttcatggcagcatctaaagtactgacagtacacagcaggtgctcaataaatatctgttgaatgactaaaagtgaatcatttcttcaggagagacctgctcatgatatgccaaataggctgaaggctaaagaatacagtataacagcagtctaatacatatatatatatatatatatatatatatatatatatatatatatatatatatatatatttgagacagtcttgctctgtcgccaggctggagtgcagtggcgtgatttcggctcactgcaacctccgcctccctggttcaagagattctcctgcctcagcctcctgagtagctgagactacaggtgcgcaccaccacgcccagctaatttttttgtattagtagagatgggttttcaccattttggccaggatggtctcgatctcctgacctcgtgatccgcccaccttggcctcccaaagtgctgggattacaggcgggagccatcgcgccaggcctacaaaatattttaatgttagcaatagcaaggctcaggtggaggcaacatctaagttcattataaacaattagcgatgcattgagttaaacaacaaagaaagcctgaaattccactagcaataattccgcatgtgttacggaaacacctagatggggactgttgccgggtttgaaggctcctccgtttgctaaaacttccagcactagagagtttattaaactactcctccaaagcaatgtgccctcactggcccctccccttgagaatcaacctcgagatctagcatctattttgcaaacgaagacagcaggaacgggcgggctaaccgtcgcagtcactgcctcggcgctcctccccctccaaggccagcaagttgcggcactgggggaaatggccgcggcgacaacttcctcgagttctctcgggtcatcgtgaacttgggcaccgaaacgaggatccaccccctccccaccaaagtgcgggagggaaaagaaggctagccagcgagaaattttgccccacaaatccgccagcagcagtggcgggaagcctcaacggcagcgaccccgccgctggcctcgtgcgcagctggtccccaccctcgcgcggcgctccctgattggctgctggcggcgggacggggcggggcgggatggcacgttgccgctgcgcctcgggcctgtgcgggcagtcctccttcacttccccaagtccaccctgactggcttgggtgcacagccagggctagagtgtccgggtcccgcctgggccacaggcgggccctgccaggtctctcagaccttccggtcctcgctgaccagtcggggagtggaggcgtcgaccgccctggcaactcctcgccttgggcggctgggtcgagttcggccgcagggagcgtcaaagacgctgcctagcccaatttcggcgggaaagcggtttacctgctcggacttcgctgggtgcctggcagcccgccgcctcccgaaacatccacgcctgaggtcccctggcccgtctacacccagtccaggccccgtggcggcgcctttctgacccccatgacacagccagacgaggtctgcgggcgggtggctcctggcagcggtcgatggggcacctggccacgtttcttcccaaccagatagcgagcgtttggggccttcacctcgcccctccaagccctcagggacaggctccacgctgctccttctccccgctatcccgcgccctggggccctgatcgccgtactcaccggcccggactcggtttccatcttcctctctgctcttcagagacgcggggtagggaaaagaagcctaaagtttgaaaccaccttcacgccaaggcagcagcgctgcttgtcctgcctgggactctcgccccctggcggcgagggtggctgtggcagctgcagggaagcaggctcggaccccggccctgaacctgccacctggcgggtggggagaagcggactgcgtcgcctcgggtggcaggtggcggtgcgggcgggcgctgcaagccggagaggggcgcgggagggcgagtttcggctgtggccctgggactccgagccggggcgtctcaggggcagagcgcacggcacagcggggcgggcgtggggcgtgcggagcgagggctcggttctgggacccctctcgccttctctcagacggctggggaggagagagcgagcggtcaggcaaagctccatgcacgccttcccctctcctccacttgagaagagtcggcctctgggactggtgggtttcgagaggttgaggtgaccttaaggctttactgaggtagaagaagccggttgacgggcgacttccgaagactggtgtaaagcgaagaaggttctagagtcaaactctgactctcggggcctgactcgcaaaactcgggggctcccgagaagccgcggacgccgctctgcacctgttgccgccgtcactcatcccgccaggcgggcggggccgcgcgggtggcttggtcaggacctgccattcagcccagtcgggctccggtgctcgccccggacggcgccccaagcgggtcccggccccgctgagcacctccagcagtggcacagcctctggaggggtccgggacgaagccacccgcgcggtagggggcgacttagcggtttcagcctccaacagccttgggatcgcctttggaagaagattgcgctttttttcttaaattaatgaattaatttactaattatttttatttttgagacggagtctcgcactgtcgcccgggctggagtgcagtggcgcgatctcggctcactgcaacctccgccttccggattcaagcgattctccttgtctcagcctcccgagtagctgggattacaggcgcccgctaccacggctaatttttgtatttttagtagagacggggtttcaccatgttggccaggcttgaacttctgacttcaagtgagctgcctgtcttggccgctcaaattgttgggattacaggcttgagccaccgtgcccgtccagttgactaattatttagacacgaaggctcactctgtcgcccaggctggagtgcagtggtgcgatcacgctcactgaattctcgacctcctgggctcaagcgatcctcccacctcagccttctgagtagctgggaccacaggcaggcccacgccaccatgcctggctgaaagaagactgctttgtaaataatacgtatttctagtaggtagctaaaatgattacaactggataaacttatagtaatgattatcattattatagctgccatttatcaagtactcactttgtttcaggcacaatgctttatgatcagtatcatttaatcttttcatgctcacagcaacctttcagatagatgctccaattatcgtcatagtacgtgatgaagcagagatttgaaggataagtaatttggtcaagatctaaagctgtaggaggtttaaccctcgtctcccccccaacccacagttcttgatcataaccattttgccacatatttttaaagaatcagcagtaacaactgttaaaatttacaccagtaataactattgtacacactactataaaagtttgactttgggttactttgccttcaagatatagaattaaaaacagagtgaatatattaatttttgatttattcaaagattagctcttcatattattttacccaaaataaaatgggaaacaatttttgtttatcttacccgaagaatccctaaagtcattatacatttctgcatgcaatttaagctcattttaccaggtttcagtctctgtggaaatcgagaatacaaacctatttagatgaaaactcatattctaaagcataataatcttactgttcaataccagtagaactaatcttctttgggcatttttttttcctaggactgttgctggatttgggtagatgttactatcctctcttgcccaaaacattttgactaaaaacacttattttcaaga

SEQ ID NO: 2638 - DNA, 4001 bp, Homo sapiens
gattctgaacagtatactaatccacatcataattttgaagcctatttttttctattcgccaacatttccaccttcatgtctatgtcacaattcttgaagggatgcttatcaaagtcatatgctaagtacaaatatacctatcttataaaaaagcaaaagggtctcacctatattaccgaattgttcttctgtgtttttccccacagtacccattattactttatctcttgcttctacaaaagaaggaaacagaaccaacacattctagacacctatctacccattatcaggcattatattactcatctctatctgtaatttcatttacatttccccaactctgttccctgagaacaataattgttcccatttgacaagtggaagctaaagaaacttgacaaatagaaaattaaagctcagcaaaataaaataacttgttgaatgttggaagctggaggatcagaatccaaatccggattctccaagtccactatacccatctttctctcaaataaacattgataacttctatcaccaaagagaaaagcatcaaggtgattttgtaaagcgtatatcttataaaatgtgaacagacaaaaagtaaaaatttaaacaaatgattgctttaccactaaaaacaaactggactattgctgacctactgctgaacctggtctgagtgattcactagtcaaatgttaaagggaacagccttgctctagaagccaaaccatactaagtgacaacaatacattctaattcagcaacggtcgtgactttaggatgacacctgagggaatgaattctatttccagggcagccataatactatgttttaacagtgcaaggtttcacgcagtattaaaatctatttcaaccatgaggaggtgtgacttctctaaaaaaaaagggcggggggtggggagtggaacacaatgactccaaaatcagaagtcacttagccaaaaacactggtcctttggtgcagtgaaccgggtacatggacagggagtcaccaccggtagtaactcttacgcatggcagcactataatacaccccagatatacaaatatttacggtggtcagagtcccctgaatactactactgcaatttgtatttcctgattttgacgtattgcaaaaggaaaatgcaaaattacaatttttgcaagggtctgctaccccaaaataaagttacaaaaggtcctttgatgagaggcctggggattacaaagacgtctaaagcaccatccaggttcttgcaattaaaatgagatgacaaacacggaaacatgtgccctgctgacgtcatggaacggaaaggggtggcatcctgctgcgtcacgtcgacgtcatacagcgcacgagggaagttacactggggaagcaatttcccccaaggggcaacattcgagaaaaacaagttagctcagacccgaagaatgaccaccccactctaggggacgtcttaaaaagggacactctcccctcttccaaactgtatgattcccctcatcaggcaacaaggaactaatactcggggtttacaggaaccaggggatgggccagatatggagaaagagacgcctctggccttgggggctcgttcttgagggaatcagcgtgatggggatgagaagggcatctttggaacgggggccttctccataggaagaggaggcgagtcccctggccatatttaaaccacagttctccacgccacctgtgcgactcgggatccaacctccccgcaccagccccagtccaggtacctggaacttagtccgatcggtaaccggcgactacgtggggtacaggtacccgagcgcgcccccgacagacgcaccgacctgcgcgcgcgccgcgggcaggatgcgtgcgcactccccggacgtcccgccccgccccctctgcggccccgaagctgggcggcgtgcgcgcccccgcgccgcgccgagccgggcgctcggaaaggcgtccccgcggtgcctgacagttccttcctcagcgcctgccccgtgagtgacgaggagcgcggagtctcgccatatcaggagggccctgttacgtgaggctgtgcaccgagactattccaggaagaagaggggacacttggtgggcggggtgatttcgggcagtcaggtgggcgacccgcgtaggcgtctgaaaggcccgcgtcgttagggagggcaggagtggcgtctctggttacggggtcgggcaaagggcagaggtcaccgtccaggttggacagcagcacctttgagcgatggcggcgtctggggaaccccagaggcagtggcaagaggaggtggcggcggtggtagtggtgggctcctgcatgaccgacctggtcaggttagtccggggccagttactcagtctgcggctcgggggaggaggcgtgccgtgcgctatgcgcccagtggagcttttgggcgctgggtctccagggatagacagtgctagctttgggtatgagctgcaggttttcgaagccttcagcctaccttcctggcatgaaagaacttgagtatataaaggtaaatctcaggggaggggacgtaataggccagggtttagtgaaagctctaatattactcaaagcgctccccaaagacctgccctccaaagacttgcgcccccaaagacctttcttggcccggctgctgagcctttccccaaacgagccagggaactttgcccacgtcattttacctccgagaatgtgcctacctcacagggttgttgtgaggactaaatgaagtaaagtgttttgtcaagcgtaacattatccaaattgggtattattcgtctgagcttattgtataaaataatgagttgagcagaaatcaaaaagactgtcacctttcaccatgttgattgtcggcattactgcagtattttatatttacagcgtatttttcagcaagccaagtatgaatcaaaataaaaacataaacacagtatttacaacctctgaaaacgatgatcaaattatgatagaaaatatgccaaatgaaaattgttgagttaggtcagtaagattgagtagacagatccttctgatttttcttttttttaaattaaggtagcttttctgattacaaaagtaatgtatgttcactgtaaaattagtaataaattcagatattccaagaaaatcctaccactccaattactgcagttcagtcttttgatgaatatcttttcagttgtaatgctactttgtgttataaaaatgatcaggtatgctacagtaacacctcattcgtcctgaaatgttgcttttccaaagggtaatagagaacgtggaactaaacaaaaaggctttgggacaatcaaaataagtcaccaaattgctgcaccaaaccacctgtattctactcagaaaataggtctagggtcttcatgtaaccaatttaaccttaccttaaaatatttataagctgtgttaccaaatttccactgagattagaaaggtgggagttagagaagagactgctagaggcagttatagtgactgacgaaaacttgaggatgagtaggagactgtgtaacgagaagaagcaacaaaagaattttaaataccaatgacctttatttttccacaaatattagaactattctgtcagacactgtgccaagataaaaatactttcctttggtgacagagcataaaattgaatctagttggagacatttgttgaagaggcctgtacatctttttctagagcaagagtaagtaaacttttctgtaaagggccagatagtaaatattttaggctttgcaagccgtatgtggtcaaggtcacatttttttttaacaacattttttaaatgtaaaaaccattcttacctcccaagccttacaagaacatcctgcaggccatagtttgcagacatctgtgtagaaagaacattactgtgtttacaacacaatatagcaattgattttactggtgatgactcttttcaagaaaaggttatatggtactta

SEQ ID NO: 2639 - DNA, 4001 bp, Homo sapiens
aaaccacaaaatagtcaaaagagaaatgataaactggaaaaacaatgagcttttagaagctgagaaaaaaactattaacctatttttttttaatgagcaaagggcataataaattatttcacagaaaaagatacatggctcacaaacatgaaaaatgttcagtctctcataacagaaattcacttcgctgagaaacaattcttcactcatcagattggcaaaactaaaaaacatgtgaaaagattgtgtaggtgcagcaataagaaacaggctctctgtcgcatcttgcttgtaggtgggcatgtgctcaattcctgccaagggaattatctaccaaaactggactgatttgcttttgatccaacaaaccgcttctgcagatctagaagacacatacacatgtgtatccgcaaaatgttatgtacaagatttttcaccgtgccactatttgaaacagattgtcaacaacctgtgttgactgcttagatcaattagggtacatgaagtattacacagctgtaaaaaaagaataagaaagaactttatgtattggtagagatctccagggatattgttaggcaaaagagcagcgtatatatatactgttatattttatgtgtggtaaaggcaaaaaatgtatacaaacgtgcagacatttaatatattataataatgtaaatatttatatttccaaaaagaaactagaaaaacggttacatgtgacagagtgggacagtagtcaggtacaggagttctcggtaaatactgttctaaatcttcttttagtcatataaacgcattgcttatttttaaaactaaaaaaaataataattctgaagtttgaatgtctctcatgtcttatagcagagggacaaatccctatttcagaacctttcttccaaaatatgtctagtaggctcgcccaaggtaaacatttcatattctaacaccaaccacatttctctagtaaaatgacctaaatgcactgtaatagtaaaacatccagttcattaaagcacattaatctttagtaagtcaaaacaggaccaggaatatctgctttacctttaaaaaaggggcgggggacttctgaaagaaaataatttgctggctaggttgaaggttacagaaaaagtcttagagcaaatggatttttgttttgactgcatttaacaatctcggtcttctgatcgcaaagaactgataaaacggaccagttttacttcctgaacctatgacttaattgttttaaatgcctttaagtaacagtctgggtaaatcatctaagtcataaaacaaaggcgtgggaactttaagtaaaaagtgagtgatgttagcaggttggcacacatcactcaataatgagcaaagctattttttttcaatttttttttcttaaagtaccctgtattcaaagacttttaaaaaatagcagtgagattatggataggagagcaactttaaattcgttccctactgtagtcgaattgttaaatacgtgactttgaaaacgtatcacaaaatctaaacacaaggttcaggatttttgttaggttgaactgtcaggaggggattccttacaaagaataaacgagagctctgagggcctaacgaattatccagattgctccaaacggccaccgcggcgcagatgggcggacaagcgccgggcctcagcggaacccaaggtgccggagccctccccggctctcaagcagcccacggccttgctgggtgggacacattccaaacccaggaagggggcgaagggggcaaaagaaggcaggtctggggcgggccgggcccgaaccccaggcgccccagccccctgggcttccccaccccaccagacggacacttactgaaggacattttccggggtgtccatggccagaggacgctggccggcagcggccaaacctgaaccgcaaactagaagccgccgccgattcgaataccccgcgcagccgcagtcggctcgccgaacgtttcagggcgcctgcccattggtggcggcggcagaaggttggccaatcaccggggccgttgctcggaggtcaagtcccacctccctcccttgagccagtagctcctcccacttcccgtggttttcggttgaaccgaaacctggccgttggctgagcgagcgcggggtgtttgggatgcggcacggcgagggggagcaggcttggctcgggcgtagggaattggtttttttgttttagctatccaggttgtgactggtttacataattacacgattaagccatcattgtaggaaaggctttgcaggagaaaaatgtcttaactggaggtctttgagacagaaaaaccctgcctcagcccttgggtcctgagagtcgcgtttcttctccccttcgcttaaatatgtaaaccagaatcattatgtttggttcatggaacggaggaaaaaaatccgtgtgcagggtcgagactgtcgtggcggaagccgcagcacccgggaggcaggtggggagaaaaaacgggacctgctgccggggacccctcccgctttctggcagttttctattcagcgtcctcggctgtgagaaaacatcccagatgctgaaaccaatagtcttagcccagaatctcaaacgccgtggcaaagagggagtgacgacggcctgtggaaaaacctgaggagttttgggcttagcgccttcatgtagaggggacgtggaggcggggagggcgttctagggtcggctgcgtaattatacgaggcactggaaagtgatgggttagtgtccttggagtagacccctgggttttattgaactgatctgaaaggctgggccctgagccacacaggggacctgtcaaacagcttcaagcggaagatggggctcacgggactggactctctctgcagccagctgtaattaacacaaaagcagaagagtttgggtagattatagaatgccagctttgaacatcttttgggggacagggcactctgggagaccaagttcttagacaccataaaatcaaaaatagacacctctttgtagaggagtccagatgtctaaagaggaaatatgtaataggctgatgtttcttttgttttttgtttgtttgttttttgaaaagttaaaatactaagtttataaagtgaaaaagttacagtaagctaaggttgacttattggaaaaaatgtgcttatactatggaatgagaccaccacttctcctgttgtccctcccagcttcttctccaccacctccccttttccctagtttataagacaggagaaaagtgagacagcaaaaagttagaaagaaacagaagtaagataaatagctagacgaccttggcgccaccacccggccttggtggttaaaataataataataatgttaacccctgaccaaaactacttgtgttatctgtaagttccagacattgtatgagaaagcgctgtaaaactttttgttctgttagccgatgcatgtagcccccagtcacgttccccacgcttgctccatctatcacaaccgtttcacatggaccccccccttcaagttgtaagcccttaaaagggctaggaatttcttttttggggagctcggcttttaagatgcgagtctgccaacgctctcggccgaataaacttcttccttctttaatccagtgtcaggagttttgtctgcggctcgtcctgctacaatatgtatatcaagggtttcttgttggtgtctgacacagacacagaaccactgatgcccaagccagtgctctctacacacagaagcctccaacctcatcttgagaaacggggccatgaggccaccccagacaccgagggctccatggaggctggggggtccgtgggactgggcacatcccagcgggtcttggatcctggcctttccccttcttgatgccaggacctactgagtgctcgcaggtgtgcaatgctgggctgcgggtgctgcttgtgtggcaagaagcctcggggtgcctccctccttctcaca

SEQ ID NO: 2640 - DNA, 4001 bp, Homo sapiens
tatttttaaaaatattttaccttcacaccgaaaagaagattcactaaccggcttagagatatattgatactaaaaattaaggcttgagcagtaaagcagtagaaatattaaaggtgtatgtgaaatggcagtcaacgagaaattcaagtttctttctggtatcttcttttgaggctttagtaatatgcaagtacctgtcagagaaggcaagatacacaagatgttctggaggtttgaagagagacattaaaacgtaaatatttacctctttttctagttttaaaacgctggcctgatagcgttggcttttgctgcttttgattattcataaaagacaccctaggaaaggagaaataaagccttaatatcagtgccataatactaatttttaaagcaaaacatcaaaccttagtctagtcacatatgaatcaaatggaacacccactctcaggatataaagctggcaattatacccgatacaggcacaaagaattacctgcacttgaatcaaatgtacgtcaaaatgtgcatttctctctacaagaaacccttcaaattagtgctgtgaactacttttaagcgacattgtagtgctacagtgatcacccgtcataaacctaattgttcagttttctccacattcctctttacattcacttacatcttccacgaccactaagcatcgcagaacgcaaagagagattatcaccatagtcagcaggcatccaaaatgtgtatgccaattctaaaacactgtcaaaaggtgaaccccttcttctgacaagcctggttacgggcagcaccatcctaccctaggtcatgcctgtgaccgcaacagcggccgccttgcaccactcaggcctgcaaaactaacagccagcccagcctccttcgcccatatcccacagtcctagcctcctccccggtaacgtgtctcccaatccacacccttcccatgcctcccgcccgagccacagatcacccgcttcccgcccaggaccccatcggccacagcggggcgccgtagggtcccgcggctctttctccactgaccctgtcgcctgcggtggcggccgccgcaacgagcggaccacagtcactgaggcgctttgcgccggggccccaggcgccccgtacatccgcccgccctccagcgaaagcagcggcggaggcggcggccgcagcggtggtgggtggcagcccctccgccccgcccgccggaagcccccacgcgtacatcacacaacagaggccgcggcggctttgttagccaggccgggcacggcccagagggagcccgcctcggccactgccttcgcagccagcgccgcggcgcacacccggaccccacctccccacccgggccgccgctacccctcggcctccctgccgaagcggcggcctttcaggccctagatccggcccggcctcaagaggcgacctccgttcgggcccatccaagccgggccgcatccagcccgccgcctccctctccctctgcccggcgtccacgacccgcagcgtccgcccggggtgagcggggcgccgcgtctcaccgaatttaaggcgaagaggaaagagccagaaatccccgatgtaccggcaactgcggcggtgtctcctctgcgaccggaactaacgccaggaggagggagaggtgccacccccgcccggaccgctctcctatcgcgagatttcttccccttgccccgccctgatcgtggacaggcgcttccgccttttctattgcgcgcggattagggtgagggactgggataggggaggggagagacgtttccagtcttctttattcccttactgggttccacgtcgcctggacacttgtcctagactagcttatttttcttcccccgctgcgtcgtccgccctcttcacacatggaggggttggaagagcggagccggcccccgccggtctcgaagttggacgcgtcctcctggagtccctcgccgccggccccctcctccagcaccggaagtcgaagcccgagggcggggggccctcgggtcgtgcgggggcggaggctgggggcgggcatgggggcgtggtttggggaaggaatccgcacctcgcctccgccctggccgggatgggcggagttcgctccagctgagtcccctgcctggcgacttttctctgaggggctgtctcattgttcactacctcccttaagagcgaagaggacacaggccgaagattgagaaggggaaattctgtcctccaaccgcggtccctgcgcgctgcagcggttgtctcccgagtgtggtggctatggggacttggagagcatcagaatcccttggaggacttgttataacagactgctgggccccacccgtagtttctcattctgtaggcctggtgtggaacccatgaatgtgcatttccaacaagttatctgtgatgctgctgctggtccgcaccttgagaacccctcagttagaggctatatcatcagggagctggggtacgatcagattagatagtgcgtgtgaaaagcactgtggacgtgacaaaactctgtgcagataaagatgcacagcgcctctaggatgtagccccatgtttttattcactgtacagtagtttacttctctccagttgcttcctcactctctggtaggaggagagtggcttctcttccctaaaccttttgataaaatagtttgttgacttcttttccctaattaactatctgacctctaccccacccccccgcaacttcatggaaaaatgactttctcagcgttcgttcctgaaattattgccaaacccagtgttttattcttcaccctgtttgcctcctctgagcattgaatgttacctacctctctccttgaatcctggctccagctatcctggttacgttctgaatgtgcctttgcacggtattttctgactcttcttttctgtactgataccttttctttctggatactttcttctatggcagtctcatacattctcaaggatttaacatttactccacttaaaagagttccaagatcatctactgaatcattaagcaaatatttgttaaatccaggctctatgcccttccaagttgaggcaacagcagtgggaaggaggcaggaaacaaactgcatctgttggaggaactgcaagaagctagtgtgattgggagggctgtggggagcagagggaagtggctggagtctgatctctaagtgtctagccccttcctttctcccaaggccccagtccacactatctggcatcttcacttcatggctaatttaacactgtcagtgctgtcaattgctcttcccccagaactgtatttttcacatctgaagttctgttaaaggacaacgtttcacaaataaaaatgataactaatatgtccctatatgtatcaggccctcttctatgcactttatgtagtaaccccatttcatcctgaaaactaccctgtaatctagacactattattagtcccattttacagatggaaaagccgaggcatcgaggtcaggtaacttgtctaagatcatagcgctagtaagtggaagaggtccagttgaacccaagcagtctggcttcaccattataatgcaccgccttaccaccaagatcttatttattcattcaacaaatatttattcagctagagaccagtagagatagtgacatgttacgcctatggcctcacaaagcttatcttctatttttgccacgttttaaaattgtatcatctttccccagtaccatcttgatttaggcatctattacccctaactaaatgggacttttgcaataacttcctaactgtactatcccctttctcaacatttccagagcaatcttctcaactgcaagctgaatcatttctcttcactgtttaaatgcctctgtttatactcagggatagctctgaccaatgtttttcacctttacttcccatcacatttgtggttcttaacctgttattaccatcattgtggggtatgtagcaaatg

SEQ ID NO: 2641 - DNA, 4001 bp, Homo sapiens
accatcaacagccaggccacgaatcatctctatctggaaccggggaagttacatctctccctgatgctaataataagaatgctaaagctacttgctattatttgtatcaaggtaacatcagtaacccacatattcaagagatacactttcccattttactgccaaactgttctagtttacaactccagctccttaagaaaatttaccagctaaatctaaatgaatctgcaaagattagaatcaaatcacactttggtctccccaccactactacaaggggacagacagcctatgattagtgattttaaaattctacaatatatatctcaaaatgtctgctacttaaggaagaaaaagaaaaacacaacttataaccagtagctgacctagttcttcatttcctcaaaaccacctgtaaaacaaggttaatatgcttttgaccaaaaacagtaaaaatatatctgagactacgtcttatttagctttatatcactagcacagcactttgctacagaattcaatactcacctaagtacacactaatgcaaaaaaaaaatagtaatataattctaatactttttctactaagtctgtatttcaaaagacattacaatgtgaatcctgttccacaattaacttccatgggtgaagtctgagttttctctcacaaatcttcacaaaatctgggtgactacattaggagttctccttttataaattaacatttttgctcatttaagtttgcttaaatgagactgcctgctagtgaaaacagagcccttatttttatttttaaaaatattttaccttcacaccgaaaagaagattcactaaccggcttagagatatattgatactaaaaattaaggcttgagcagtaaagcagtagaaatattaaaggtgtatgtgaaatggcagtcaacgagaaattcaagtttctttctggtatcttcttttgaggctttagtaatatgcaagtacctgtcagagaaggcaagatacacaagatgttctggaggtttgaagagagacattaaaacgtaaatatttacctctttttctagttttaaaacgctggcctgatagcgttggcttttgctgcttttgattattcataaaagacaccctaggaaaggagaaataaagccttaatatcagtgccataatactaatttttaaagcaaaacatcaaaccttagtctagtcacatatgaatcaaatggaacacccactctcaggatataaagctggcaattatacccgatacaggcacaaagaattacctgcacttgaatcaaatgtacgtcaaaatgtgcatttctctctacaagaaacccttcaaattagtgctgtgaactacttttaagcgacattgtagtgctacagtgatcacccgtcataaacctaattgttcagttttctccacattcctctttacattcacttacatcttccacgaccactaagcatcgcagaacgcaaagagagattatcaccatagtcagcaggcatccaaaatgtgtatgccaattctaaaacactgtcaaaaggtgaaccccttcttctgacaagcctggttacgggcagcaccatcctaccctaggtcatgcctgtgaccgcaacagcggccgccttgcaccactcaggcctgcaaaactaacagccagcccagcctccttcgcccatatcccacagtcctagcctcctccccggtaacgtgtctcccaatccacacccttcccatgcctcccgcccgagccacagatcacccgcttcccgcccaggaccccatcggccacagcggggcgccgtagggtcccgcggctctttctccactgaccctgtcgcctgcggtggcggccgccgcaacgagcggaccacagtcactgaggcgctttgcgccggggccccaggcgccccgtacatccgcccgccctccagcgaaagcagcggcggaggcggcggccgcagcggtggtgggtggcagcccctccgccccgcccgccggaagcccccacgcgtacatcacacaacagaggccgcggcggctttgttagccaggccgggcacggcccagagggagcccgcctcggccactgccttcgcagccagcgccgcggcgcacacccggaccccacctccccacccgggccgccgctacccctcggcctccctgccgaagcggcggcctttcaggccctagatccggcccggcctcaagaggcgacctccgttcgggcccatccaagccgggccgcatccagcccgccgcctccctctccctctgcccggcgtccacgacccgcagcgtccgcccggggtgagcggggcgccgcgtctcaccgaatttaaggcgaagaggaaagagccagaaatccccgatgtaccggcaactgcggcggtgtctcctctgcgaccggaactaacgccaggaggagggagaggtgccacccccgcccggaccgctctcctatcgcgagatttcttccccttgccccgccctgatcgtggacaggcgcttccgccttttctattgcgcgcggattagggtgagggactgggataggggaggggagagacgtttccagtcttctttattcccttactgggttccacgtcgcctggacacttgtcctagactagcttatttttcttcccccgctgcgtcgtccgccctcttcacacatggaggggttggaagagcggagccggcccccgccggtctcgaagttggacgcgtcctcctggagtccctcgccgccggccccctcctccagcaccggaagtcgaagcccgagggcggggggccctcgggtcgtgcgggggcggaggctgggggcgggcatgggggcgtggtttggggaaggaatccgcacctcgcctccgccctggccgggatgggcggagttcgctccagctgagtcccctgcctggcgacttttctctgaggggctgtctcattgttcactacctcccttaagagcgaagaggacacaggccgaagattgagaaggggaaattctgtcctccaaccgcggtccctgcgcgctgcagcggttgtctcccgagtgtggtggctatggggacttggagagcatcagaatcccttggaggacttgttataacagactgctgggccccacccgtagtttctcattctgtaggcctggtgtggaacccatgaatgtgcatttccaacaagttatctgtgatgctgctgctggtccgcaccttgagaacccctcagttagaggctatatcatcagggagctggggtacgatcagattagatagtgcgtgtgaaaagcactgtggacgtgacaaaactctgtgcagataaagatgcacagcgcctctaggatgtagccccatgtttttattcactgtacagtagtttacttctctccagttgcttcctcactctctggtaggaggagagtggcttctcttccctaaaccttttgataaaatagtttgttgacttcttttccctaattaactatctgacctctaccccacccccccgcaacttcatggaaaaatgactttctcagcgttcgttcctgaaattattgccaaacccagtgttttattcttcaccctgtttgcctcctctgagcattgaatgttacctacctctctccttgaatcctggctccagctatcctggttacgttctgaatgtgcctttgcacggtattttctgactcttcttttctgtactgataccttttctttctggatactttcttctatggcagtctcatacattctcaaggatttaacatttactccacttaaaagagttccaagatcatctactgaatcattaagcaaatatttgttaaatccaggctctatgcccttccaagttgaggcaacagcagtgggaaggaggcaggaaacaaactgcatctgttggaggaactgcaagaagctagtgtgattgggagggctgtggggagcagagggaagtggctggagtctgatctctaagtgtc

SEQ ID NO: 2642 - DNA, 4001 bp, Homo sapiens
tcccattttactgccaaactgttctagtttacaactccagctccttaagaaaatttaccagctaaatctaaatgaatctgcaaagattagaatcaaatcacactttggtctccccaccactactacaaggggacagacagcctatgattagtgattttaaaattctacaatatatatctcaaaatgtctgctacttaaggaagaaaaagaaaaacacaacttataaccagtagctgacctagttcttcatttcctcaaaaccacctgtaaaacaaggttaatatgcttttgaccaaaaacagtaaaaatatatctgagactacgtcttatttagctttatatcactagcacagcactttgctacagaattcaatactcacctaagtacacactaatgcaaaaaaaaaatagtaatataattctaatactttttctactaagtctgtatttcaaaagacattacaatgtgaatcctgttccacaattaacttccatgggtgaagtctgagttttctctcacaaatcttcacaaaatctgggtgactacattaggagttctccttttataaattaacatttttgctcatttaagtttgcttaaatgagactgcctgctagtgaaaacagagcccttatttttatttttaaaaatattttaccttcacaccgaaaagaagattcactaaccggcttagagatatattgatactaaaaattaaggcttgagcagtaaagcagtagaaatattaaaggtgtatgtgaaatggcagtcaacgagaaattcaagtttctttctggtatcttcttttgaggctttagtaatatgcaagtacctgtcagagaaggcaagatacacaagatgttctggaggtttgaagagagacattaaaacgtaaatatttacctctttttctagttttaaaacgctggcctgatagcgttggcttttgctgcttttgattattcataaaagacaccctaggaaaggagaaataaagccttaatatcagtgccataatactaatttttaaagcaaaacatcaaaccttagtctagtcacatatgaatcaaatggaacacccactctcaggatataaagctggcaattatacccgatacaggcacaaagaattacctgcacttgaatcaaatgtacgtcaaaatgtgcatttctctctacaagaaacccttcaaattagtgctgtgaactacttttaagcgacattgtagtgctacagtgatcacccgtcataaacctaattgttcagttttctccacattcctctttacattcacttacatcttccacgaccactaagcatcgcagaacgcaaagagagattatcaccatagtcagcaggcatccaaaatgtgtatgccaattctaaaacactgtcaaaaggtgaaccccttcttctgacaagcctggttacgggcagcaccatcctaccctaggtcatgcctgtgaccgcaacagcggccgccttgcaccactcaggcctgcaaaactaacagccagcccagcctccttcgcccatatcccacagtcctagcctcctccccggtaacgtgtctcccaatccacacccttcccatgcctcccgcccgagccacagatcacccgcttcccgcccaggaccccatcggccacagcggggcgccgtagggtcccgcggctctttctccactgaccctgtcgcctgcggtggcggccgccgcaacgagcggaccacagtcactgaggcgctttgcgccggggccccaggcgccccgtacatccgcccgccctccagcgaaagcagcggcggaggcggcggccgcagcggtggtgggtggcagcccctccgccccgcccgccggaagcccccacgcgtacatcacacaacagaggccgcggcggctttgttagccaggccgggcacggcccagagggagcccgcctcggccactgccttcgcagccagcgccgcggcgcacacccggaccccacctccccacccgggccgccgctacccctcggcctccctgccgaagcggcggcctttcaggccctagatccggcccggcctcaagaggcgacctccgttcgggcccatccaagccgggccgcatccagcccgccgcctccctctccctctgcccggcgtccacgacccgcagcgtccgcccggggtgagcggggcgccgcgtctcaccgaatttaaggcgaagaggaaagagccagaaatccccgatgtaccggcaactgcggcggtgtctcctctgcgaccggaactaacgccaggaggagggagaggtgccacccccgcccggaccgctctcctatcgcgagatttcttccccttgccccgccctgatcgtggacaggcgcttccgccttttctattgcgcgcggattagggtgagggactgggataggggaggggagagacgtttccagtcttctttattcccttactgggttccacgtcgcctggacacttgtcctagactagcttatttttcttcccccgctgcgtcgtccgccctcttcacacatggaggggttggaagagcggagccggcccccgccggtctcgaagttggacgcgtcctcctggagtccctcgccgccggccccctcctccagcaccggaagtcgaagcccgagggcggggggccctcgggtcgtgcgggggcggaggctgggggcgggcatgggggcgtggtttggggaaggaatccgcacctcgcctccgccctggccgggatgggcggagttcgctccagctgagtcccctgcctggcgacttttctctgaggggctgtctcattgttcactacctcccttaagagcgaagaggacacaggccgaagattgagaaggggaaattctgtcctccaaccgcggtccctgcgcgctgcagcggttgtctcccgagtgtggtggctatggggacttggagagcatcagaatcccttggaggacttgttataacagactgctgggccccacccgtagtttctcattctgtaggcctggtgtggaacccatgaatgtgcatttccaacaagttatctgtgatgctgctgctggtccgcaccttgagaacccctcagttagaggctatatcatcagggagctggggtacgatcagattagatagtgcgtgtgaaaagcactgtggacgtgacaaaactctgtgcagataaagatgcacagcgcctctaggatgtagccccatgtttttattcactgtacagtagtttacttctctccagttgcttcctcactctctggtaggaggagagtggcttctcttccctaaaccttttgataaaatagtttgttgacttcttttccctaattaactatctgacctctaccccacccccccgcaacttcatggaaaaatgactttctcagcgttcgttcctgaaattattgccaaacccagtgttttattcttcaccctgtttgcctcctctgagcattgaatgttacctacctctctccttgaatcctggctccagctatcctggttacgttctgaatgtgcctttgcacggtattttctgactcttcttttctgtactgataccttttctttctggatactttcttctatggcagtctcatacattctcaaggatttaacatttactccacttaaaagagttccaagatcatctactgaatcattaagcaaatatttgttaaatccaggctctatgcccttccaagttgaggcaacagcagtgggaaggaggcaggaaacaaactgcatctgttggaggaactgcaagaagctagtgtgattgggagggctgtggggagcagagggaagtggctggagtctgatctctaagtgtctagccccttcctttctcccaaggccccagtccacactatctggcatcttcacttcatggctaatttaacactgtcagtgctgtcaattgctcttcccccagaactgtatttttcacatctgaagttctgttaaaggacaacgtttcac

SEQ ID NO: 2643 - DNA, 4001 bp, Homo sapiens
acgataatgtacattccagggctcttcccatctctacaccaaataattatacacagttatgaactaagccaaagaacaaatccaacatgattgttttttggaatttgagagccatttgctgttgttgcaccagaattctattactgtaatgaattactgtaatgactttttcgcactgcattatcttaggagaaaataacaatgaaatgtacacacaagttctcaataaatattgctgtcttgggcaaacagtgactccatgttagtgttgtctgtaactctccttcagtcccacagtacaattcctgagtaaatatagacttcttccttttctaaaaaatatattaacatctaaaaataaatttatcccaaagtctaataggagagtatataaattacgaggatattgctcaagattgagatgaacaattacattaaattaaattcacttctattcaaagtttaattcaaagcatttccaaaattacagcaatcaagcagcaaaattaccttccaaaacatatggaagttgattattacaattatcttatttctgaaataagagtatatagtgttgttgcacagattaaataaactagataaaagccattagaacggggcctggctcagttagcactcaatacattagatagtattttactaaaagtgaaaattaccaaatactctaatccaatgtgaactatttagagccatgcttgaagggtcaactttggaaacagtagctgagataatacatatgaagagccatttgaaaaggtaaaagcagttaagaaaaaaattacattacttttgaactgtgatacatacaacacagctaactgaaggcagctgtagtatcttttgactgagaattttattttgaaaaaccgttattcacacttgtcactatctttcaacaaaacaatgagttctatcatttccaccaaacacaaacatttctctgtacttcaatagggctaatctgttgtttttgaatcaaaaatacagagttaaataactaaaagtataactggattgtttgtaacacaaaggataagtgcctgaagggatggataccccattttccatgtgattcttacatattgcatgcctgtatcaaaacatctcgtgtaccccataaatatatacacctatgtacccacaaaatttttaaatttaattttttaaaaaatcacggttaagtcttggttcagtccaccatcagacagtcctaataggttaataagtggatagcaaacatctcattgcgacaaatacatctttatcaagccaaaactgaactgtagtcagcaaacattgaggacattaaagctattttgaaacaagtttgagttacactgaacttatccgggtcatcaagaaaaactgctctcttggattacccactacagatttcagctaaaggtcgaaattagcccactatctcagatgagctaatactgcagcagcaggcagtctgtgaatgtgaatgataaacggagctaacacagtaaagttactcccctagacgttccactttagcctctctccctaagcaagattgaaaacagctgaaaattgtgaagacttcaatgttttttgatttttgtttttaatttcttcgtcttccaagatttgagaagggggtggttaacaaacgaagaaaaagagagagaccggagcaaaagagagaaatgaggggccggggtaagccaaagcctgcaagcagccccaaaacaagcggaagtgggggacctgccaacaatgctgccccaacgaagagctgtgagagactgcattcctggaaggctacgcagccaaactccgattttctcagtctgcccagaggatgacaggggaatcccaggagaggaaaagcggagttaaacaggagcaggagaaaaactgaaactacaccttagaaaaatacctcacggccttcgactccagtctcccggaaagcggtcgggcaacgatgacgacaatgacgcgccggctctgcccccgccacgagcggcgcttcccgatgatctcacgctgctcgccacgccccctgctccttaactcttctccaaaggcaaatctcattttgagtagctcagacccatgttgtgggagacgattgcggcggcactcggaacttttgtctacctttgtacccggctaacactcaccccaaatacaggttgagtgtatttaaccaggaaaaaaatcttagttatcgaaactttgttcgggtttttactttcccagaagcttttttcagggccctcattctttctacccttttattgtctgcctctagatgagcctcttagagcagcttcccagattatccgtggggaagaacaggttctttattagattatccgtggggaagaatgggttctttatttttccaatctgtcagtaaaaggtacttctataaaatacagtaaaaatgaattagtagaaaaatggggaaaatatgtgcaaaatacaagcccaaattttttattagtttcaaataaatgtaaaattgcatttcaatgtatgcaatcagaacaaacataatagaaaataaaggcattaacagaaactgtacatactgttcattgaaagtgtagtataagcgattgagcattgtcttaacatttgtaacttgtcattccacggctgtaatttgataaaaagttatgcatgaaacagttgtccgtatattaaatgcatgtaaaagcattttgaacaagcaccatgtatgtaatatttaaagttttgggggaggttccaaagtggccgaataggaacagctccagtctacagctcccagcatgagcaacgcagaagatgggtgatttctgcatttccaactgaggtaccgggttcatctcactggggcttctcagacactgggtgcagcccacagagcagggcgaggcatgacctcacccgggaagcacaagggatcagggaattccctttcttagcaaagggaagccatgatagacggtacctggaaaattgggacactcccatcctaatactgtgcttttccaacggtcttagcaaacggcacaccagaagattatatcccgtgactggctcagagggtcccacgcccacggagcctggctcactgctaccacagcagtctgagatcaaactgcaaggcagcagcgaggctgggggaggggcgtctgccattgctgaggcttaagtagataaacaaagtggccaggaagcttgaactgggtggagcccatcgcagctcaaggaggcctgcctgcctctgtagaccccacctctgggggcaaggcatagctgaacaaaaggcagcagaaagttctgcagacttaaatgtccgtctgacagctttgaagagagtagtgcttctcccagcacggagtttgagatctgagaacggacagactgtctcctcaagtgggtccctgacccccgagtagcctaactgggagacacctcccagcaggggccaactgacacctcatacagctgggtgcccctctgagatgaagcttccagaggaaggatcaggcagcaatatttgccattctgcaatatttgctgttctgcagcctccgatggtgacacccaggcaaacagggtctagagtggaccttcagcaaactccaacagacctgcagctgagggtcctgactgttagaaggaaaactaacaaaaagaaaagacatccacaccaaaaacccatctgtacgtcaccatcatcaaagaccaaaggtagataaaaccacaaagatggggataaatcagagcagaaaagccgaaaattctaaaaatcagagcgcctcttctcctccaaaggaatgcagctcctcaccagcaatggaacaaacctggacagagaatgactttgacaaattgagagaagaaagcttcagacgactggtaataacaaacttctccgagctaaaggaggatgtttgaacccattgcaaagaagctaaaaaccttgaaaaaagattagacgaatggctaactag

SEQ ID NO: 2644 - DNA, 4001 bp, Homo sapiens
tcccctgaatccaagtgcagcaccacgctgttactggcgtagtcgtagttctggtcggcgtcctgtgcaatggcgctggcccggacctggggacaagcggtgggagcaggtgagccggggcacctcttcccgcgcctttgctcagcccacaccaggcgcgccactcacgggcctcccgcctgctgcttcagggtccacactcccaccccagctccatgttctctctccaacttagtcaactccttccaggtcccccctcctcctcgcgccgacgagtctgggaaatagggagaggggaagcttcatgaacactgacccagagtggaagggtgggagccaggggccagggccaagaggaaaggaggctgcagggcaagggggcgacctggagagaactaaagaactgaggtttccgagaagcccacggagaggcaggcagggacgcaagtggccaaggagtgtagtttaggtatgggggtctctgggctctcaaggcccaacatttggctctacgtcccggtgagcgcggcctcggcgcatcgggaagcggagatactgtggcaccgaggcgcgttcattcccggggctcgcagggtagcccgcgggtggagagaaaggaggctggttccctgggaggttcagggcgcgggcgagggtttacgggggccggtgagtgtaggggtcactgacctgcccgttcttgcagaggtccgcccacatgctggtgccgtcgccgccgcgcatgaggatgtggtaggtgaagaagtagatgccgcgtacctggcagctgaacttgcccgtggtggggtcatagtgattgccgaggttggtgaccacgtcatcgaacttcagcacctcatagccttcgtgggggctcttgagacccacatagaaggcgatcttggggccgctgaaggtggcgctcagcgcactggtcacttcaccctcggaatcgccacctaccccggccccgccgcccaccaccccgacgccgctggccgtgcccgccgtcagttgcagccctggcagcccgggccgccccgagtcgcccttctctcccggagggcccctgggtccaggcgggcccggctctccagggggcccccgcggccctggcttgcccggtcgccccgggtcgcccttgggtccctggatgaaaggaggaggagggttggcgctgaggtcctgcatgacttccagggcggcggtgctgggtccgggtggctgcgcctttgcacccgggggctccccgccgggcgcggcagtgtaagggtcgcagatcatgcggcaggtgcccatcatctcatagtgcgcggcgcctcggggcgccgcctgcagcagcagcggcacggcgatgagcagcccgagcgccatggccaagagtacgccgacggccgccaggcaggcacgccgccgccgctgccacagccgggaggcgaccgccaccagctcctccttgccgcccggggaggtaatggtggggcggcgcgggcggccccgctccccgcgctcggggaccggctccgcgggtcctggccgcgcccccgacgtggcgacccccagccccggctacccaactacttcagcgagaggcgccgggacctctgagcctgggcccaccgcgctggggctggtcgggagagccgcggacgcccgcgcgcatgacgtggggcacacaagacgaatccggcgccccgagggtccggcgccggccagggagtgcttgcgctggccggggagtctgcttgcggcgtccggcgctggctccgcggcgctgcctcccgccaggctccgctccgctgggtttagtggggctcctagcgcagtgagggcgccccggctccgcggcgcgctctgctgtgctctctcgctgttcgctggctcccgcgcggaggggggaccccgctaccctgacgtaaggagtccggggctgagcggcggaggcggcgaagcagcgcgcgctgccatcactcgggagacggagccctcatgtcatcagcctcctatctggcggcgtcctcggcagaggcggtgaaggcgcggttccccctggcggctcccaggagccacaagtgggcgcagcgggcgcggtcccaagccggggcacatcggacacacccacccgcggccacactcacgcgccccccaccgataacacacacagacacccacgcacgcagtggcggggcacgcacagccacccccacatggccacgaaagcagctggaatccaggtgtcagcagggctcctctggggtcacctaatccatcccctggcctgcaaagaggatcaaacctcaacccaccgagtccaggagagtcccgtgaggtccagcgggaaggagtttctgaaagacctcctgagttatttcttcagaattgaatagatctcgcttctggaagatctttcgcaaacctagactaaggactccagactcttaaacaggctcccgtagagcaccccactaacctctgaggtgactctaaaaagcccaaggctcccaatacaagaatatttgcggccgggcgcagtggctcacgcctgtgatcccaacactttgggaggccgaagcgggcagatcacctgaggttgggagtttgagaccagcctgaccaacatgatgaaaccccgtctgtactaaaaacacaaaattaactgggcatggtggtgcatgcccgtaatcccagctacgcggaaggctgaggcaggagagtcgcttgaaccagagaggcagaggttgcggtgaggcgggatcgtgccattgcactccagcctgggcaacaaaagcaaaagtccatctcaaaaaaaaaaaaaaaaaaaaggaatattcgcctcagaccttttcttccaccagaaaatggctggcccttgtcctctgcgtgaagctggtgtagaaaccaaatgcttgatgccggcacttggcagtgatcatggtgcactcagcttctactccaagcccggccactgccaggcagatgcatgggcacattcccttggacatccccagcttcctcctcctgagatgggtttagttattttagaaaatagtccaaatagtccaaagccattctgagccagtcttgaataaaccatggcctcagatgagagcagaatagtctatctccaatgtagcatgtgaggctaaggaaggatgagaggcccgccggtgtgggagagacttccagcggagaaatcaaagccccagcttctgctcttgccctgagtagctgtgtgattttgccaggtggttcctgtccctgagactcagtttccttaaaaggccgcctcctgccctagcacccccaacatgggaatcacaccaggcctgtcctggggggagaatctaagggctggtgtcagtgtttggtgtagcatcagcatctctggaacaacagtgcacccacctaaggctattgctttgaagctaactctcatttgtcctgcactaggttcttacgggttaattaaaatctatttttgtcctctgatcaccctgggtcatttccccactcccaacctcgttgctctagcctgttctctccacatatatttgtggaaaggatgactgagcctagccggaagccaactttaccaaggagagaaggagcacatttattggcacctactacgtatgcatcaggcactttgcacgtgctccttcattcattcctcatgttactgtggattagtgatcattttcccaccgcaccaatgaggaaaaaaaaaaggttttgcaagtgtagggtgtttgccaagtgcattttacccacatgacagagccaggatcctcccggcacccagatcaggggctatctgaacctgtcagtgaacacagcttcaacagctacttcttggccacagtcttcactggtttcctcagacttgggagtctttctccactctctgcctcagagtcatcccaagagcacgtgatttcaggagccacatggcctacttccaatcctgggtctgagacttcctgtctgtgtgaccttgagca

SEQ ID NO: 2645 - DNA, 4001 bp, Homo sapiens
aggtgggtggatcacttgagtccaggagttcaagaccagcctgggcaacatggtgaaaccgcatctctacaaaaacatacaaaaattagctgggcatggtggcacatacctgtggtcccagctactcaaggggctaaggcaggagaactgcttcaacctgaaaggtggagggtgcagtgagctgagatcatgccaacgcactccagcctgggtacagggcaacagagtgagactctgtcttaaaaaaaaggaaaaaaaaaaaaagtctgggcgcagtggctcacacctgtaatcccagcactttgggaggctgaggcgggtggatcatgaggtcaggagatcaagaccatcctggctaacacagtgaaaccctgtctctactaaaaatacaaaaaacaaaaaacaaacaaaaaaaaagctgggcgtagtagtgggcgcctgtagtcctagctacttgggaggctgaggcaggagaatggcatgaacccgggaggcggaggttgcagtgagccgagatcgtgccactgcactccagcctgggcgacagagtgagactctgtctcaaaaaaaaaaaaaaaaaaaaaaaaaaggtttagttggggcagggtgggacactcactaccccttgggtttccacagagggaaggaaatttttactttctcaggttaggggagaaagtcaacagttcttgataggaaaaaaaaggaaaatcttttcaccctcttttggccttaaaatgatcatttccttatattctttccaaataatcttcagtaccgtctaggtggcatacataagtgcttaaacttttcttattctttctataagggaagtactttcctacttcctatattaataatctccccacccccgaagtcttcaactccagctgatagttttaaacttagaacattctttcctatttgtttttaataatgctagataatgtattcaaaataatcttagtatctgaagaggaaatgagattatacattattccctctaacataacttctcagtttgttattttgtgcatttaaaaaattacatttccgaggatatgtgctccttgtgtcctctaacctcttaatctaaaataacagggacacttaattttttttggtatctaattatacttacaaagtatatgatatctgaaaataaatgcgacaaaatatgagaccatgtaataacacgatgaaaagacattggaaaaacatggcatttatattaaatgtatttttatgactaaatttgttctacacaaaagttgtttatccctgccaatgatatcttgtggggggaaaaatgagtactcacctggcgaaaacaggaattgttagtctcctcaaacgagagcttactcttgaaatacacagcgttctaccatatcaaggtcatcagagaattgctgtaaaaacctagtgtctatgtcatctgcaggaaaaggagataaagtcaccattatcatccagaagctcttgagttatttaagaagggacatggtaggtattaagaaaaattaagaagacttttttcccccccattctgggctccaaaaaattggtagaagaatgcagcgctcattctttttcactaaaaagctcatttgtcactttaaggtgaggggatttggaaaaggactggcatgtggagaaggaatatcggtcaggaatctggactttgttgctagatctgccacttcctgattcagccctgatcgtgcagagctgaccaaggccgtggtccccaggctcccctgactccaggctgcccacgctcaccgggacaggccggctcgctccctgcaggctgcagcgggagggctggacctggaagcctctcttaaaacgggccctggctgcagcaggagctgcgcccgaaagcagctctgagagtaaccggttcaccgaacatgggtccagaatgatgcccaagccctgggaaaagtggcacaaagccaccgccgcgaagcagcaggtgtttcaagctgagggaaggcggggctgcgagagacagccttgcgcatgcgcgttccatccaggtgcggcagcctcaggcagagattaagaaatgagtcgtggaaaagggggctagcggctggttactaggagacgggacgctcggctcgggcgtctaggcgctgcgtgggcgtgcgcctgcgcggcgcggatgggccaggaaggggtccctcctaggtgccctgtaaggcaggcaggtagacgtacgcgtcgctccgtgcgtaggagcgcgcgcacggcttgtagaccccgcgagaaggaaggtcgagccaggtacgcgtgcgcaccgggcctgggggcgagcgggacggaagcaaagctggggcgccggggaggtggaagacgagccccactccggtacagagcgtgagggcggggccacggcggcactggctggcgctaaccgccccctcctccttcccgcgggctccgtccttcctccgatccgccggggcggggccaggacgatttgggggtgggaagggaggagaaaggggcggaggatggagagtgggcggttcttgtatcccccgctgaggccgagagctgacagtcgcggggatgagctctgggcaggacggcgggccgaggagcccggggagggacccggagctccaggtagaagctgcggaggtgcgcggggtggggagagtgctgctactggactggaaggtctctgagaaggcggctgcaagcgggcaggagtggcgggtgcggggccgtggcgggcggagttgggcgctagcagcgggagcggctgtgaggggcagcggcgggcacagctgccggccggaagctcggcagcacgagttgcccctgtttcttgggaggttaggtttgagcccagttcctatggtcactgcttcgcgtcctcccgcagctctccgcttggttgttggggagactgttcagtttagaaacgctctggaagctctggtggagccgaggaatttggaagtcacagatttgggagttcagcctgactcccgatcgctcatttctgagcctctttctagacttggggtggtgaaaggctgagattacataggcatttgcatgaaaatctcagataattttagtaaaaattatacacagtaaaggcagggaaagctggcttttgttgaaaaactatttgagacttaaattggataactaggtgatcatggacttgatacctaaaaactcacagaaatatggttttttttcactttttttttttcgcagcttcgggaaagtttgcatagattatagtgtcccaacgttttccttcttccattccaggaccttatatcctaggagatttccttgtttaaaattttctgtactggtgttcagcatttcaagtatactttgtttacgtgtaaggacataagtagaataacaataggtttgtaagtagaaaaaaacaggttagttatagaagtaggatgtcgcattcgaatctgcttccaggataagacagattcttgtttgtattttaattgattaatgagccaaactcttcagtcttaattagtgggaaataactaggacggtacattaattaaatattaattttaaatcctaaactttggcattatttaatggcagcttccacaatatctcgcgtactgtttaccttctgaagaaaaatcactgcctgtagcccagaatataatcaggtgtagagattctctgggagatcttttctgtcttctttttgagttgcttagactagtttgtttaggacgatttggttttgaagtcctccatacacagaggcagttagaggtattactatttatcaccttttcagattacatatttctttccctccccagagatagccactctcctgacttctaagatagccacttccttgattttccttaatgtttcacatcattgtatgtgaacatgcacattacagtttggcttgtttttgaacttcgaatggaattgtactaagtattcatttacatcttgcttctttactcaac

SEQ ID NO: 2646 - DNA, 4001 bp, Homo sapiens
agttaattctgcaggtactatcagttcttgaagatgtggccttggaagtaaatccacacaatttattgcttcaattcctgattctagggctactcctattggttctacaacctgaggaattggtcctggtgctaactcctcagattttacgatttgaagggatggccctgggattaacatagtttttacaatttgaaaccctgtcaactccactgtttccaaaatctggtgttttggctttgtgattaattttgtagatttcacatcttgcaaacatggccctgtgtggtgctctgaaggtctcacatattgcagttttggagtcaactcaatatattctaccatttgaggggttggccttggtatcgtcacagactttacaatttgaaatggtggtccaggggtcactttcacagattgaacaacttttgggacatctatgaggattacctcttcagattgagcaacttgaagctgtgtccttgcagattctgtgacttgatctagtggctctggactaatcctcataaattctacaattcgacccagtggtcctggggttgtccctggagatttcatactttgattctttgactttgttagccccattgatacctccctgtgctgccgtgcctcagaggtgagctctacagattcttcatgtcctataacttgacttgtttgcttcaggggcacctctaaagattcctccatttgtagccattgcttacaggtcagatttacagattctgggacttgatgtcctaaccctgatattatccctggagatcccacatgatgctgtggtttgggggttaattgcaaagttttctctacctgcactcctgacttagaagtcaactccacagattcaggaactcgatgtcctaacccaggtgtcatccctgaagcagaatctgggacgtgatgtaatgactttggaatcaataccacagattcttccccttgcagtcttttctcagagatcacctccacacattctaagttttgaggacagagccttggggatctctctgcaaatccagtggcttgacttgttggctttggggtcattccaaagaattcatttgcttgtatccttgcctcagcggtcaaccccatagcttctgtaaagtaatgcttgagttccggagtaatcccttcatattccacagtttgctgcagtggcttcatatataactcccccacatccttaactcggggccgtgactgagagagcaattccatagtttctaggatttggtagcttttctctggagttaatcctaagaattttgagccttgatcccttaccattggagtcagatcaacaaattttggtacctgaagatctggctgcagcagcatccctaaggattccttagctctacctgttagctttggggtcaaccccacagatttctctacagtatctatgcctttatatgccaatccttgtgccatttctgaagattctgtggcgtgataaattggtattgaaatcaaatttgcagatttagggatttgatactttggctgtgggatcatctctgcatattttgcaaactgatgccctggtctagggattagttcagaggattccatgatttgataatttgttcttggagtttgctccccatatttcactctttgaggcagtgaccctggtgctaattccacagattttatagtttgctgcagagacactgaagataatttcacatgttttacgctttgcaactttggctctacagtaaactccaaagatttcacatcctgttgctgtgattctggagacaaatttgaaaatctgacactagtcaacagtggtcctgatgggaacttcctagttggctctggtaccaacatcattgatttcacatcttgccatcctgaagtcaactcttgataatttataccttgctgttgggcccctggtgtcagctccataggttttacatcttgaaagcatggcttcgatgcaaaggccacagatttaacgcattgtgacccaaagcatgatgtcaaccctgaagaatttacactttgaggttgtggccatagagttgacttcacagatttcacatcttgagaacatggctctggtacaaataccacagatctcacattatgctgcctgaggtgtgaatggaactcctcagaattcataccttgcagctgcgggccagagttgaactcctttggtgttatatcttgaaattttgtccctggagtcagttcacattttacatcttgtaaatgttgcacagagttgaacacaacagattttataccttgaagctctggccctggatgcaactcagaaaatttcataacttgaaattttgtccctgattctacaccttgcaagtgtggcgcaagtttgcactccatagaatctatacattgcaattttagccctggattcaactcagaagaattcacatactgcacctgtggcccagggttgcattccataggtgctgcacgtagaagctttgaccctggagtcaattcagattttaaaccttgcaaatgtggtatagggttgaacatcataggtgtctcactttgaatttctgtccctgggttcaattcagaacacttcataccttgaagttttgaaactggagttaattcaggcgatttcataccttgtaaatacggccctgggttgcacccaatagaatttacacagtgagcttttggctgtggaatgaatgcagaattcacaccttgcaaatgtggcccagggatgcacccattagaacttatacactgaagtttaggtgctggaatggatgcagaatttacaccttgcaaaggtagcccacagttgctcccagtagaatttacacactgatgtggtggctctggaatggatacagaagaattcacatcttgcaaatgtggtccaaggcagaacaccttagattttataccttgaagctcaggcccaggattcaacttggcagattttgttccttgcaactgtggtccagggttgaaatctaaagattgtataccttgaagccttgttcctaggcacaactcagaagatttcacaccttgcaactgttgctgaagattgaatttcatagattttacatcttgaagctttgtccctgtgcataattctgaagattttctatgttgcagatgtggctcaggattgaacaccataaattttacactttgaaggtctggccatggattcaatttatgagatttctcatcttgctgctgcttttcagcattgaactcagaaggtgccacactatgaatctttgattccaaggccaacttagagagttttgcaacctgcaattctgggtcatggttgccttctgtagagttcaccgtctgaagctttatcaacccagatttcatatcttccaactttgccccaggattatattctacagatttcacaccctgaaggtgtatccctggtgtcaacatagataattttctatcttgtaactgtgaagttgagcttaactccaaagatgtcctatcctgtacctttgtacctacagtcaattcagaagatttcacatcttgccgcattggcctaggcatgagcacagatttcactttttgaagctttgtcgctgggatcacttcagaagatttcataccttgcaagtgtgatccagaactgaactccatagattttacatcttgaagctctgtccccattattgagttagaatattttgtatcttgccactgtgggcccgagttgaactccacagattccccaccttgaagctttgtctctggtgttaactcagaagatgtcacaccttgtaactttagaccatggtggaattctacagatttaacatcttgatggtttgttccctgaatcaactcagaagatttttcgctttgtgtctgttgtccagaattgaaatccattgatttcatactttgaagccttgtccctgaggttacctcagaagattttataccttgaaagtgttgtccagaactga

SEQ ID NO: 2647 - DNA, 4001 bp, Homo sapiens
tatttttatcttgaaattcttggtgaattttatgttctagcccataatatattagtttattttaacacaaaagtttcttccaaaatggacatgtccaaaagatacaccatgctggcgacggtggtggcggcggcggcagcgggttcggttgcgcgtgacgcacggggtgggagcggagcccaggccgggagcaggcgcctctgccagagaccatggggaacgtgttggccgccaggtcgccgcccgcagggccgccaccgccgcctgcgccggccctcgtggagctgccgccacctccgccctcgccgccgggcttcacgctgccgccgctgggaggcggcctgggcgccggcaccagtacgagtcgaggttcggaactgacccccggggctgcaactgccagcgcctcaggggccgccgaggatggggcctgcggctgcctgcccaacccgggcacattcggggagtgccaccggaagtgcaaggagctgtttcccattcagatggagggtgtcaagctcatagtcaacaaagggttgagtaaccatttccaggtgaaccacacagtagccctcagcacaatcagggagtccagctaccacttcggggtcacgtatgtggggacaaagcagctgagtcccacagaggcgttccttgtattggtgggtgacatggacaacagcggcagtctcaacgctcaggtcattcaccagctgggcccccgcctcaggtccaagatggccatccagacccagcagtcgaagtttgtgaactggcaggtggacggggagtatcggggctctgactcacagcagccgtaaccctggggaaacccagacgtcctcgtgggttcaggaatcctcgtagcccactacctccagagcatcacgccttgcctggccctgggcagaatgctggtctaccaccagcagcctggggaggagggcactgtcatgtctctagctgggaaatacacattgaacaactggttggcaacggtaacgttgggccaggcgggcatgcacgcaacatactaccacaaagccagtgaccagctgcaggtgggtgtggagtttgaggccagcacaaggatgcaggacaccagcgtctccttcgggtaccagctggacctgcccaaggccaaaggctctgtggatagcaactggatcgtgtgtgccacgttggagaagaagctcccgcccctgcccctgacactggcccttggggccttcctgaatcacttccccatccctggtcagtccaccttgccccgtccacttccccatctcctcggtataaatcatgtttataagttatggaagaaccgggacattttacagaaaaaaaacaaaaagcaacaaaaaatatacgtggggaaaaaaaaaagatacaccatgcttatctaaggcttttagtacttcctgtcatagttgcatatatgccagattgaggggcacagaactaggggaatttggtgaaatgctcattatacagaactgtaatacctattgtggcattttaattatgtaaaagctgaatgaaatactacataaaaagatactgtttatttttctgatagacttcatagcactccgtggtactgagattttctaaaatttagaaaacaacgttagtaattatgtttgtctactataataattatgtttttcttctttcacttttcaggttttccattaatataaaaagtaaaatttctatacatttccatttattttaaatcaaagcagtgtcaacaaatctacattacctatagaatataaagagaagtatgtgaaactttataaacatttaagttatactttcctgacagacaaccccatacctgctatcatgtcatctacagcactcattttcagcaatacttgttcaattagtccagcttctgtgctagtctgtacattccgaacactttttcatagaatggctgtaaacatgctccctatttctgcttgacatgttacatcacagtgctctaaaagctctgtcatgcatgttatactctcagcatcctggataataaagttcatctccagttcaaattctctgccaaccaactgaaagtaaacagaaagaaacaatagtgttaacatgggaggttaccgataacagtagaataaaataataacaacaattcaaagctactactctaaaaaagtttcaaggcttttggtataaaattattttttataaaaagtataagagctacagataaatgacaggcattgtaagcactgaaagtagcgaacactgaaggggtggcctgcccctccacacctgtgggatatctcatcaggtgggatgagagactgagaaaagaaataagacacagagacaaagcatagagaaacaacagtaggcccaggagaccagcactcagcataccaaggacctgcaccagcaccggtctctgagttccctcagtttttattgattattattttcattatctcagcaagaggaatgcagtaggagagcagggtgataacagggagaaggtcaacaaaaaaacatgtgagcaaaagaatctatgtcataattaagttcaaggggaggtactatgcctggatgtgcacgtaggccagatttatgtttctctccacccaaacatctcagtggagtaaagaacaataaagcagcattgctgccaacatgtctcgcctcccgccatagggcggtttttctcctatctcagaactgagcaaatgtacaatcgggttttataccgagacattcagttcccaggggcaggcaggagacagtggccttcctctatctcaactgcaagaagctttcctgttttactaatccacctcagcacagaccctacacgggtgtcaggctgggggatggtcaggtctttcttatcccatgaggccatatttcagactatcacatggggagaaaccttggacaatacccggctttccagggcagaggtccctgtggctttccacagtgcactgtgcccctggtttatcgagactcgagaatggcgatgacttttaccaagcatactgcttgtaaacattttgttaacaaggcacgtcctgcacagtcctagatcccttaaaccttgattccatacaacacatgtttttgtgagctgaatgttggggcaaagtggctggggcaaagtggctggggcaaagttacaaattaacagcatctcagcgaagcaattgttcaaggtacaggtcacaatggaatttcctatgtcttccctttctacatagacacagtaacagtctgatctctctttcttttccctacaaacagaaatctaattttcacataaatgggaaagggtgatttcaagtctagtaaaacagagcaaactacagcatgtgattcctgggtgcgattcaggaaaaattcctaaaaagagggtttggcctttaaaagtgataatcaacagaaaatgtagaatttactaaggataaattttaagacacgaaattcattttcttttttgatattactagtcttacagataaagagatgtaactggggcataatctccatatatagaagatgaagaaatatgaaactgatacaacttacaataaatgttgcaataatgaaatgaatgttaaaaataagttgaacagaaatatgcaaggtcttgtaatgcttttttttttaagcacaaatgtgaattgggtaaagaaagctgatttaacagcaacacatttgacttcagcattatggcaaatgagtccaaagtcatactgcccctcccgtttcgtattttaagtgcagtaatagacaaatacacacagaacaaaataacataataatactctgttactatctgttgattgaatcccataggaactattatattcagttataagcatcattcttaaaaaagaacactgtcaaactggatatccttttggtttaaagaatgataagatttaggaataacttgataaaaacagaaggaagagtaaaggggactttgtcttgcatcttaggta

SEQ ID NO: 2648 - DNA, 4001 bp, Homo sapiens
aagtcaggctgtaagtagacacccaggccctaggtaaatactttggtcccaagccaacatcaggccctatgtggacatccagactccaggaagatgtcaggccccaggtgaacactgaactcagggtggtcatcaggccctaggttgacacataggcctcaggtagacaacaggcataggtgaacttcaggctctagatgaatgttgggctccaggaagaagtctgtgccccaattaaacactgggtcttaggtagacatcaggcctcaaatggatgcccaggccccaggtggatataaggcctcagacaaacaccaggccccaggtagacattagacacgaaatggacactcaggccacaagtgaacatctgtccccagggggacatccatcccaaggtggacatcaggccagagatgtacacccaggccccaggagaaccccaggccccaggaggacactcaagtgccagaaggacacccagtccctaggtaactacaaggccccaggtggacatgatgttccagatggatatgaggccccaagtggatactaggcccaggtggaccccaggtctcaggggcacaccaggccccaggggaacaccaggccctaggtaagcatgcagtcccaggtggacaccaggtgccaggaggacaccaggacccagttggtcatcaagccactgctgaacaccaattccccatgaacaccagtcctcaggtgggcacctagtcctcttgtgtgcatcaggtgccaggctgacataggcaccagctgaactctgggcctcaggtgaacatcagatcccaggttgtcacccaggtcccaggtgaacaccaggttttaggtggacacgaggtcctaggtggatgtctatgctcctggtgaacctcaggccctagtggacactcaggccctttatagacatctggctccatatgcactcccagggcccaggtagacatgaggccccagaggaacaccagtccttaatcaactaagactgaattcccctagggctggagactgagtattcaccttgggcctaggaatctacctggggccagatgtcgatctggggcctgatgtctactcaggttcagctgtccacctagggtgtggtggacctctattctgtccccaccctgcaacattgggccagctcagtctctgccaccagcttcccacatcgtcgtccctcagagccctagggtgggttccccctacctagtgtctctggcccctgctctccactctcaggcctgacaaacatgcaacccctcacacatgtgtcttcctgaaggcgtgggtgttgggaccgctggcacagaagtcacagcttagctacatgtgtgtcccagacttgcttaatcaatggagcagtgaacccgctgcttctggggtacagtctcctccatttcatgggtcaggtagacaggctgcgtcctcttcacccccaggtgtgcgcacacacagtcatctccacctgcaatccagtgccagctgaagctgcacgctctgcaacagaggcctgtgcacgacctcgctgcgcacacagcaggggctgccctcggtccctccctctcccctaaagtccctgcctcccagccccacgacccacaggaggagccagtcccctagcccacggagccacggtgggtgcggcctggggacttggcatggcaagctggcccatagggtcgtccctagcacctaccagagcgcgtacgagggagccgaggctgcagcgccgggtgggcagcgagctccctggagacccatgcagcgggtcaggtgccagctgccgccaggtctgtgcgcggggccgggccaccagcgtgcggcttcccgctctggagagtttatggcccctgtcctcggacggctccgcagccgccagggagggactggagggaccgcggctgagacaggctgctgcaccaggcggccctggaccgccgcttccgcccctaagccgccctcccagcccaggtgacaggtcgccctacccagggagcatcgccctcctccgccggggggcccgagcccggcgtgggggttgcaggccggcgccacagcctgaggacaccgcgacctctgcccccgggagcgcgccgaatgcggggtggggctgctgtcgcaggccgtggagccgcagccccgctggagggcagggtccggctgggcgtcggggtcctggcagagacagcggtgagagcaggagcaggtgcactggcagctgcagacgcgccgccaggctcccggacaccgcgggcgcgccccctggtggcagccggctccggagccgcgggagggcggtgcccagtccccagccggcggcagcgcgaagcgccttccccgcttgggggagcgggcgtggacctgcagctggagtgccttactagtgaaaaagctggggttggagctgccacggggggaggtgtgggggcctagggggctctgcctggaccttctgggtgtcctcctgcgacctcaggttcctcacctgtctcagaggactgatgggctgctgtggcagggttgtttggaggattaagccagatagtcccagtaaagccccattagcgccccctggcctctggattattattttttattatttttctggctttcttaggaaactttccggaatgtgtccaggtgttgaagcgggaaggctggacaccctcccgtggcgttgccgttccttccagacgccccctcttcttaggctgttttcaagggcacgcccggcaacatgtgctctacccaagagcgcttcacagatcttcctgtgggtctaaaaccagaacgctttcttccccgacccctgctcccatatcaccccaacctcaagtcttttggcacagccggctacagactcgagtgtcagtttaatgcttgttccctaaggtctccccagggctgttaggacggcgttagggttaggattcgggttcgggtgcgcctctccgcgcctgcgccggcgctggggggcctttgcgagggcggagctgcgttctcctcagcacagactttggagatacagtgaaggcggagcaatgttcttctcagcacagacctgggcgggtcgggggcaccgcgagggcggagctgcgttctgctcagcacagactccggggacaccgcgaaggcagagcagggttctcctcagcacagaccttggggggcactgcctcgctttgggacaactcggggccgcatcgacggtgaataaaatccttcctgtttgcagccctgaataatcagggtcagagaccagttagaagggttcagtgtggaaaacgggaaaccaaaagcccctctgaatcctgcccaccgaagttctccccagccaaggcgaggcggccgcagtgcgagatacacaccgcagcctaggaagacaaatgcagcattcctaatgcagacatgacacccccattgctcatgtaacaagcacctgtaatgctaatgcactgcctcaatacaaaaatattaatataagatccgcaatcccctcgctgccgtgcagtcctaagacagcgatcataataatcagcattgacatagtcaatacaaacgtagtaacgaacctagggttaaggttggtgttagggttaggggttaagtttagggttaggggttggagataggggttggggtcagagttaggggttaggagtcaacgtttagagtttggggttaagagaggttaggggttagggattaggggttagggttgggttagggtgagggttggggttagggttagcagttagggttaagggttaggggttagggtcaggggttaggggtcagggtcagtggttaggggtcggggtcagggtcaggggtcccactctgtgggttgcctatttactctgctgactgttccctttgcaatgcaaaagctcgctctttagtttaaatgagtcccagctatttatctttgtttttattgcatttgcatttgggttcttggtcatgaaatccttgcc

SEQ ID NO: 2649 - DNA, 4001 bp, Homo sapiens
tacaaaacaaaaacaaaaaccttagctgggcgtggtgacacatgcctgtaattccagctactcgggaggctgaggtaggagaatcgcttgaacctgggaggcggaggttgcagtgagccaaggtcacgccattacactccagcctgggcaacaagagcaaaactccatctcaaaaaaaaaaaaaatattttcactgtataagaactttcacatcccagctcggtgatgatattttaactgagttattggtataaactaaataaaatacaagtcctgaaaataaatggcttgtagccagtgctcacttgacttattcagatgtgcttttttcttcttcttcttttatttatttctttttttattttgcgacggagtttcactcttgttacccaggctggagtgcaatggcacgatctcagctcgccgcaatctcctcctcccagattcaagcaattctcctgcctcagcctcccgagtagctgggattacaggaacgtgccatcacgtctggcatttttagtagagacggggtttctccatgttggtcaggctggtctcgaacccccgacctcaggtgatctgccccccccccccccccggcctcccaaagtgctgggattacaggtatgaaccaccaaggccggcccagatgtgcttcttaaagtggcaagaacaaagagtgggaggcaggtaaaccatacaacgggaaatgactgattagcttcgcctgtgattctaaggtggaacaataatcctccccacctgaacagacctcaccacgcctcctgctgttttagcaaccccggggctccatcccagggctcctactgaatgtcccctgcctcttctcacctcgagttcagtttccatacctgtttcgaatgagcaaaatacagaaactgagcaaccgagtgagcctcccttttacattaggcagtgcccagctgctttgcagtgggacagcgccagtctcaggctcttgggcaagtcacttcatacaccagtaactctgaggtaacaatccctgcctcccctagttgtaagcttcaaaggcagtcatgtgtccttgaggccacttgtgaaccataaatgttcctcctacccagtgaaggtggtaactcaggacaaaccacggcttcagattatggttcctaaagtggggcctgtggagcccagcgatcagatatcggagcacccatcattctgggtgtgcgtgtgaatgcacgttttacagagagcgagcagagaatttcagagttttcaaccgattcgctgggagctccacgaagcaggaaagattaagcattactcctttaagagcctttcccctctctggggtgtgaggcctgtgcccagctttgcaaattgcaacttgacccagctgggaagcgcaagtcaacttggttgctaagcgactgcctggaagggaatggcggtgatggtgccatttgcctcctctgggttaccagctgcgtaaagcccccacaacccttttgccccttacgttaagccacgaaacactacttgcccacccttcggacgcctggccctccttgcccaaggttgcccgggagatctgagaccctccccttgaccccggtactctctccaccctcacaagggcaccacttcgcacttgtgcgagtgcaaaaccccagacccggtcctctaccaccccttggccctgcctaggctaaggatgggtccctacgccgccaccccatcaccgatcgctctccccgggcaccatggaagcgccacatggggccaacccctggtgccgctatcaatcagcctggcatcgccccgctcacctgggccccagcacaggagcaggagcagcgccagcccggtcagggccaggacagcaggccgcgcgggggaggcagccatggcggcggggcgcgagcaggagggcgaggggcgcacttcgaggtgctgcgagggagaaccgggcgcgggagaggggtgcgagcgggcaggcgcggccgcgggttatccctgcgtcgctgccggggcgggacccagcgggtgggcgccgcgccagagggctgagggccaagcggctgcgcccagcgcacgggcgagtaccaccgaggtcctctctcccgccccggccccaaggggaacgcagcccctgggctccaaggccaaggatgcttggccacggagaaccgccggcggcgggggccgcgtggccagcgctgcccgcagcgaaagcggttaggacaagctgggttccggagacccaaggaagggcagaaggcatcgggagaagggacgaggccccctggccactcagagggaggacttgccggatcccagcgctggggtgtctccttggctcccccacttcctccgcccgccccagccgcgccactgttccccttactcctcacccctttcttccctatctccctccctccctgcttgggggccttgcttctgcctggtttgtaaagtgggctttggaatttccttagttcagagctgctcttaaggatgccttaggcggggctgtttttgagatagtttgaaagattccacagtctgggttcagagctgcagtccgggaaatcgtctcacccaaacttctccaatagaaaagcctttgagaaaccaggaacctggtgccctgcagctgtgagcaaaaccactgcttccctttgcccgctctgtaatctgggcacacttcagcgagcgatgttaaggtgagacccaagggaaacgcagaactgcatcccagtaactggcctgttcaactgtagaggacacgtgaaaggaggcgtagtgaacaaaaactagaacaactttatcccaacggactctgagcgggtcacctaattattctctccaggcctgggctacaaaaggatggagatgtgagattacctttcctgtcttcccatctcagatctgccctgaactgagctgattacctctttccttcaccaaggttctcacttattttcccctccctgagacggagtttcactcttgttgcccaggctggagtgcagtgatgggatctcagtcactgcaacctccaactccggggttcaagcgattctcctgcctcagcctcctgagtagctgggattacaaggcatgtgccacgaggcccagctaattttgtatttttagtagagaagggattttaccatgttggccaggctggtcttgaactcctgaactcaaatgattcacccgcatcggcctcccaaagtgttaggattacaggtgtgagccaccacaccggccagtatttttataccctccagtggtaagcacttactgtctctccatataattagctctccatgcaatgcagttgaatttctccagcaggaaggagaaagaagtcttctaacattgagctagtaaagacagatggtggccaaccaaagaaaaaagtgcaaagtgggtctgagttagatcatgatactgcccagggtgtcagagagaatcagaaggataatgttacacatctagctatcttggggaagtgcttctaaacccttgaggaaactgtagaataggggataggagttttaaaagtaaccaggcatatatttacttttgcctgaggacaagaaatttatcattagaaagaaaaatcaaagcacataaaaagccaatattctgtttggattggtttagaacatacattaaacataatggctgtaatcttatttatcctgtggagatcatcccccttaccccaaattgctaccaatatctacttctaatatgacattcaaattctcttcacttaagggggatcatggtggctcacgcctgtaatcccagcactttgggaggctgaggagggcagatcacttgaggtcaggagtttgagaccagcctgaccaacatggtgaaactccctctctacaaaaatgcaaaaattagccaggcgtggtggtgcgtgcctgtagttccagctacttgggaggctgaggcaggagaatcacttgaatccaggaggcggaggttgcagt

SEQ ID NO: 2650 - DNA, 4001 bp, Homo sapiens
atgtccctcaagaagatactggtgtaattaattatggtatgcctacaaaatggaatacttcccagaaaataaaatatttttacagctgtttaaaaaaaaatggcatggccgggcacggtggctcacacctgtaatcccagcactttgggaggcgaggcaggcggatcacctgaggtcgggagttcctgaccagcctgaacaacatggagaaaccctatctctactaaaaatacaaaattagccgggcgtggtgacgtatgcctgtaatcccagctactccggaggctgaggcaggaggatcgcttgaacccgggagccagaggttgcggtgagccaagatcgtgccattgcactccagcctggggaacaagagagaaactccatctcaaaaaaaaaaaaaaaaaaaaaaaaaaatgggccgggcgcggtggctcacgcctgtaatcccagcactttgggaggccgaggcgggcagatcacaaggtcaggagatcgagaccatcctggctaacacagtgaaaccctgtctctactaaaaatacaaaaaattagctgggcgaggtggcgggcgcctgtagtcccagctactagggaggctgaggcaggagaatggcgtgaaccctggggggtggagcctgcagtgagccgagatcgtgccactgcactccagcctgggcgacagcgagactccgtctcaaaaaaaaaaaaaaaaaaatggcctgagtagctggacgtggtggctcacgcctgtaatcccagcactttgggaggctgaggcgggaggatcactgagctcaggagttcaagaccagcctgggcaacatagtgagaccctgtctcttaaaaaaaaaaaaagatacactgtggagtgaaaaaagtgcagcactttgtaatatgctattcttggttttactcttttaaaagaaaaaaaaaaagacgagagatacacatatgtatctatctagacacacacacatacaatgtctattgcatcagaagaaacgacatgggatttgggaaacagaagttaggagggagacttacatctcactgtttggcagtatttgaattttaaaacatgtactagtattacttcctagagactctatatcgaaagcatatacaaacaattaacacaacttgtaaagaacgtggatttgaaacctgaaagatctgctgggtattctcttctcagcaagtttacaaatcagcctcctcggcgggagagtgtcaagggactggtgttggaagcgttaacccgcgatgggtttccatccaaccactacccagacctaaatgtttggtggattctgtttcatgcttgtgaggcacagttaggggaaaagaacaaatgatcattacggataaataataaaactagctgagtacactgcgtgttaaatcctttctatgcatgtactgcccacacgatcctgtgaggtagatactatgttacccatcttagagatgaggaaactgttactcagatttgacggaagcgtcacagccagcaggtaactcacaaacgtgggtttgtagtcggctggatggcttgccaaaccacaagtgggaggatggagcacatcagccctcaacggcctcggaacagcggaggaagaccgccggggccctgcagtcaacggagcggccgcccgactccgggacgctcacctcccggccggcttccgggatgggtctgcagcgacacacacatatcccctgggacctgcttcccggcatcctccccgcgcgagcgctcacttccggtcccaagtaggcccaggcagaagcatcacctcgccggcagccgctccttggacatgctttccgctgggaacccgagctctacacccctgccccaccgccgccccggtccttgctcagcactacccccttacctgccctgcgcaccccccgcgagccccggggcccttagctgacgaccgccctcacctcttctctcttcgcctgccgcggccttttacaaacggggccaaactgttcgctgtaacgacaatcgttattggtcagagccgcccacgcgcggcaagtggccgcccacctgagctcgcgttgtcttatgggagttttagttctctccttcagagaccgctgagacactgggggaatgcggtggtagaacatacgccgacctagcggctgtaaagctcaggctctgccttggagttggagtgcttctggcctatcttactgggcgctcacctccaaggctcgtcttgactcccttctggcctgagagagtcctatttctgaatagacttttgctggtaattgatgcaaaaatgacttgagttgctggacgtggtggctcacgcttgtaatcccagcactttgggaggctgaggcggaggatctcttgaggctaggagttcgagaccagcctgagcgacatagcgagaccctgtccttacaaaaaatgaaaattaaaaaaaaaatcgcccgagattttctacattattagcagatgtcagctgcgaatttggagtttgtttggaggttcttgcccacctgagtattcacctctatcacatgtatgtttatgacaagttaactttttctcccttaagtacactttgaactacacttgaacgttttctcttaaaatgagataaaaaagagcttcctgtatatcttagttctggtccttggaatcacggaataaatctaaatgctcatcgttcatgattgaagatagctcccgagtgcaatgtgttcatggtgaggccactgtgttggaaaaccctggaatgaggttttctgctctcctgaccctagtctggctacttactagtggtagcaggttaatttactattgggaaaccttagtcaactatttataagagaagtggaacgttccggccgggcgtcgtggctcacggctgtaatcccagcactttgggaggccgaggcgggcggatcacaaggtcaagagatcgagaccatcctggccaacatggtgaaaccctgtctctctactaatacaaaaaaaaaaagttagctgggcgtggtagcgcgtgcgggtagtcccagctactcggggcactaaggcaggagaatcgcttgaacctgggaggctgaggttgcagtgagctgagatcgcgccactgcactccagcctggcgacagagcgactccgtctaaaaaataaataaataaaataaaaaaagagaaatggaacattccaggactaatgtttgtagtattagttcttaaactggaaagagagggagagggacacaatttttccagaagactttttagttttctttccatttattatgtaaactaaaaataaaatcccatgccccacagccaactgaatgaaccctcaccccttggccaaggggatgttaaactgaattctgaattctcctgggtggaaagggaggtcggacatgcctccttatactccctcttttggagtttaggcacaactgaccaccattaatgttaaaagagaaattataagaatggcagaacagactctctgtagcaatagaataccaaataataaacaagaccaaaggccatgcaaggcaagaattaagccacaccctacaaaccataacatctttttaaatgagtttttaaattaaccctgtatcgtgtggcttactttccagcctgaatcaggtatagcaccacatgataaaaagcagatgccccacccttataatgtaagcattcctttgtactgacttcgagtccttagacaaagcttaactctatttttttttttttttttttttttttgagaaggagtctccctctgttgcccaagctggagtgcagtggcatgatctcagctcactacaacctccgcctctgggattcaagtgattctcccacctgagcctcccgcgtagctgagattacaggtgcatgccaccacacccggctaatttttgtatgtttcagagagatggggtttcaccattttggtcaggctggtctcgaactcctgacctgaaatgatccac

SEQ ID NO: 2651 - DNA, 4001 bp, Homo sapiens
gatgtggagaaacaggaacacttttacactgttggtgggactgtaaactagctcaaccattgtggaagtcagtgtggcgattcctcagggatctagaactagaaataccatttgacccagccatcccattactgggtatatacccaaaggaatataaatcatgctgctataaagacacatgcacatgtatgtttattgcagcactacttacaatagcaaagacttggaaccaacccaaacgtccaacaatgatagactggattaagaaaatgtggcacatatacaccatgggatactatgcagccataaaaaagaatgagttcatgtcctttgtagggacatggatgaagctggaaaccatcattctcagcaaactatcgcaaggacaaaaaaccaaacaccacatgttctcactcataggtgggaattgaacaatgagaacacttggacacaggaagggggagatcacacaccggggcctgttgtggggtggggtgagtggggagggatagcattaggagatatacctaatgtaaatgacaagttaatgggtgcagcacaccaacatggcacatgtatacatatgtaacaaacctgcacgttgtgcatatgtaccctagaacttaaagtataattttaaaaaaattaaaaaaaagaaagaaaaaatcctccagtctgaaggcattaagttatcaaaaagcaaaatattaaaatataaaattttagatgggcacccactgtgttgccctgattatccccctagaatgctacatgctggaaagaggggccttagcaggtttctaagtctttaaccttcaggtggaaaaatggggaaacacacaagagacactcctacgtatagtttcagaaagaagtttaattaaaaaacagcttttgagaataaacattctggagatgcttctaaatcttctgggtttcttttggttgtatctctttctccatacagatttgttctttcaactcaaggactatcaactctttttttttttttgagactgagtctcactttgtcgcccaggctagagtgcagtggcgccatctcggctcactgcaagctccacctcccgggttcacgccattctcctgcttcagtctcccgagtagctgggactacaggcgcccgccaccacgcccggctaatttatttatttatgtatttatttttgtatttttagtaaagatggggtttcaccgtgttagccaggatggtctcgatctcctgacctcctgatccgcccgcctcggggtcccaaagtgctgggattacaggcgtgagccacggcgcccggccaggactatcaactcttgtgtttggtacacaggacacaaagcaggtgtccggtaactacttgcgagggaagatacgaattaaccaaggaataaagtgttccaatctgcattctgtcttgcgtggggaacaaaaccaaactaagacccaaggatgagggtttacggttaaggtcttcagcgtgaataaaaggcggcgtgagcactaaacgccgggggcaaagaacactcccggcccagagtttgacccctcctagcgagttcttcccggccagctgcccaactttttggcctctactcctccgcgggggcaccataagactccctacaggtgggctacacttaggggttcaaatgctgcattaccgcgctcgggtgagcgactgcccggcctgcaactcaagggactcccaggccaagtggctccgaactcgcgagctgtcggaacagtattatttttgctgctacgggccatctggcccagggcaacaggggctctgcgaggaaccatagagaagaaggggcgccagatcccgcgtgcctgcccacccgtccttcctttgggcagtcaccctgagctcggcaagctgtacctcacctgtccacctggaaggctgcccgctctccctgagggtcctgggaaggcggcacgagaccggaagtgcccccctcaggtgacgtcacagtaccgcgccggagctgatccgggaagccgatgtcagcctggcgcgcggcgcacagctggctgggagatttcttactggcttggagccggtggtccagatcagagagacctcttggagggtgtcggggttttcctttctttttcatttgaattttatccgccttttattttctgtcatccttgatgtgcttctggcttctggcttccctttccttctctctcatttgttccatgtctgcccctcttttctccctcttcccatttccctctttctgcgttactagttgcatatcttccccacatacacaggaaagttgattctcatttgatcatgttcataagcatgatcaataaagtatttttttaattaaggtgttgccaactttaagaaaattcagagaataatattaagtatagagtttatttgggctcagtgcttgagaatggccactcaggagcttagattcaagttgccttgaatatacactccaattagcagcagtcggagtaggtttttttttttttttttttttttttttgagacggagtcttgctctgtcgcccaggccggactgcggaccgcagtggcgcaatctcggctcactgaaagctccgcttcccgggttcacgccattctcctgcctcagcctcccgagtagctgggactacaggcgcccgccaccgcgcccggctaattttttgtatttttagtagagacggggtttcaccttgttagccaggatggtctcgatctcctgacctcatgatccacccgcctcggcctcccaaagtgctgggattacaggcgtgagccggtttttaaggaaaggagaggaggcagagcttaacttgtttaccaagaatttatatttaaaaaacttaagctattgactggctatgctttcttccttgtatcacaaattccaggaacataaagataatgggtgaggcagctaataaagaacaaaatgcctttaacaattgccctaaggcatgggaaggcgtggcggaagccagtattcacttctgtccgggtctaataaattttgcatacctcacatagctcagacagctctgggctatttttcttttcttagtatgtactttttttagacataatactgttgtacacaataatctacagtacagtgtaaatataaattttatatgcactgggaaaccaaaaaaattctgtgaactgccttattgtgatgtttgctttattgtggtagtatggaactgaacccccaatatcttcaaagtatgcttggatttaaaaaagaggtttacttagctcatggttctgcacattggaaagctcaaggggcatagtgtgagcatctgctcagttctggttagagttttttgtgcagtgtcacaacatggtagaaggtcaaaggggaagctgatacatgtgaaaacagaccaaacaggaggtggaaaacaacccactctctcagggactctctcttttccaatctctcaagagctgttatcaaaccaaactggagtccaattgcctgtgcagcaagaccaaacactgacatcaggattatagtgaaagaaagtgaggcatttattgtagggtcccaagcaaggagaactggtcagttagtgcttaagtcttgaactccctaattgtttataggtaagggtttttaaatgcaggggtgtcagaggttataggcaaagtcataaatcaatatatggaggttatatattggcttaacctaaaaatgcagtgaggtaggatgcaggaattggacaccagaccaaattgaggactagctaaaacaggggcagggaggaagcagctttccatattaatgcccctttccatggcaacaacctgacaacccagaggttaccacccttttcctagaaatttctgcataattcaccccttaatttgcctgtaattaaaaatgattataaatatgacagaagaactgcctttcagatgctactctggacacactgcctatggggtagccctgctctgcaagga

SEQ ID NO: 2652 - DNA, 4001 bp, Homo sapiens
ccctgtctctactaaaaatacaatattagctgggcgtggtggtgtgtgcctgtagttccagctacttgggaggctgcagcaggagaatcgcttgaacccggctggcggaggttgcagtgagccgagtttgcgccactgcactccagcctgggtgacagagcaagactccatctcaaaaaaaaaaaaaaaaaaaagagagagagagaggaaggaaggaaggaaggaaggaagggggagggggagggaaggaagaaaggaaaggaagggcaggcacagtggctaacacctgtaatcccagcactttgggaggctgaggtgggaggatcacttgatgccagtatttcaagaccagcctaggcaacacagggagaccccaattctacagaaaaatttttaaaaatgaggtgggtgctcactttggcagcacatatactaagactgaaatgatacagagcgtagcatggcccctgcacagggatgacttgcaaatttgtgaagcgttccataaaaaaggaaaataaaaaataataaaaataaaaataaaaattagctgggtgcagcgtcccacacctgcagtcctagttactatggaggctgagaggatttgagctcaggagttcaaggttacagtaagctatgatcacaccactgcattccagcctgggtgacagagtgagaccctgttggggaggtgggggtgggggcagtaggggaggaacgtgtgtagtatgtgacaaattgaaattaacatgtgcttcatgtaagatgtctacatggtaccaatgtaccttaggcagtcagaggtaaggatttggaaatcactgacatagggttaatcattaaagtcaaggtagtggagaacctcactgtataagatcagagggccaggaggaccaaggtttaaatgctcttcaggcattccccaacgctactgattttgcctgaaactaattgtatacctattgtttcacaatctccagagtataagttttttggagaacatgaaatcaagaaccctgggtgttttaggagggaaaagaccactgtattagttcaggtctccggagaggtggtcagaaaactaagagccggtgctcagtatataaccatttaattctgtttttcatcttctttaaagacaactcatgacgagaatcaagggattcaggtgaactggcatttccagcaggtttaaacaaaagtacatccctcccccaacttgttttccaagtttattgtatttccactataaaatgatttcaagttctttacacttatttggaaacaaaaatcatacacaagaaaaaaattaagaagagttaacgaaaaaacattcatccaaagaaaattatgactaatccctctagactcttctatgcatagtttggctgtcaaactttttcagttatactgtgcaactttgtatcacggttttcatctaacattatatattagcatttccctatgttatttaaaagtttaataaattagttttagaggccacttcacatacactcagtgaagtgacataatgtactgaactgctcctagctgtacccaactttatcccgctacccgctataaataaagctcggaccgaggtcttaaggcttaaagcatttcctgactttggatgacttccttgggacatattcccaggagtgttattcacgagtcacggtcataatccctcatttacacccacccctagctcgatcctcatcccgcgacccctcacacgcggcccgccccattctcctcatcctctctgcacgcctgaatctcctccttcccgccccctacccaccaagagccgatccacttccctcctgaccccctacagcctccccacacccgccaggcccggcagcagtggagatgaaataccttaggtctcactgcctcacaaaaacaccaatctctctgtggccgcccaacatcacgccgccgcacataagaagttctgggcagccaccggaagcaccggccctcagtcctctgataggtgggcggtgatatcggtcctctgataggtgggtggtcctctgataggataggcacgctccgagatggccccgtctattggcttttgaatatgcacattagcagagggttcgtcccactggccaataagctctggctctgccgcacggatcgctgggagtggtagtccccgtaaaaccaccgaccgcaagcccgccacattttccctcccttaagcacttgagctctttccccacttctcgtcggttctcttgtctaaggagtccaggagccctaggatcaccacggctttttaaccttctttaaaatctgataaaatctctcaggaaaatgttcttatctgtacacaaaatactgtgcattgagctgaagccgctgcatgggcctgtcccagctacaaatccctgttctaccccgaccctaagcgtgcctgctctggccgcagcctatggatttagtgcgtcccttaggcttcttcagacctatgaggaattccaggtcctgaccctcacagtacagtcgacaatcatctttctttaacaacacagccagaacaccttcagggatgcagacaacctcatctgggacctaagcatccgggagagtggggatgaggaaatggaggaagaacacccttggggctcattctggaccagtttgccaggcttttctccccatgcctatcttccagtgccactcaggagaatcatatcttcacatcagtttttatgtttttctttttcttttcttttctttttttaaaaataaagatggcatgcctgtaatcccagcactttgggaggctgaggcgggcggataacctgaggtcgggagttcgagaccagcctggccaacatggtgaaaccctgtctctactaaaaatttaaaaattagccgaacgctggtgtctcacgcctgtaatcccagctacttgggagactgaggcacgagaatcgcttgaacctgggaggcggaggttgcagtgagccgagattgtgccactgcactccatcctggcgacagagtgaagattctgtctcaaaaaaaaaaaaaaaaaaaaggagagagagagagacgggatctcgctatgttacccaggctggtcttgaacttctaggctcaagcaatcctcctgcctcggtctcctacagtgttgagattacaggtgtgagccattgttccaaaaattgatatacttggcctcacatcaatttttggaacaatgcaggtaataatgagggggaaaaaattttaaaagtcccaattaccctttaaacaaatattacctcctccaaaaaatatttttctagattcctgaatgtattttttggtggaggaggaactcaaagtagaattcatttacatattcattcattcattccacagcactaatcactccatgcagtaactgtgtgtccccgtccctctcagacttagtacctggaagacagccaacctgtcttaattctattggtatccccagggcgcatttctttgccttgaaaattgagtacccaataaatgtgcgtcgagcagaactacacgagatggagaacaggggtttaggggtatgggggagagtcagcaattactggtgtcctccctccctcccccagctctgctcctacagatccaggacgcctagcgagggtaggaacctcttctgtgcttccgcaacgctctgaactgcacggcactgagcgcatctaattaaagtgatggtttcattagatagcaacacagcgagaccccgtttctacaaaaaataaaaataaaaaataaaagattagctgggcgtggttgctcgcgcctctagtcccagctacttgggtggaggctgaggaagaaggatcgcttgagcctaagagttcgaggttgctgtgagctatgatcgcgccactggactccagcctgggcgacagagcaagatcctctgtctaaaataaaaataaaaataaaatgatggtttaatcgccggcctttgccccttctgcccc

SEQ ID NO: 2653 - DNA, 4001 bp, Homo sapiens
cgggttcatgcaattctcctgcctcagcctccagagtaggtgggactacaggggctcgccacgcctaatttttgtatttttagaagagacactgtttcaccatattggccaggctggtctcgaactcctgaccttgtgatccacctgcctcggcctcccaaagtactgggattacaggcgtgagccgccatgcctggccgacttctattgttatcagcagttctgcaatgtttgggaacgatacaatctgtaaaggagtccaaaaaaaaaaaaaaaaagcatgtacccacaaaatctacaaataatctcaggacccaagtgaccatatgtcacaagggtaaggcaaggtataatcagccattcagaaacaggtacgtaactaacaaagtcagggataagaatctctaaaggctaaatattttctgtgtgcagggtgctgtgcacttagccaccaggcagtctcagcaaatcctttgaaagggtaaaattgctcatctccagtttaatctttacggagtatggggtggtgtattggtcggctctgtctaatagctggcaggaagttctgctcttctacccaaggtgacattacagcactttggaaatgttatctcaattattcttcaatcttacccatttattaatgtattcagcaaacattcatggagtgcctactatgtgccaggcattgtcttgcccactttgtaaatttgaaaattatgttcagacaagatgagccatatagctttttctttctgagacagggcctggctctgtatcccaggctggagtgcaatggcacgatcacagctcactacaacgtccaactcctgggttcaagcgatcctccccttcagcctcccaagtagctgagactacaggcgtgtaccaccattcccggcccagaagcttactttaagtcaagcaatggctggaaggctctatgtctgggccactaatcacgtttgatcacttgtatcccagtgaagaaaactcactgctaagcacttctgcgagcaatagttgaactcattagagacggataggtcaatcagggaaataaacaaacctgcttcgctccctcggagaactctgtgatgctgaactctttgtcgaaataggcccagataaggaaggccttaattcgagtcctaacccagttgatggggttggagaatcccaggacgatcatcttggttttctggtgctgctggggcttctcctccgtgctgtagctgcgctgagggcaggcagggaaagaagcgaaggctgcggggagtcccgggctgctgagcactggccaccgggagccctgggcaggtagcgccgaggctgccaaggccctagcgcttcgtggaaataacgccgctcccaagccgaggcgacagcggcagaagtagcaaagtgtggccgacggcagcctcacctcggccacagcaggagtccggagtcggacggccccgcagggcagcgaccgagagtgcaggaactggggtagcaaacgagcggccagcgccatttttatgacccttcacaccggtgcctgccggtgctgtatggaaaggaagtcggtgggaaaccgcctcagcggtgtcggagaaagagactggagagcaaagtggacctgttgctgcagcctctggtgagtcggccccgtccccgctctccagcacgcagcccaggccgaggcccttcggcaacccgccccgcgctcggacccagccactctggagtctgccggcctcgcggaccttttctctgtcgctcgtgtttccgggcggatggcgctgaggaacgctttagagccgaagttccgaagacctggaagagggcaggcgtgagcaaccatggccgggcagcacctcccggtaccccggctggagggcgtttctcgggagcagttcatgcagcacctctacccacaggtgaggccctcgcgcggggcagaacctcgagaaaccagcgagagacacgtctttacctttcggacagctgggaactggtttttagagacccagggtgtgggaaagaggcgcaggacggcagcagatcactggttggcccttagaccaagggaaaggtgcacgggggacgccgactggctcctctattgaaatttccggagaaagtcccatgtttctggggagcaagatgatggcggagagctgagtgcgagaggtattttgcctaaactctttactccgcatctgtcagtctgctccgaattaatggatttgaaggcacaacttttcactccactgagccaaaaaggaaagcaatgggattcccccggaaaactcctactcgtcttgaattctaacttacttaggttctagttccgacattggagtcttttatacctgtagttagaaccttaggtctttaaaagaaaactcatagagaaatattagggaaacaaaaagtgcttttacttgcagtgcttttcaagggagtccagacctaagaaaaacaaggtattaaaaggaaaaatccacaggattacagtaagtcagtttatggtaggaaaaatacccagcaattttcttacctgatatttacatttataagggtggtcatagaattacagttctggggccgggcgcggtggctcacgcctgtaatcccagcactttgcgaggccgaggcggacggatcaccggaggtcaggagttcaagaccagccagtagaaatcccatctctactaaaaatacaaaattagccgggcatggtggtggcccatacctgtaatcccagctactcgggaggctgaggcaggagaatcgcttgaacccgggaggcggaggttgcagtgagccgagatcgcgccactgcactccagcctgggcaacaagagctaaactcggtctcaaacaaacaaacaaaactacaattctgagtgttacaaaagtcggatgggctgggcgccgtggttcatgccagtaatcctaacattttgggaggcccaggtcggtggatcacttgaggtcaggagttcaagaccagcctggccaatatggtgaatccccgtctgtacaaaaaatacaaaaattagccgggcgtggtggcgcacgcctgtattcccagctactctggaggctgaggtcggaggatctgcttgagcccgggaggtcgaggctgcagtgatccatgatcctgccactgctccagcatgggcgagagggtgagaccctagcttaaaaaaaaaaaaggcggggttggggggatgcgggaggaatgaagtttttcttttgatagcaacctacgggagaggattcaagcctttattagtttggagacttgtactagatgggttgttcttgctctccctgtccttagacaccccctatctcagaatgtgctagacgtaagttgcctaaagggcagtgttgtgaagattagggtatgtggaagtgctttgtaagagtcatagcaaaaggtattttgtaatttaatctcttcagacaagacatacagcacaaagcatcattacattttaaaaagtcgaaaattacaaacaactttctctggccatgggcagtaaaactagaaattaataacaaaattggaaaaaaagacctttctatctggaaacactaaaaagtatgagggggcatagtgctatgagttttttgttaaacattttctaataactccataattaacactgtatattgtacaggtacatgaatagatagaccaagggaatagaatagaaagtgcagaaatacctattcctatggaaatttagtgtataataagcatgacatttcaaaaatcaataaggcacaaaatgactttttaaaaaatagactgttttttcgaggctttataggttcacagcacaattgaccaaaggtacagagatttctcatgtcctttctgccctgacacatggatagcctcctccatgatcaacatcccctcattagagtggtatatttgttacaattgataaacctacattggcacatcattttctttttctttttttttgaaatgg

SEQ ID NO: 2654 - DNA, 4001 bp, Homo sapiens
gcgaagtggtaaacacttggggccatgagggctctgaggaggcccctaatctggcctcactgggtctgaggaggttcccagggaaagtgacctgtaagttgagacctgaaagatcaggagcgggtgggtggggacaaagtccaggctaagggaacagcctgtgtgaaggcaggaggctagaggatgtggtgtttaagaagctcaggctcaggccaggcatggtggctcacgcctgtaatcccggccctttgggaggccaaggcaggcagatcacgaggtcaggagatcaagaccatcctggctaacacggtgaaactctgtctctactaaaaatacaaaaaattagccaggcgaggtggtgggcgcctgtagtcccagctacacgggaggctgaggccggagaacggcatgaacccaggaggcagagcttgtagtgagtcgagatcgcgccactgcactgcagcctgggtgacagagcaagactctgtctcaaaaccaaacaaaacaaaacaaaaaagaagctcagactcaggaaggttcaaggcagaggtgagcggggagcccgcgggcacctgggctcaggcagggccgagagctgcggtgaggggaggggctcatgcaacacagccacatcgtctgaggtgctgcccgagaccattccagatgctatgtgtgcaatggactggcggagggtgaaggtggggtgggggatctggccatggtgggggcctgagcctgcagggatacggctatactgagcactggaatgggagggggatcgcaggaccgtgctgtctggggcatggggtgagggacatgggagggcgaagctcccccgcctggccacacgtagaacggcagaggctggcagtacctggatttccgacctggcaggggtgcgtgggggccctgtacactgagctaggaaacagcagatgacaggccccgcaagccacctccacagtggcccctcttcccccaccgtgcgagttgccatcatttctcacctgaaagctgcaactgcctcccgcttccactggcgcaccccgagtaacacctgacacgcagaagcaggggattccctttcaagacgtaaggctggtcagaccttcccgagcttctcatccccttagaaatgaaatccagactctttacctgggtctgcagacctgcatgtacacacccactccactgacccagccccatctcccacccctcactctgctctgaccactcacagacgcgcctgccacagggcctttgcgcttgcccaccctccgcctgaaacatgctttcctcccctaaccacgtggtcgatccccacatcctctggctccctctggctccccacatgaaagagcaaggggcatagcccgccccttcctccctgctttccttgtcttcagagcttgtcaccgtctgacttaccgcacactgggtgggtgattggtctccatctccctcactggcgtgctgtctccccgagggcctggactccatctgctttgcacttcacggtctcccagcacctgcagcagtgcatacaggagggctcagtgactgcatgctggagcaaccgcctcccagccccagccccagccccaggccatggccacctcctggggctctgtttcccgtgcttggaacagtaccccaccctcacctgctctttccttcccaagaacaggtcgaggtctcttgccctccttcctgcctccccgcttcccagagctaatcataccctcctccgtgtgatcttggaatccttaagcacatgcattcttgactccaagaccagacaccaggcctcctccattccagcacaaccacagttaatagccactgtccaccaccatgtgcccagacctctgctggcagtgaccaaggatgcagaagcagaagatgcacacccacgagggctggcagtctccctggagagggcacactaacatggggacaacatcctagcacagcatgagatgcgtgtcagtgagcgtagctaggtggcaccaactccctaaggctcagagtgagacatgggggtggggggaggggatggagggaagatgggatgggaggtgccagttttgccacccacagacttaacctgagtcccagagcacataactggtcaacagcagagctgggcctggctgggtccatcgggctccaagccagcggtttctgaactcagaatggcccccattggccgacctctttggacagaagcaactaactcccacctctccacgaaatcccaagctcctaagcaacttccagaggctacagcacaatagtgagcagacacacaactcacaacgtgggccccgcacatgacagcgacgtgggcgagatgcagccccagccgccagttcacaggagcgagggctgccagcctccacatgcccggggcacctcctcctaaccctggtccagagctcagggtccctctccctaaagcccacctgagacccagaatagccttctgcctgggtagctgcttcccctggtggctgcgagtgctcatcaacacttattataagaacattataggaaaatttaaacagaaaaatagaatagaaagaaaaactgctcttactcccaacctgccccctaaggcaccttttcatttctccacgtgggacaccttcctctctatccatatgtacacatttttatgacaacgtaagcacagtatacccataactttacgttctgctattttatcattttcctgtaaacagctttccctgtgtttaaatgtgatctgtgtatttctcatctagagtgactggttagcactccattaataaccggctctctgagcaggcaccctgctggctcagccaccaccaatgccatccactactttcccatcaggtccactacggagctctcaggaacatggtcaggccttactcagagctcatcaagcattttctgtaaagatagaaaatacagaccacagcagctattccagtctcttatccatggtgaaggcagccacagaccatacgtaaacaaacaagtgtggctgcgccccaacgaagctatttatgggccctgaaatttgaatttcatagaatcttcatgcaacacgaaatgttcttttgatttttttttcttttcttttttagagacagagtcttgctctgtcgcccaggctggagtgcagtggtgcaatctcggctcactgcaacctccgcctcccggattcacgccactttcctgcctcagcctcccaagtagctgggactacaggtgcccgccaccacgcccagctaatttctgtatttttagtagagaggggctttctctgtgttagccaggatggtctcgatctcctgacctcttgatccacccgcctcagcctcccaaagtgctgggattacaggcatgagacaccacgcccagccattcttttgatttttaaaacatattcctagctcctggtatgtataaaaccaggcggtgaaccagatcccacccacgggctatttcctgacccctgctccgttaacattggaggatccaggggtggaggaaggaaagtcctagaaaggagtggaggaggagggtgggaactgaggaagcaaaggaaggcccaacagaccactctctgtgttccagaaagttctaggacttgcttccaattcccaaggggcctgggacagtccagctctctgaaacgccccaaacagagcaaaaccgaaggctgggaccatagagatggctcagcacctcatttcctgatggaggggaagggtcaccaagagagatgagaaagaacagaccccaaatccactaactgtcccctcatccgcccccagcaatgtggtgattccagcctttgacacccccacttctagtcagcttgtcaccagctcacagtggcaaaagtccccttccagacaatgccccacaagtctctttttaatgccaagtggcctaaaatgccaggaaagatccttctgaaatgtaaatcaaacttctctctgcaa

SEQ ID NO: 2655 - DNA, 4001 bp, Homo sapiens
gattgctgtccacaactgctcagccaacacaccaagcatgaaagatcatttccagtaaaattatcttaatatacaaaggggattgaaaatgggagactgcctgttgacaaaagaaagctaacaatgattaacaatcaccacattctgtcaataagctaccttgagtgttactatcatgatcagattagtgggatgaaggtctcagtctgtcttatatttctcgtgcttctctaatctggtgcttcctaaattgaagttaactaccaagatttcaaataataccacaaatagaaactgttattcccgtactgacgacagtagcagtacatcattagaaaagcctgcaccccattttcactggtcctttcaagtaagcttccagtcattgtccaaccatctctatctaaatcaccaaattcttcctcattttccaatttgttcttgacatcatgaaaaacatagcataagcacaggagtagtcatgaagacagagtttggatttaagaaggagaaatgagaatggaaatgagatcacaggctcttcaatttcaactcagaaaggcttgaaaacatttgtgtttagtaccaccgacaagcctatatcctctaacaaaaactaataaaagcacattttacttctctttcgtatattagactcatctatttttagcccgtactcgctcagaagtaggggaaactaccaggattctcttggacaacgttcccagagaattcataagcccattactttggaaagtattgccttaggacagtggtggtcaaagcatgctttctgggccagcaacaagctcgttaaaaatgcaagatttcgggccacattccggaactactgaacgagaaactgaggacggagcccaacaatctgtgttttagcaagtccctcgactcattcttaagtacctaaaaagtttgagaaccacaggtaaaaacttactgacataattaagctctacgtggcaagaggacctgaaattcaacaaagatagggtactaaggggaaagccatatgaaaaacaacaaaatacgctacataaaccccaaggaaacttccagtaattctctatcacttaaaacatcacttttttcctttctcacttttctcctattatcagaggccacaccagctggaaaagagcacgcactacatggagagccaggagccctgaattctcctcccggaagtaccatttacagatgttgtgaccttaaacaagtcacttcatctctctggaactgtttttatcatctttaaacgattagaaggtgtggaatggacggtttctcagatgctttccagtcctgacagtccatgatttctacattccatgtctattccacgcttctttcttcctcaggtcggggcttacacacaggcagggggtgtcgcctgggactcctctttacaagccatcgggactcagatagataagccctatttcccaagcattcctgatattctacggacgtctcatttttggagagggggcgaggagcaggagcgaggagacagctgcctggtctgtgtgggtggagagtgacacaaacccggcgggagtgtccgtggttgccgagggctacttaaggcaagctcgggtgcaagcgcctcacctgggaaggcccacccgcccaccctccgatccggcgcgcccaacctgctccagagtgaggagaaggaactcctgggacagcagctccgggtgcagcagcagttccgagtccgtgcagctgcgaccgcccacatcccccgccatggtcgtcgccaggagaccccagtcggctacccacaaagccccgcgaaggaagcgttgcggaagtgacgtactcgggcggagactcgcgtgtgtcgtcactctgagtcgccgcatgccgggctccttctctcgctgctggttcgggtgttggggcctggtcccgcttgcaaaagctcccacggaccagagaaaagaggaggatgtcagacgtagaaacaaatggcgtgtcaagtttcgcaggaagagagggaagagtgaagctccgggagccagccacgattagtcgcgccttctgtgacgtccaatggcagaggtcaaagggattcctggggcaacctcgagggaaagaattctggctccgagggccggtgtacagtgctttaaatatggcagtggttatgtgtgaaattatcgtgtttttctgtttaacctgtttcttgtctcttcatcgcctttctatataatgtaagaccagaggctttatgtagtgaattccctgtaaccccggctgcttggacagataggtattcaagtatttgtttcttgaagtaatcctctgaattaacttgctcacatgtaaaaaataataacgggctgggaaacgccagtaatagccgccaaacgtttgttagacatttacagtgtgccagggactgcattttacgtgtattatcacattcctcagaacagcctaatgaggtatatattactagaatgcctatttttcagatgaggaaactgatgcatagaaaggataatttactcaagagcgaggaagtagcaagcataaaatccaagtacatttttttctgcatgtattaataggtacaatgaagtaactttttaaattgctgtaggtatcaatcatagtcttaattcccagtaattcacttactaagaaatattttctgcttctctttcatcattcatgggagagatacatatccctaaatattttgcacatttaaaacttaaacttgggtatggtggcttatgcctgtaatcacggcgttttgggaggctcaggtgggaggattgcttgagtccaggagttccaggccagcctgggccacatagtaagaccccgtatctacaaaaaataaaaaaaaaattaaccgggcatggtagtgtctctgtagtactagctactcgggaggctgaggtggtaggatcactggcgcccagcaattccagcctgcagttaggattaccacactgcacttcagcctgagcggcagaatgggaccatgtctgaaaaaataaataaaaaataaaacttgcaggtatgttctgaatgtttattgtatgcatcctctatgaggtatcattttattggaaattattgcattgtctacaaaaatatgaagaactctgaagatgccaaaagataaaccgtgaaagagtactagaagtgagctcctcaaaaagataaagctgagaagtgtttcccaatttttcttactcatttatgtatgtaatactttatgtctagaaactgaatttcagagctgggagggaacttaaaagttagtccagttctttcatgttagtgccaagaaagctgatcagaaagagattaaatgacttgcccaaaattgaatagtcttaaatctgagctgaggcaggcgtctgaatgtcttaaattggagttaaatgtattagcgtcatagtattaacatcatcatattccatatctctcaaatctgatttgattttcattacaatagagaaataagtgtgattagtattatccccatttccttcaccgggaggcacattgttttagtatcaaaagcagctaccttgggagaatccggggctagaaacctgacttcatttcaagttttactcttgttgcaccaaaaccttgggtgagttagtttctcagcctcagtcccctcatcaggaaaatgctgtgttagcactttctgtgaagaatgatcaaaggagtggagattatggagattataaacacacttgacacagtaagtgtttaagaactggtagctgatttttacaaagttatgggtcatagaaggcagtttagagaaaagggcaggctttggagtagctcagttgtattataaccttggcttctttactcacctaggacatacattctctctttagctgtagcttcctcccttctgagatggaaattataagccatctcacagtgttgtgaggattggagctcaagtgtgtaaaatgcctcctctgtgggctctc

SEQ ID NO: 2656 - DNA, 4001 bp, Homo sapiens
taaaaagaacctgacacctcctctctctctgtctctctctctgtctcttggtccctcttaccatgtgacatgcctgctcctccttcaccttctgccattattgtaagattcctgaggcccttaccagaagccaagtggattccaggactatgctcgtacagcctgcagaactgtgagccaaataaacctctttataaattacccagcctcaggtgttccttgacagcaatgcaaaatggactaagatatccatttttgagaatttctccaaaagaactgaaatcactcccatgcccattgtagcactacacataatagtcaaatgtggaagcaacctaaaagtccattgacaaatgaataaagaaactgcacacatatatacattcacccttaaaatgggaggaaattctgcgatatgcaacaagatggatgaacctggaggacaggatactaacaaaacagacatggaaagtcaaatattgcacaattccacttctatgaggcactgaaaatagactcctggaagcaaagactagaatggtgggtgccagaggctgggaggagggggaatggggcgttgctaatcaacgggtatgaagtttcagtggtgcaagatgaatgcatcctagaatctatcaggctgctcacttaaaaatgtaatcgagatcatgccatgttcccgcttaaaatcctggatggtgtctcctttggaaaaaatgcatccagacttttataagggctggggtggcccccgctgctccccctcatcctgtggccttcctcactccctgtgcctcagctacacgaattctttgttttgttttttagatacatcaaactcttggctccttctcctatttcatgtctcagcttaaatgtctcctcctcagagaggccttcagccggctctgcccccgaccctgaactgtttccttcttaccgctggtcacacttcatacagatttgtacttgtttgcttctctgcttgctttttggctgccctgtcctgagtatgaaggctcggtggagccatggccaggtctgtctagtcccttgttgcagtctggtctcgtttcagagcggctcatgggtatttttggttgaatgaatgcatgaaggagcatcctttccccgagtcaggtcagacagccagctcctctaacccagactaggccagcaggctccagctcaagggattaccggccgcgtcgcagtcggaatgaacgaggtggggctgctctgacccagcggcatctggtcttggcttccatcttcctcgcttcttaggctcaggctcgggtctggctctgggctgggctggtgacccaccttcccccgggcatgccatgccctctgtccctcagccagatcatttgccctcccatctccctttctccaaaaccttccccaacttgcagtcaggctgcggagtcagggtggaaaagggagggcaggtactcaccagcgctgctggccccgccgctcggcctccaggagctcccgccacagctggtcctgctgcacgccatcgcaggcagctccctgagccacccgctgcgccttcagagcctggggggcctggcagccaccagcaagacccctgctggccatagggccaccccgggcagctggggagaccgaggctggtggcctggtggggggcaatcggtacccagctgatgtggttctctggagcccaggggtggggtggctccccatggtgcaagtgtgtgtgtgtgtgtgcgcttgtgtcagagagagagagagagagacctgtgcctgagctcagctcaaacctcctcctggaacactctgtccctcctaaccccgggagagcctgggcagggtcctcctcactgtccctttaggcctcgagctcagagtggccgatggggacagggctctccgggctggggagagcatttgagcccagtttcgttttgaactcccgcctgtgctgtgttgactgttgtcctgggaacggacagctcctaggaaaggggcgggccccgtgtgtgtgtgtgtgtgtgtgtgtgtgtgtgtgtgtgtgtgtgtgatctgagccctagggctggggggcagagagttcctgactagatgccacgcccagttcagcagccccctaccccaaggccggagtcctccgcacagggtgggggagggggagggagcaaagctggggctcctgggggccacccccaccattattgcacttgcttccggcagcccgtcaggccgtggggcgatgttagtcctgtgctgccccctcgtggatgctgcgaggctcgcaagaaatggtggccctgagggcgctttgggaattgtggatcaggcatcagtgtgaagcttcctgcttgtttgggaacgatggcggaagtcatgagcttatgttgggcgaggaaaatgagtgcaatgcactaggaacatccactctgtctgcaaacccagagcgttcacacagcactctgctttatctgagacctcccagccatgcctttccaacgccattctacagatgaggaaactgaggcccttaccggcaagattaagtgaccgcccacggtcacacagtcagtcaccagctgaaaggaacagtgagaatctgagggcttatggtccgagccctcagccctgtttctgctctaactgggtacaaccaggctccctccgtggcagcctctcctggtctggctcagctgagctccatggacgcccgctgctctcatcacttctgcctcctgcactctctgcttccggttctctgagttttgtgctgttccggtaggtgctggcagattcacagttccttccacgcagcttctctgtgggtccattcagctggcgcgctgcttcctatctttgtaagggaagagctaagtgcagacaaagccctgacgaatagaggcctgcgcagagtgcccggggtgcagggcagcagggcagccagtgaaccactgagctcgcactgtagccagtcctgtgtgcccctgctggattctgcttctatgagggaggcagcaaggagttgggacttcacaggtgaaaggacttgccaggtagaaaaactggggtgaccacaaaagcttggatgcaagagagagcctggtattttgggagatgtgggggaggagacaaggacgggggtggcagggcacatgggggcaggccccggggtattttccacggtatcctgcacccagtggggagataccgatgggctgtgagccccaagggagctgcagggaacagaaccatcaggacaggggcaaaaaacaggtgaggtcaccattgccatggcgtggtgtgggtgagcagtggcaacgaagcccctactgggctcgggcggagggctggcgtggagaagacagggctgagagccaggccagaaagagctgccagcttcgtcttcccacacttgcatgaggacggagctgagggatgggaccttttggaaaaacattagtctaaaatcagagctgcaggcctgggactctgtctctcctctgttcctccccttggagctgggatgacacagggtggcatctagtgacttaaattttcctggtaaagatgagcacagcaggagtgcggcggggtgggcctctgtgagctaggaccctgggtcaggcttttctgagtgctgttttcgtggaggtgtctgtgctccctgcactgcgacgacaggttcctgccatgcccaaggagcagcggttctggcttccctgaacccccagaaggcatcccgtgagtgtctttagagaggacggtgtgtcctggggggtccttgctgtgtgtcctgggaggctttgtcaggctgaccgcaggctgtggccctgagcagctgggaacagccatgcagtttgctcagatacctccagccctggccacaggctccagacacagggaccagggcaaaaaaggccagcaagggcatctgtgacaaaccatcacaactgattgagttcctgatgtatgtagaggctgaatagttcaacggattt

SEQ ID NO: 2657 - DNA, 4001 bp, Homo sapiens
ggcaggccccagcgccgggcatccccaagcagatcatggcctctcgcgaaggtgagctgaccccacccgctgacctcacggaggacatgagggtcagatgaatactagggaggtgactcgaggcaacaaagccctgtgaggactgtggtgactcacatgtgacaaattctgttccagtccccagttcccttccaggacaacctgaccccctggaggatggctgtaccactcagggtccccatcatcctggcccctgcacaggctgagccctgtcctcccagcgaccgtcgccgtccaggcagcccctgctgaaggagccctgggctcagactcaccctggaccatatcaacaaggccccaaaggtgggcctggtgctgtggctcacacctgtaatcccagcactttgagaggcccaggtgggcggatcatctgaagtcagaagttcgagaccagcctggccaacatggtgaaaccctgtctctactaaaaatacaaaaattagctaggcgtggtagcccatgcctgtaatcccagctactcaggattctgaggcaggagaatcgcttgaacccaggaggcggagtgagccaagatcgtgccattgcactccagcctgggtgacagagtgagactcagtctcacaaacaaacaaacaaaaggccccagaggagagactgaggccagcccctggtccacgcagaagcccagcctcagagcccacttggggctcaagacaccaatagacaactcagccataagctgataagacacgggcacacacctgcacacgcattcacacccctgcactcacgcgcacgcaggcaggcacacacacacccctcccacctggtgcaacatcatcagacactggaagtgggcacgggatggcctcggggagcctcgaggtcacaggctgtgactggcaagagagccgcctgcccagagccgtgtgagggaccctcctgcaaggccaccagtgaagcagctgccccagactccagccactggacgactggcagccgtggaacccccgtgcaaacacacacgacacggaacacgtcatctgtcttgttacaggcatttggagctggaagacctaagtgaggtctcccgacttctgtgccccaacacactgttcacacttgcacagtgtcacacacgtgcacacatgcctgtgcgtgcagtcacacacagaagacagtcgccaccctgtgtgcacgtacatggcaatcacacacatgtgcactcacacacttgcacacagacacccacacagcagcccctcggtacacgcagatacgcgtgcagagtgggctgtgcctgtacctggtgcgatgagactgtggtgcttgcagtgtacgatggctgctaccagcaggtccttgaggacacacaggaccttgctgggcacaatgtgtccacggcacttggcgtcaccctccgaggaggcagtgaaggtatcctcggtggtccaccgctccaggccagccccttccctgggcacacccaggtggcataattcaaggccatcctccggctgggtggcctctggttcctcaatcagtagagcctcggcatccacccacaggggcacctccatgtccattgggtcctcagaggagcgcagggcgaactggaaggcctccaggccacgggagtagtccacgatgaagcgggggtccagggcatgcacgcgctccagcaccgtgagcagcacgttctctgcgcgctggaagtcctgggcacgcggcgcctcccgggaccggatggcctgcaggtagtggtgccacaggggcacctgcacggccatggctgaggtggggagagcaggggcaggcatcccttcaacagtggcaggtgagggccagtggcccctgaggaggactccgcaggccagctgtgcagatgggctgtgaggaggcacctgcccaggtgagcagcaggtctgcaggtggggcctcagctcccacacagcagaattccagagtgacagcacagtgtggcaggtgaaatagctgaactatttaaggcctttgaagtgggggtgagtcagtccccagcaattgggaatgtcacaggggccatgcagggcaggcgggggctgggtttggttaccaccctcctccctcccttcagaagagctctctcatcttaggcccaaggcacggcccctgtcccagccaggcttggggtccctggagaaatattgccgctggactgtgccgtccctgggatgggagcctctgtgtgttgctgatgggcctccttccaccctcctccccacagcccaggggccgggtatctggatcaggcccccctgccccagcctccctgccaggttggagggaacacaaggcaccccgtggctcagtgaggaaggggaggcagggcggtggctgcccagaccccgctgtgggggagcccccgactctctaaggctgcctggaaggctgggaacctggaggctgcgtctctgcaatgttcccctcagacacctgtgcccggcttacaggctgcagtcctggcatggctcctgcctctgccccagctgtgcatccagccatctgggccctggacccctgggctaccagtccccaccccaccccaccccaccctgcccagcctccaacctgagaggagctggcacccacctagcctgggagctggagctcgtctggttctggagaaaagcagtctccgtggctccacctcacccaggtggagaaactcgccccaccatccccctccagcacctgcaccaggtaccctgccagccccgcccccctcccctgctcagggccgtgcaagtcccaaccagcagggagccgccccatcgacccttggccctgccagctggccgagtgcatcgggtgctcagccacaggggtgtctgcaaacagtgaacatggagatggccccacaggggcgtcgtggagatgctgcccctgtagccaccgcacgtgggcctctcaccccccggggagctgcatctgagtcagagctgtgggcagaaccaggatcccaggaggggtggggcagggggcaacagccactcacttcctggtgcttggaagcccctatgaggggctgcagcccagtgagcgggtctctgcttccatgcctcccaggacagggagctcaccacctcacagggtagcccacggtcaagcgagagacagatatccctcctccaagctggcccactcctgttccctggagttgcttagagcacgtgtccccctccccgagggcagccattcaggttcaaggccccatttgtcctgggccctcacccacggcctgcctaggtccccacacacagccgtgtgccacactcctccatctccacaggactctggcctgggggaggtggacgctgctgcagggcagctggggtcctacccctcaccctcggccgcagtggcccagggagctcatctgcctgttctgggccttggcttcaacatctgtgatttgatgacaccttcagtgtcccagctcctccttcccaggaacctcccggtgttctgaattcgcccaggagacccccaaccacaccccaatctacccaaagtgcccaggggctctgagccatgggaggggctcggcttctcagcccccaagctgctccctccagtggccacagagcagggcccttctccctcgggagcggcccccaggctttgcatcctcctttgcccctaaagccccctctccactgctgtcaacaccaagagcacaagaccatgtcccccctttcctctcttcagcaggggattccacctggctgacaccctgtcctgtccttcgctggctctggcctcctggctcccaccagttcctgagctgaatccagctggttgccccaagggaccccactctctccacctgtgccccagctgaggtcagagcctctgatgggccaggccccatccttgccccttggcccttctggcaggtggtgaatgacatggtgagctccctatggctggaacggtgt

SEQ ID NO: 2658 - DNA, 4001 bp, Homo sapiens
ccactgtcacgccagctctcgtggttgacccggtcgaggatggagaggctgtccaggcgatgaccctgcagggagcccagctcccccagcagcctcgtgagcaggtagtcagtggaggtcctggggcccagacagacgcactgggtcagcccccgccgctgttggcccccagcatggggagcttctgagccccggaggttcgggccctggccagggtcgtgctgtgctgcgtctgctggtgggacccagccggaacccaggcttctcgggagctgctgtcatcggctgtgcagtgtgcacgcctgcttttcgtggagactccctggccctgaatacggagggatgtaggagcctccaggccagtccggccctttgtgtagacaggaaggtgcctctcagacctgcccaggttggaaccactcagcccgggggtgtgacagctccactcatggccccttcaggaagcccagggcggcagcctccaggggtggccgcatgatgggctcagaatctctgctccacaccccagccccgcctatgcccacagctcagagcagctcacaccagatgacttgctgcgtgcatgctggatgggctgaggtggtggagccttggcaatgcaccctcatgggcccacccttcaaggagccacaacaggggccagtaacgcgcccagtgtcccccgcaagcctacaggatgtggggcaccaaaaatgtcattttcccatttacttgcaaaaatgattctgcccagcccagcccttccccttccttggcaggcgggcaggtagtttattccacaagcttggacgccgcccctgcctcgcgtgaaggggtcagaggcaatgcagggcaggtgactggcgctccgctgagcctttccttgcaggggaaaaccacaggagggacataaccagctttgcaaagccctccactgacgagcgtggattcaaccatccttccagcaagtgaggcggggtgagccaccctgaggggctgttgcagtggtgtcagatctggatggggtgcggtccctggccattggctaggggtctccaggggagctcagcctgtgcccagtgcccctctccttcctctcacagacatcaatgtggacgcacccccactgtgtgggaaccctctcagcttctctgggaacccacctgcctggacaggttgcctgacctctcagctattttcctgccccaagcaaaagctgggtagtgaaaggtctggtctagggcagccatccacaattccaggtctctcatcacccagtgtcagatgccaccaggcccctttccactagggagaggacacatttccaccctccctacagccagagaccccagtaatctcagtggaacacacatgcccatgggggcagaggcagacggaggaccctgcagatcctcctggctggggccaggggagcatgggggcagtggccccttcctgccccctccccaagaaccttgtgaccaggagggtgcgcctacctccagagctgggcgctggccggcaccaggtccaccccttggctgaggatccttctcaagctgccctcagggaatccgggcatctgctgcaccccctccagggcaggcgccccaagcttccttctcaccacgggcaccacgtggaagctgattgttctccagccgctggacaccagcaaggacaggtggagctgctcctccctcaggctggccgcgttcagcgaacctgcaaagacccaagtcacgccggcccctcgacttgcctcacctgcccaggacactccacagccctcctcctgctgccaacttggcccctgcccctcatcacctctcacctgcagccctctctgctggcccccacctgcaggctgcagctccccaaccccagacacctgtgtccatccctggacctcagccaagtgaggagctggccaccatgcctgcccaatggtgacagtcctcggcacaactgtcagctcagcgacttgcagcaccagtgatgacagcagcgtcctacatgaggttttcctttgccaggcaccaccctcaccccacaccccaggaccacgcctgctgtgccttcccaggccttcctgagcctgctcactctgccccagccctggggccaaagtcccagccctcagctagccccctacctcctgacgatggccctggcatctctgctgccttctctgcaggggaggaggcagcagcagtccaggctggggccacagggctcccactccagagctggagagggtggagcgaagctaggcctttcctccccagaactcacctcctcctcccccctgccccctgccccctgcccctgcccctggaagcttccctgagagccccctgccactcaaatcaactgcatgcatgggaagcccatgttggatccagctaggggaccagtctacatgatgggggcagctggggagagagggacaggcccaggctgaggctcagttcccatggagagaagaggcggcggcagctgccagtagtggagagccagctcggccaccgccgtttctgggctgcccaggccagcaggctcacagtgacggagctcagccacccccgtttctgggctgcccaggccagcaggctcacagtgacggagctcagccactattcctgaccaggtctggatcctacacttcccagagagcccttgcccgagagccccatggcccctgtcccccacaggaggcacattctgaccaagaggtttcccactccctcccctcctcggaccccacccgggacccagcccagtgcccacttcactaacacagagcccagagtccctggagggcctgttccagggtgtaatggggctggagctggggctgggggcattctggtgagtccaggggccctctggcctctgcctcagttgccctacccccccaaaaacaaattaatatccgagaatgaagaggtgaggtgtcactcagggtgactgcagacacccacacggcccccgcctgacactggcccagggaccggaggagaggccgcccctcccctccccagtactgtccagccagggtgcccaggtcacagggagctgggcccaggcagcatgctggcgtttccccgagggaatcctggcatgtgccttgggaaaggtccccatcatgagcgagcatggggcctgccttcccaccatcccaccgccccagggtccttccggagggagcctggtcctggctgtgtggacccctcagcccccacaatctcccgtggggcagttctggggacgcctctggggcccacctcagggcaaccctggccctgctgcctgggcggcccatcccacaggggcctcagttcccatcaatgaaagagaaggagggcccccccatgcagcacttgaggtgcctgccattcagagccgcctctagtggccacacacctcatctgccgtgggccacgcacgctcactgcccgtgacctggcagcttggaaggcagctgcaactgcaccagcccggccacaggccacagccccgggctggtctcaccggttcccagggtgggggcagcctgacccctgtcacctaggctgccacttcccctttaaggtgagtgtcaggaaacgatgcctggaatctccctgcatgcccagcccagcgcagcttcaggggctgtgggcgcggcctgcagtatcgagtctgctttctcaggaggcactctgggggcgtgaggagcctggcggcttagagcaaatccgaatgactcagggcctggcacggcctcctgctcaccccaatgggtgggcctgtctcacaggtggggacagggccaagtgaggtcgggaagaagatagaaatacccaccccatggcctgcatgattagaggttcagaagatgctggagcaggaagcccgaggggctgggggcagggtgagggctggctgggagcaccagaagctgacaccccagaggtcaggtcagtcacttaccccagggcactagacaggtctgggga

SEQ ID NO: 2659 - DNA, 4001 bp, Homo sapiens
tagtctgaggcaaaccaggacagtcggtttgcttagactcctgctccctctgcacccccagctcaccggaggataatgataatggcagccaccatgtgtgggcttatcaagtgccagacaccatgcattatggcctgcatcgcttcccttctgtcttataacagtgtcatggtatggatttattctctcctttctacagctgagtaggctgagagtgacgtgattcgcccagggcaagtgctggcgctggggtttgaacccacatggtgtgactcagtactgtcaactgcactgcctcttctgcctctcagcttgagcccgccaggccagcctaggcccctgggaaggctcctcaggagcttacctgggtggaggttcagtagggatgggtttttgcaggtctgagacaccccccgccacactgcctccagctctgtccaggttcttctctgcacgtttgcccccagcccctgaatgggacagcctgagaaaccctcaggggacgctgtttccaccgcaccccgagccctcctgtcctgtcaccgtgttgctcactgcaccccaagggaggaggctggtgcttagaaataaatgctcactggtgatttattgcatgggctgggggaaccgtccagagcaagaatgggcaagggagcagggcgtgagggtcccagggatctctggaggccactgaaccagcccttcgggggtccctgtgcagggctctaatcatagttggggtcagcctgggcctggcgtggggtgaggtggctggtcaggtagcgcatggctgagcggatgccctccacggtcctctgctccactgtctccagcacacgggtgatggtgcgcagggctgagctggtccctgacaccagcccagaggagaaggccgagctgacgcttcccaccaggctggggaccgagcgcaagctgggccccgagctgtgcagcaggtctgccacagtgctgtggccggaatccaggaagcctgtggctatggccatgcccatggtggtctcggaccacaccaggatgtctgccagggagctgatggagccctcgcccctgtccagcaggctggtcatggagcgcatgtagctgttctcctcactggccgtgtacaggctggagtccaggggccttctccccagggccacctcgtgggggccaggcgacggggacacactgcctgctggaggtggagggaagaaccaagtctgcaggtctcctaagctgtccaccacatttgcccccattgccactggggactcatcagatggtaaagcttcagcttcagggtgtggggcctttggatgctcagctttctcctcagcagacttggtggtgctggcagcctgagggccatgctggccattggcacctgctgtgacatggtcagcatcactctcgacgggctgagcctccatgtgctgggtggactgtagctcagcactcggggcagagggggctgactccggctctctctcaggaacactcgccatttgtgacatcttgtctttacccaggaggtgacttgggaaaaccactagactctgacttgtccttgcgtcttgaacctgcctgtcccacgctggattctgaaggctcatagacacttgcaggggacttggattttggctgggaagcagaggtgtgatttttctgggtgtcttctggccgtgttctggaacaactgcactcttgtctttgtctccagatgttgatatggccctgggggtggccgtcttgaaggaggcctgatctatatcctgccagtcagtggatgcgacagagctgctcactgccaagacatctgctgtgagtgggacctgaccttggggctctcctgctgggctgtccttagacctgctgtcatccacgttgcccagggggtaccctgggagtgccatgtatggggctgctggtggagccggcctccccctagggctctcctgtggtcatctatgccctttgctgcttgtggcggttggagggagtggctgcaacccagctgggctgagttgtccaagtggtgaggtcacaagggactgtggccactggtgatgtcacaggtacccatagagcaagggtcttgagcttctggagcagccttccaagtgggctaagtctatgggacagtttgttgccaactttgcaggtacatagggaaaaaatgacaaatgttcttgaaagggctggaggcgtgtgcacaggggcaagtacaaccacagggacacaggaggagtgacagctgtgactctgacaaatgagaagggatgcagatgttgatttagaacagtgtttataagggacccctcctggcacctctctgtctacactggtgcctcaagaccccaatttaggctgggcatggtggctcactcctgtaatcccagcactctgggaggctgaggtggggggatcacctgaggtcaggagttcgagaccagcctggccaacatggtgaaaccctgtctctactaaaaatgcaaaaagtagccgggcgtattggcgtgcacctgtaatcccagctactggggaagctgaggcagaagaattgctcgaacccagggagtggaggttgcagtgagccgagatcgcaccattgcactccagcctgggcaaaagcgtactccgtttcaaaacaaataaacaaacaaaacaacaacaacaacaaacaacaacaaataaccacccccaatttagtcagtgttcctgcagggaatcagtttcccagcagtggtgagtaggtataagcaaaagccaagggcctgggcagctccatttgtggctgtgggtttaacccttttgatgtagggcaaaaatctctatcttctccttgctcatctggactagaagggcagagaataacaaaaggtctgcagacctctgagtgtttcttggagaaggataaccccagatacacctacttgtgcttagctgggcacggtggctcatgcctgtgatcccagcactttgggaggctgaggcgggcagatcatctgaggtcaggagtttgagaccagcctgaccaacatggagaaaccccgtctctactaaaaatacaaaattagctgggcgtggtggcacatgcctgtaatcccagctgctcgggaggctgaggcaggagtatcgcttgaaccccgggaggcggaggttgtggtgagccgagatcgcaccatcgcactccagcctgggcaacaagggcgaaactctatctcaaaaaaaaaaaaaaaaaatgcctacattaagaagatgtttggagaggaaggctcagtcggtcgtgtctgtgcttctccaggggttatcagctaacatttagtgactgcttatgggcagaaaagggcgcatagcatccttctcatcacccatcacctctgggtaggtacggttctactagtatactcagtttacacacaggcatgctgagcctcacagagaataagcgacttactcaaagccacactattaataagagctgaatctgggatttgaaccctgtctggcttcaatactaagctttccagcactctctcatacccaggagggatattaaaaacgttgaatgagggactgggcatggtggctcatgcctgtaatcccagaactttaaaaggccaaggtgggaggatcgcttgagcccaggagttcaagaccagcctgggcaacgtagtatgaccctgtctctacaaaaaataaaacaaaaattagctgggcatggtggtgtgcacctgtagccccagctactggggaggctgaggcccaggaggaggatttcttgagctcaggagttccaggctgcagtgagctgtgatcacatcattgcatcccagcccgggtgacggagcgagatcctgtgccttaaaaaagaaaaaagatatatctaatgactggcatggtaatgatgctggcagatgcagacagaggcctcccattagaaccggttccaccacaccagcaggtgacagctgctgccagtgctgggctgcaccatcagc

SEQ ID NO: 2660 - DNA, 4001 bp, Homo sapiens
gtgcactgggtgagttacccaaccctcgtgcttcctcacagtagtataaaaataaggcactaccagagttggcatgagaataaagcattgtatgccagatgtggtggctcacgcctgtaatctcagcactttgggaggccaagttgggtggatctcttgaggccaggagtttaagaccagcctggccaacatgttgaaaccctatctgtactaaaaatacaaaaacattagctgggcatggtggcacatgcctgtaatccctcctcagaaggctgtaatccctactcatgaggctgaggcacgagaatcacttgaactccgtaggcagaggttgcagtgggccgagatcacatcactgcaactccagcctgggcgacaaagcaagaagccacctcagggggaaaaaaaagactaaggcattgtacttataaagacttgcatatacaatcagtgcttaataaatggtagctttaatttttaacatcccatttgccaagttaagaagctgattattttggtattcctcagtttccaaggaagcttttgtcttcatatttagtactctatacccattcatccattattatttcatatttatttcagcccattgtccacagaacacaaccgtttagtatattgctgtttgtcctagataaaatcattaaaatgttgagttctcctttcatttataatgcctttattactataaaatataggtcatcaagcaggactgcattaaaagtaataatcagtaaaactgatataattcattcttcctgtctagtaacttaaatctactgtacttatgagtaccactgggctttattttattatgaaatatgttaatttctttaaaaaacattttctcatgacactgctaaagctgagcttcttctttgatacttcttcgcgagatttatgttgaatcttctctgttgcacttttatagtcacagaaatacaactttctcaggcaggtcaagacaggcctcccacccctaccccagaataaggaaaatgagatgggaaggagagagaagtaaacgcgatcaatctaatggaagacaattggcagctgctgttttgttttgcccaagacaggtgatctaaattccatctatctaccactttaaattcactctaaggggaaagataaaagattaggttaaacaaccctcacccacatttattttaaaatgtaacaaaggccagccatggcggtgcatgcctgtaatcccagctacgcgggaggctgaggcaggagaatcccttgaacccgggaggcggaggttgcagtgagccgagatcacaccgctgcactcctgcctgggtgacagagcgagactctaaaagaaaaacgtagcaaaagtagcttcaaatatttttataaatattaaagtaggaggcggagcaaaacgtgtctagtaaaactacagaaggaaaaacccagtcttccggcagatggagcggaaagggaaagaaatccaatcaccatattaaagcagttgtccagtttaattagtagtgggaagaagggaaaaatacagaaaacaaagggcgaaggagaaggaaaagggaagaagcaaggggaaaagaaataaaacaaaggaaatgtccaataaagaccaggaaggaaggtccgcaggtggagacgtgcgtgagggcagggagagaagggtaggaagagggaacgagagcggcacgaaggcctgggattagagagcggtgggaaaagggtagtgggcctggtgaggggagcaggagccaggccggcaaggggcaggccatcttaccgaagctgtgatgaatgattctccacccaccaggtcttcccttattgaggtggaagcggtggcgacggctggctggtccatggtggcctcctctctctctaggctgaacctgagctccggttgctaggaggcgggtgtggcccgtgggctcccgagcgcgcgcgcctgggaccgctccgggggacccgccaggtttgtctttagtgctgcagggaagggaagcgggcacgcactttgaggtcccgcgcgaagaactgcgcagaggaaaaccctcgaaaagagacggttatgaaagcttgtgagaagaaaatctagagggctctggagttgctagagagccctcgggtaaggatctgcgaaaagggaggcttgttaagggcttgagcgtacccacaatctccattagttcccttccaatccaccaccaatcgcacaccccagacagggaggcagtgtgcttggtaggcatacttaagagaaatctgccttagcacccactttctaagattgtttctaagctcctccaaatagaaactctggggctgacttctcttgcttctgacttgcagagtggagtgagcaccagacacagccggtttcactagctgtgaaaccacagaccaccccattcttctcagtatagaccctttttattgtcagcctctctaggctgtagcttcttcttaacctaggaacattctcacctttaaaaacaaaccctccacaaccttaatttcattttatacagtacctactgtattccagggacttcacacacattagtctcatttaatcttcataccaaccctacaaagtaggtattagtttcattttctggatgaggaaacaaaggtttccttggacgtttagcacagttcactcagcatcacacacaaatggcagaaccagaattaaaatccagacctgactctagagctccactgccctataccatgaagtttctgcttccctttacaaactttcaagagtaatatggactcttttctcacttcccatactttccttaaaacatcttaatctggcctgcacacagcttttaattaaaattgcacctgaactcaccagggatccaagtgccaaatccagtggggattttcagctcttatgaaacttggccttcaattttcattgctgcattgattattccctcattcttgaatcactctcctcccttgactaccaggacttggacgctggttgcatataatgacttattctgtgcttatttccttgtctatagagaaggggataataaaattggtacctatccacataggttataaaaaagattaactcgaactgttcacaaccatgtctggcacagtgcagtcagtaaatgtgagctgtcattacctttaggacaaaagcaacatttacaatccagtctctcgcttctctctttttttttgaaacgaagtctcactctgttgcccaggctggagtgcagtggcgcgatctcactacaacctcggccgcccgccaccatgccagctaatttttgtatttttagtagagacggggtttcaccatatttgtcaggctggtctcgaactcctgacctcatgatccacccacctcggtcccccaaagtgttgggattacaggttgagccaccacacccggccacttctcttattaggatggcatgctctgctgtatcatgcttgcaaaaaccccaaacatgccatcttcacatttctatttgtctccacatatgctagctcttctgcatgaaatgctattcttttctttgaccacctggaaaatctcaagggtcagctcctctgagtagacctctaagcctaatccactaagtcccaaaggaccctgtgcctatcattgttggaagattcattttatgacaaatcgtttctcctctaattttaaacacccaaaacacggtttttaattgacccctttgaacacaaggactaaaatatttgttgaataaaccactgactagttttcccctctaagtaaatccaagactagattacagcagtgcttttcaaaaattgatatgcatacaaaatatctgatgatcttgttaaaaaaacagattgattccaattctggggcaggacctaagattctgcatttccaacaagctcctgggtgattctgtaggtgactttttgaggagcaagagactagaggacttcatctagtttcttaaaatactgggatt

SEQ ID NO: 2661 - DNA, 4001 bp, Homo sapiens
aatatatgcaaattaagggatgggttaatgcaaacagaagggagttatttagagctttctaggaaagaggtggtaacttttgggtcattgccatggaaaggagtggtagcttccaggtaattgccatgacatttgtaaactgtcatggcactgaggggaggatcatatcctaagagcaatgagagcaggtcgggaccacttttgttgccatctgctggtttcacccagtgttttcactttatcctgtctggaccagatcctgttttcgtcagcagctgtgaccagaaaacaaatcctgctggtctcttatctcagtttattttaatcctatgttgttatatttcccatcattcactttagaaaaaccatatttcaaaatagtcatgtcaacatgtttattgtatttggcattttttttaaagagaatgtttactgatcttttgaattctattttatagataactatatgttgaaaatatgtccagtaaattgatacccatgcagggtcaactttcaatttttgcagctgagcttggcaatctctagttatatgataacttgttttatcatcagttcaatctaagctatgcacgagcaattccctgttacactctttattttttatatgtattagaaatcaaggctacaaagtcaatgtgtatataagatcagttacaaatgaattgtactatgtgtgtataagattgtttctaaatataaatttgtttctctttacagaaacaaatgtaaactggccagagaaacaataggttgccaaccactagggtagtaaaactctggtccaatcctgttggagaattttctcaacccttggtagccccctttccactacgttctggaaaacagaatgctgtgtgcgtaaatccaaagaggcattagttctatcctgaaacccaggccccaagtgtgttcttaccagatctctgtttctggggttgttgagtggcttccatttgtcctcatttcttactgtggctccattcacatgcccaagcagcaccagggcaacacatagtagcaggagaggtgctctggtcatggtggagtgaagctgagtgaaagaggggatgcgggagctgtcaatgatcattgagagagatagtcagggaagagagagagaaagaggaaacatctgtaaaggcagacaaggaaggagaaatagcatactggtttatctaagttttacagccatcttttttccagattgacttctaaatgaggaccccaaaatgcaactgattagcttaaagtagcccatgataatgagaatgttatacagtgataagcaaaacaattatggaacataacatagaaagtctgaatatgcctttttcatctttggaaaaaaagtactttgttgtctccaaagaaactgcaactcttaaaataacaaaaaacaaaaccttaaattacttttaagccttaagacagcagtctttaaaaaaaagaaaagaaaaagaaattacttcagataccgagctgagaaatacaccttatacacacatctgagacagacagacacataccacaacagtgtgagtagagattgtcttccactccaaggtgtgaaagagaaactgagacacattgtagaaaaggctaataaagcttaccaggagtttggttttggttggtcctcctaggttatcctgcctataattggcaaggcaattcatgggtacttataaccaatggattgggtgccagtggaagtcactgacttgagcaggggagttaaaaaataatgattcctttttcatccagaacacaaagattcttgagagtcagatcttcaagcttcttcagggataagcttatttgccttagaaatgcggcagccactccttgaaccacgaacattttatgtggattttataaaacacacaaagcacttccacacagcaaagtgattttctccttttttacttttaagggaagggatacacctggaaatatgatggattatagctggaaatatgatgatgattatcccacctattagaacgttcttttggagatatgactttttcaagttaacagcattttttgaacagaaaattcttttgtgagagacaaaattactctttttgacctataccttgtacttttttctgagaacctcaagaagctttacaagttttaaatagtggcatcatttatcataatatctcttcaaaatagagcaagaagataacacatgtttcatggaaaaaagataaattactatacctacaacattcccttgctgaataaatgccatctgtagaaaatggtaggccgagaaattggacttgagttgtgacgttgctttggttccaatgatttagaacaaaatttaggacaagatatttattcagaaggctggtgatctcgactggaaattagcaaacctggctatagtctcagtcttgccatcttgaccctgggcaagttactatgacctctgcccttcagttgttcatttcctctgtttattcattcagcagacttttacaaagtgcctactatgtgccaggtactgcaacaggatttgaggatgaaatggtaagaataataaatacagtccttgccctcattaaaatagagtagtgggcaagacaaacattaatcaaatcgtacaaccaaatgtgtacatataagtgaacaatcatttctatgaaatagcgagtgctatgaaagtatagaaaaagggaatttgattcagtctgagagccaaggaagtcttctgtgaagaaatgaccttacatccagtcaactgaataggagttacccaggcaacctgaggaagacagagggagaagtgtgtctaaaaaggtgaacagctgtgctaggaatggggcactttaaaggtactgaaattatgccaggcgtagagggagcaggtgggatgcctgacgcaagatggggccggagaggtagtcagattatgatctttaggctacaagtaatgctaactgattaaagggttttaggcatcaaagaagcttgatcatacttgcatttttaaaaggttattctggttgcagtggggaggagagactgagctagaaaagagggctgcgcaaagccagttaggtggttacacagtagtccaggcaggaaaagatgttaacttggattagggcgatgttagcacagatgcacagattatgggtagatctgagagagatttataagggattgttaatgtactgggtactacggggaggggggctaaggagatgggagtttcaaaaccaattgctaggtccgtgggttatgcaggtgagtgggttacagtgccattcaccaagatatcaaaccgaggcatggaggagtgaagatcatcattctgtttggaatgtgttgagttagaggaggctttgagatttcctcgtggggttggagagtatgcaataggatacacagatctggagctcaaaggagaaatctgggaaggaaatgtaaatttgggagttgttggcatagaagtgaatgagattacctcagtaaagtttagaatatgaggaaaaaagggggccaaaaacttgagctttgagaaattttaacatgtaacagccacatacaggaatctacaaaagagaccctgaaggtgagggaaaatcagcaaagtatggaagcaacagaagaaagtgtttcaagaagggacacattggataaaattaggtctatagagcatttgaactgttttagtagaaagtcagattagaagggactggatggagaggaaaatgagtgagtatagcaagctcttggaaacgcagctatgaaaagaaagaaggtagttactagagttaaaagtagagtcaaggaaaagtgttgtagttgttaaaatatgagagacttgtttgtttaaatgtcaacggttaggtgagtaaatgaataccctggaattgtattacatcactctctttaaaaccccaggactttaaagtatataataatattgaaatattaaatttttactgaggttcaacata

SEQ ID NO: 2662 - DNA, 4001 bp, Homo sapiens
caggctggagtgcagtggctaaatctcggctcaccgcaacctctgcctcccaggttcaagcaattctccttcctcagcctcccaagtagctgggattacagccgcctgccatcatgcctggctaatttttgtatttttagtagagatggggtttcaccatgttgtccaggttaatttcgaactcctggcctcaagggatccgcccacctcggcctcccaaactgctaggatcacaggcatgaatcaccgcgcccggaccagtgtaagcatttggtgtgctgccaatcaaggacttatttacctttgcatccctgctctgaggccagcacaatcctgtcacacagtaggtacacaatgcacatttgtctagcaaaaagtactggaaagcagaagggtggatagagctctgcctgggttcaaatccaggctctgccatttactagctgagatcttgggcaagttgtttaacctctctgtgcctgtttcctgactgtgaaacagacagaagctttcttatgaggttgtataaagactcaatgaattaatatacgtaagatctaaaagcactttcactaatgcctaacaaaggtagtggcacacacctataatcccagcactttgggaggccgatgcgggcagatcacctgagctcaggagttcgagatcagcctggacaacgtggagaaaccccttctctctctctcttttttttttttttttgagaccgagtcttgctgtgttgcccaggctggagtgcagtggcgcgatctcggctcactgcaagctccgcctcccgggttcacgccattctcctgcctcagcctcccgagtagctgggactacaggcgcccaccaccacgcccggctaattttttgtatttttagtagagacgggggtttcaccatgttagccaggatggtctcgatctcctgacctcgtgatccgcccgcctcggcctcccaaagtgctgggattacaggcgagagccaccgcgcccagccggggaaaccccttctctacaagaaataccaaaattaaccggtgtggtggcacacgcctgtggtcccaggtactcgggaggctaaggctgcagtaagcccagatcgcaccattgcactccagcctgggcgacagagacctagtctcaaaaataaaataaaaacattttaaaaaaagtaataatgcttaacaaaaattgaccgtcatatattaaccagtgtgatctctaggtagcagagaagctggggaaaggccatttactgggttcattccgcaattatgtgctggtcgctcatcgctgtgccagactttctctttgctaggtagcggagcaccttactaaaatacagcacggtggggcaaaccggcagataaacttcttgctggctccccgatactctgacagcgatgcttaactgggggcttatgagtcgtcccagttcttggtgagaatcattcagcggagatttgggagcgctgaggtggaggttccggaaagagacgagatgagctgaaccttaggagtaagaagtggtttttccctatagagaaggggagtgcgttgcaggaagagcgcgcgggctggaggcaggcggggcgggcggcctcacctcggtgtcgcggcaggtacacctgcaggtctggcttgcggggccgcgtcggcgcgggcgtgtgccgcctcctcaccttctccttggccgcctgcttcaccttcttgtcatagtcgtccctgcggggagccgagcgggagtcagggactgtcgggccgggccaggccaggccaggagtggtggcggcggcggcgcagggcggggcggtaccgagcgatctggttccgtcggatatggtgcacgaagccgtggttcatgtccagccgccccccaggcttgcagcagtgccccggccggggatgcggccccgcctccatcaggagccggggacgcagagtcgccgccgcctcgacggccccaacaacagccacccgcccacagagctccgcgccgccccttgctcagcttccggccccgcatcctgacttccggtctgggaggccccggcctggccaagcgatgcagcgcacggagttttcgggtctggtcgggtcgggtggagtagggtatgcttgacttccaccccccggacggagggcttttgtttttgtttttttttgtttgttttttcgtaacatatcaataggaaacaaggacttcggcttacagctgataccagaaccttcagaaaaatgcaaatcatctataacacaactcgatgcttacggcggtgccttcccatcttttttctggtaataggatgctgtgcaatccatcgccatctgcgtgactttggctgactgtgtaacgctgccacttctcagtttcctcattagtaaatgggaacacctagagcacctacctcaaatggattgtgaggccttgaagtgctcaggcagggcaacagcggcgcccaggccgcaggcgccgcgaaggctctcctggcccggcttgcctcctgctcacggcgccgatggcttaactgtccccgcgggaggacccagggtttttgagggacctacgggtgtattattttcttttttatttatttttccttttttttttctttttgagaaggagtctcactctgtcgctcaggctggagtgcattggcgtgatttcggctcactgcaacctccgcctcccgggttcaagcgattctcctgcctcagcctcccgagtagctgggactacatgcgcgtgccaccacgcccggctaagttttgtatttttggtagagataaggtttcaccacgttggccaggctggtctcgaactcctgacctcaggtgatccgcctgcctcggcctcccaaagtgttgggattgcaggcatgagccaccgtgcccggccccttttttttttttttctattttttctgaccactgggttcacgtcacagcgtgtaaaattctcaagtccttttacaaaagtcaaaatcaggaattcatgattaggacagggacaaacggctggatgcagtggctcatgtctgtaattccaaaactttgggatgccgaagtgggagtatcgctggagggaggaatttgagaccagcctgggcaacacagcgagacatcgtctctacaagaaaaaaatacattaaaaaagaaagaaagagccgggcgtggtggctcacgcctgtaatcccagcactttgggaggcccaggcgggcagatcaagaggtcaggagttcgagactagcctggccaaaatggtgaaaccccgtctctactaaaaaaaaatacaaaaaattagctgggcttgatggccggtgcttgtaatcccagctacttgggaggctgaggcaggagaatcgcttgaacccgggaggcggaggttgcagtcagccgagatcgagccactgcagtccaacctccaaatcaaaaaacaaaaaacaaaaacaaaaaacagggaccaatggtggtccagccacacgatggaatattactgagcaatccaaaggaagatctgtagctcaacaacatggatggatcataaaataaatatgcccagtgaaagaggccagggactctgtatgattccatttatatgagactctaggaagtgcaaactaatctatagtgaccgagagatcagttgatttttgtgggggttctctgggaggaagaggatatctttggggctgggtagattctttaaatttttttttatttttttatttttttgaggcaggatctcactgtcgcataggttggattgtagtggtgcaatcactgctcactgcagcctccacctctcaggcccaaacgatcctcctgcctcagcctcctgaatagcatgccaccatgcccagctaattttaaaatttttttgtggagatggggggggtctctctatgttgccaaggctagtcttgaactcctgacctcaagtgatcctcctgcctcaggcctcccaaagtgctgggattataagtgtgagccac

SEQ ID NO: 2663 - DNA, 4001 bp, Homo sapiens
tatataatatatattatatatattataatatatattatatataatatattatatattatatataatatatataattttatatataatatatatataaaataatatatattattttcttttgccctcaaaataactggtttagttgactgctaataaaaactggaaaaaaaaagagaatatctatatctatatctatatatctatatctatatcttaatcattatctgactcagagcacagtttctaagtatgtcattttaaggcaccaattttgaaaataaactaatgtagtttcatagtataagaaacacatgtaggccgggcgcggtggctcacacctataatcccagcactttcagaggccaaggtgggcagatcacttgaagtcagaagttcgagaccagcctgtccaacatggtggaaccccatctctactaaaaatacaaaaattagctcagtgtggtagcgcatgcctgtaatcccagctactcgggaggctgaggcacgagaatcacttgagcccgggaggcggaggttgcagtgagtcgagactgcgccactgcactccagcctgggcaactaagcaagactccgtctcaaaaaaacaaaaaagagaaacatacctagctatagtctagctttacctgtctagaactttctatgatgatggattattttctatgataatgctatatatctgtgctgtccaatacagcacacgcaagccatctgtagctactgagcacttgaaatgcagctaatatgaataactggatttttagttttatttaattttaattaattcagatagccatatatggctaatggctaccatattagataatgcaacgttagattaagacccagttttcagggcaacataaccacggatatttacctgcagctataaaataataaacataacatgcaaaagcaaaagtacaaaagaggtgagcatcaaaacattgacatgcttaataattattgtcccttttcttccacccatccccactcttttttagggttactggatgtcatacctttgtaatgtttgtttggtttttaattactgccaccgttttctaaacactacgtgctaacttaatttgaaagccatcgctctgtcccctgcccaacacacacacacggtcctctgagaaaccaaattatagaataaatatacaagatgcgtgtcactccctgtctcaaattccgcctcttggaaacctggaccgacagctggctctttcgagatcgtagccctcgtcggacaccttccccatggggttctatggacaaagggcgccaagggcgtggaaggcacggttttggatttcgtggagtagaggaagagccaccctcagtgaatgtgtgggtgtgttcaggcaaggaaaggaaccaggcagcagccacgagggaagaatcagtgaccgcgtacgtatacacgagaggaaggaacagatacccaggcaggccccgagttacctgcacatccccagggaaatagaggacgtgatgctggggcggcggctgcggctcctccttcgctgggtccccggggaggtcctgccgctccagtccctccccggccgccgccaacaggagcaattcgttgctgcgctgcggatcggctccaggcacggtggaaagctgcaggcactgacggcggcgcacctcggccgagagggagcatcgcgcgccgccgctgccgcccgggttcatggttctggcctgagagcaggacgaggcgtttccgattccgagctgcggcagcaggagcagcaacggcggcgaccgcaggagcctgaacccccacatgggtcgccgccgcgagagcggttcggaggtggagggtggcggaggggttcctgagggagggacttcagcaggcggctcagccggcggctcaacggtcggcggccgcggcccggccgggagccggcgctgaggcgacgacgtcagaggccgacgtccgcgcgcagcgtgcgtaaggaaaggaagggaggggtgtgggcgaaatcggtcttgggatcccggagaagacggtgggcgtggcttgaggaagggcgtttgtgattggtgggttctgccgcggccgggaagttcgaacagaagtctggggaagagccggcgaagagcaaagagataatacagtactcccagctatagcaagcggcagttatggagcatgcgcagcagcaggggcggccgcaggtcgccgttcaataatacgtaatgtatagacttttgagtatacgaagctccctgtttctctaggttcacctgagatttatctggtctttcagggcttaaaagggagacattcccaaagaagattccgtgggaagtctcctacaagccccgaaggaagggaatctctctcctcataccttgagtttcctgagtacaattattatagatatacgaagatctctgtgctcatggagaatttgtggttagatatgaagctaattcatctctgtttgggaacagggtacatgatctaggacaggaaaaaaacggggcgaggcagtacgctttacttggtgttttgctatttggaggttttcaaaaactaaacagtgtaggaaagtcatgtgtgtccagcaactatctgtggccagttgagtaggaataagatttggcgaaatgtatgctcaggcctgtactcccagcactgtgggaggccgaggcggaggatcacttgagtccagcagtttgaaaccagcctgggcaacatagggaggccttgtctctactaaatttttttttttaattagccgggcgtggtggtgcatgcctatagtccaagctactgggagggctgagatgggagattggatcgcttgagcccaggagttgtatgctgcaatgagttgtgatcccaccactgcactccagcctgggcaacagaagcagaccctgtctcaaaaaataaaccaaaaacaaacaaaacagggaaatgtgtgcgagcgaggatgagatccaagtacttgtgagacaaagcactgtaaagagaataattaatgaaaattacaaaaaactacagccaacatttgttgagggtttactataggccagaaatctaagcactttatatataattgttcggagtttatatatgtgtatttaagcacacatactgttttctttggtctacatatgcaaataataacaaatggcttggagtaggaacataaatgagcaaatgataaaatatgatttatatatatgtatagacttggtgacttagtatgctaacctactctggtctaaattgttgcattccatctgacatcaaaatattgttatcaatcaaaaattattcaattaattactaaggaaatctgccgctttctaaaataactggttaaaaacaagtagaggttagttatacaataattagtatataatgacatttaggcaacctgacgtcactctgttttgccaattgcaaacatgttactttccattgttagatagaggattgctgaaatgttatctaaaagtccaaacatgtacatgaattgcaaatgcagcttttgatttgtggtcttgtttttagcttgaccttataatgaaatctatttttatttttaagtttatttttttaagacaagatcttgctttgtcacccaggctggagtgcagtggcacaatctcggctcactgcaatctctgccccccagattcaagcgattcacttgcctcagcctccctagtagctgagatcacaggcatgtgccaccacgcccggctaatttttgtatttttttaatagagacagggtttctccatgttgaccatgctggttgcgaactccttacttcaggtgatctacccgcctcggcctcccaaagtgctgggattacaggcaggagccaccatgccctgccttaatgaaatctattcttattgaagagagtggagaatgtgttttataaggaaaattgtagcaaatattaaatgccacaaagttgtctcagtatcgctaagataat

SEQ ID NO: 2664 - DNA, 4001 bp, Homo sapiens
aaacacaaaatgactcaattcatcccttgctgatgggaatctttaaggggaacacaacccttccagaaagatctagatgagaaagcagcagatacgggctcagctgctcaaactagcccagtccaggcttgaagcctcattcatgatcctcttattgccatttctaaatcaatcacaggacagggcgctcaagggaactgctgagaagtggcaggaataggaaagcaccctggggactgcttctgaaacctgcagctcccacccctgccaaacagagttggggaactgtggggcagggtttgcaggagcaccaggccttgcccctcagatgggaaatgtccaggagtcagacaatagaaaattttccaactggagactgtgggaggcttaagaaaaaaagtcaatgtataaaatcaaatctcatgatgaacacccagaatgtggtgtcagcaccacaatccaaggctgcaaaaatggatttgaactaaaccttatgtgtttacaccacactagggcagcccctcacttgtttgtctttgtcttcccagcctcctaacataacacctggcatgtcccaagcactgacccacatgaatgtcttaaataaaggaaaacgggcaaatcctaagtcacctggcttggcttcgggaaactaccatgacctggtaaatcagctttgtctgatgggaaccctggtagcttttgagctccctccaaggcccagagagaggtcgcatccacaaatgggctaggttaaaactacagcaccagcccctggttgctactttctcatgcagcctccagaaatgatttgaatgtcacagcacctctgtgtctagcttattctgcttcaaaacaatctcaacttcataccaaatacacttttcttcatgttgccatctgttccgattgcaggggagagcatgcgggctttttcacccatttggagactctgcctgcagaatcctcaagacattcatttcattcattcgttcactctttttttcagacaagggttcttaggatcattcattcattctatacagatttgctgatactgtacaggttgcctctcagaatccagtgcctgttctcagtacctatgctgactggtaggagggataaagacagccttacaccctgggagaggcggtccagagtagaaacatcagacactgtaggagaaagagccaaagaacaggaggcaacagccagacttgcatgttagatggttggagtctgaaaatatccagagtaaagaaaggtaggtgtaacctagtatttgaaagtgctaaacagcaagccagcgctcagggcaagtggccaggaagctttccaagaaaaacttctgggaggataaagggaggtctgtgaaaggaccgaccgcaaagtcgggcgggtactgcacacatgacccattaactacggctcttccggccttgccaggttcttcgagcgggcacccacccggtatccttccctccttcaaccaacaagtactgaccttgcccgaatgctgggtgctggccctgtgcgccggacggaagggcctgattttctcgcattttctctaagcgctggaggctgcccgcctggggcgtctccaagcactaaaccccacgtggctccatctcctcccccttccccggctacatccatgcgaggtcccttatgccctgctggctgtgccccacttgccagggagcgccttcctgtgaaggggaatctggggaggcccccgcccgtgcctgcccacttcctactctgaaaccacaaacctctaggaaggcccctcgccccgtcgggtggaaaattggctcctcggggttccttcaaccccaaagtccgggggcagggggctgaatttcgatcaccgaggagggcgctagtggaagggggaggggaggaggcgctccctcggccttacccgggcatgagtccagggggcacgtaggcggcattgaactcggtcagtagggtgcccgcgctgcgggaggccatggtgggtgcgcgagtacagcgagcctggcgctccgctccgccccacggtaaacagcggcgggtcacctggcaacggccacggcggcgagcctggcaacgccagctggccccgcggtcctcgcgttccgagacactgcgcccccctggcggccacctcccggagcagccccatagggcgcgcccagaaggcgcctcccatttccgcgagctctgctgggtgacccctgtcacttgccccggcgcgtcggggctctctgccttgctgcctgcgggatgtgcagaggctcagatgcgggagggaggcagaacatcgctggagaggcctggcgggatccgtcttgcggtgacccggcttggaacgcgacgctaccacaaaggacaggccaggtcctgactttggaggtcacgcacgaagcagctgccccaccgtggctcaggcccagaaacctgagtggccttagggtccccaggagctatgtctctccaaggcttcccctgcaccccagctccatgggagttccaggaaggggctctgtagtgggccgcgctgggcgaggttgcctaggacgctgtgtgtaattgtgtgtgtgcgtgcgtgcgtgcatgtgtgcgtgtgtgtgtgcgcgccttgcgaagaggagcatttttcatttttcttcttaatctctagctgatggcttccttctcacctcatcatacctgtaaactactccacaagaggcaaaaagaaaatcatagaacgtctgggtgtgtgatttacatttgtccccaatgctgccgttcattttggggatggcatccgcaggggtagcgcttgccccagagagcaggcctgctgaaggcccaccccctgtgtaatcctccctgtgactgcttcagcctccacatttgagtttctccagggacccttacaccagccttggtgcctagggcaggcacagggccttcggcttttccataaggggtgagggtatggggacagcttccacggtgccaggctcttggtgactcgggtggaggccctgccaccccagctccctctgcagcagtcctggtgtcatgaagaagcctggcagttcccactttgtctccaggtcttgcttcttcccttcagatgccggatggagagcagtgctcccctcgcacttcggttctgtaaatggcagtggatgaagaccgcagacgctactgggttcacagaatgtggctgccaccagcattctccaaagacttcccctggcaaatgccaatgaaatgaaggggagccacaggcttcccagaggctcaggaagcagaaacactgaggcctggttggaaagagagctgtaggcaaaggaacggctgcaaacaaactgggtggaaggaaaatccatccatccttcagaatgcagtcatgtctgtatttttctaaattctcattggggaacatgttctacaataaggaaaacatgagtcaaagacccccagccctggtgaggttgaccgcctacttcctcccccattcagggctgcccagccagtcctgctggtaaacccaccaccctgccttccacctgcctgtgttctagtccatctgtctcgtctgattgggatcctgtgccatccatatcatattcatccctgaatctcagcacctggctctggaaagaattcagtaaatgttcattacataaattatatactcagttaccaaaatgggtaacagaagaatggaaattaaaaagtgggttctggctgggaacggtggctcatgcctgtaatcccagcattttggaaggccgaggcaggcggatcacttgaggtcagcagtttgagaccagcctagccaacatggtgaaaccccatctctactaaaaatacaaacattagctgggcatggtagcacatgcttatagtctgacctatttgggaggctgaggcaggagaatcgcttgaacccgggaggcagaggttgcagtgagcctagatcactccactgccctccagcctgggtgacagag

SEQ ID NO: 2665 - DNA, 4001 bp, Homo sapiens
ttgagcctgctggtggtgttgcttggactgaccctgcaggtgccattgggccacacggcggctgctctgggctgcagaatttgctcctggctctgcccctgccctttggcacccagggcataaaatgcctccagcttctgactgaggtccctctggacccttcgcagctcctgaaaggtggggtcctccacgtgactctggagacacgactctgactgggacctcgtctgcctctcaggggccctcctgctgccacttaccgtgctaggtcttggggggaccactgtcctcccctcctcctcctcagaccagtcctggtgcccacagggcacagggacaaacttgatcctttcgctgattgactccttcatcttcagaatcatttcctgggcctggaggctcctaagcctcctggtgcgggcctgaaatgggctttcccggtcagcaggtgaagattgtggccttgaatgtggagttttttcctgccaggcacacagactcatgctgctcattttgtcttcctcctcctcctctgggctgctgtcctcgctgtcactaagagatgaagcgtccatcggcctggaggttttggaaaggtgtggttccacagagaccccaatcccaaaggaatcacatggggtgcttgtccccagcttcaaaggtggggaggtgatattttctgggcttgtactggagaggcatgggctccttgcttcgtcctgtgctcgtggctgaacctttgccataggagcccctgagagcaggcagtcctggggtctgcctgagcccaaacagaatggactttgctgccaggtgtgtcctgactgcctggcctctgtgtggggtgaagtcaccgacttccattcttcgggctctggtgcaaggtcccagctggtttgcttgcccagcttgtccaccgactgcacggactcattgtcagcaccaatgccactgtcctcagagcataaggggagaccctgcaccccagggtcgccacagccactcgccaggctctctagctgcctcagagccctcaggaggcgttcatccacattcctttttgtgctcagcttattttccaagtgggttgcagtggagtggaggtagctgctggagccctccaggaagctgccggtgagcgaggccactgtgccattgagcacctgcagcttgctgactgtgtactgtagcagctgttgcaggagatttggctgctcctggggctctcttttcttcaaaggccaagccagatcctccctgacttcctgcaggagcacttctccatccttggagatctcccccaacagctggctgatctcctcaaagcacagcagcaagaagctgaccatgggctgcagcagctcccgggtctgggtggcctgatggatgatgcacagaattgcttcatatttggagaggctggagtgtagataggtgtaagcctgctggtgggcctttaccagaggctccgggaagtccactttgccttcaggctcatgagcagggtggatggtttggtagcagtggctctgtgtgcttgacgtgtgacattttgctgtccttttccatttggaagtatcttgggtactactttcctcactctcatctccagaaaagtctgccccttgtgatccatgggaaccctgtgtcttgaacggaatatccttagccatgtggctttgtgatttgttcagctgggatgaagaggttttggttcctgggatcagtccttccatatctttccttttgcctgaagcaggatctcccatgagctgacaaagacctttagctgtggtttggttcctcctgggacttggctgctcctctgccaggccctccccagcgtcatagcaggtggagtttttaaccagcaaagggatggaacctctttcacttccgccctgacatcctggccgaattgctttgggctttttcaagaactgaatgccactctttgcaacgctgtttacaaggtcactgtgtgaaggtgtacaccccatgatttcagcttgtagtcatcttccacccaccttcacaattttccaagaatcatatttgaaataggaacaaaaggcaatcttactagtccatccaggcaattttcaggccagaattctttgaagtccatggtacaatatcctaaacttggaaccagctttctttattttcttggtccaaatgtgaagagggagtggtacctgtcgtcctgttgttgttctaagtttggaaccctctgctgttagtgagcagcgggacaattctgaaggctcccagcctggtggattacgggcctgtgttttgctcgcgtcctgacagatgtggatagcaagtgcagcttaagcctattaggttaatcatgccctagccagtcagcactcacagtgtgttctaatatagaacttctcagcatttactatcttgggaagcggattatttttgcacgtgctcatgcttttaattctgttcagacgcctgccatatgaaacctagagaaatgagccataattgcaaaggctctggaagagatgcatttgtggaagagaagagagggctcgttgattacaggccctggaagagaagtgaccttcacggtttaataagggcaaaccagccaagtgtgctccaatctgctgttatcaagaagcccccaaaacacacaatagataataattgaagtaatgcattattgtttgtgtggcttataaaaaccccgggactctagtatagagaatgtctctaaataagatagtgaatgaagaaggcaggttgcttttcctttgcattagaaaattgagttaggtagcaggaaagctatcccccccagtttggatggggacagcaggaaaagtcactgccatgtaaagctcaaggctggtcactacgctcaggaaggcaatgctttcatgggaagaggcttcttattcaaacttcttcataggaaaacaagctaaaaactgggcagtggagagccatttcattattaagaggagaactcaaggggaagcccatttttctgctcaaactgagcatggggctcctgcctgtggctaagggtagcagctgcccatttaaaacctccttttaaactttatttgctgtcagtaaaatctagaacaacagcttggcctagaaagactggagtttgaatcctgagtctttctcctgttagttgaggaaacttctgatagtttttaagctttcctgaggcagagctcatctttgaaatgaggaccacggtacttacctcacagagccattgtgaggattgtcaattaatacttggtaagtgcttgacccaaggtaggtactcaaaaacatgcagtttcagccaggtgtggtgactcaacgcctataaatctcggcactttggaaggttgaggcaggcttatcatttgagctcaggagtttgagaccagcctgagcaacatggtgaggctgtctctactaaaaatacaaaaaattagctggggatgttggcacccacctgtaatcccagctactccggaggctgaggtgggagaatcacctgagcctaggaagttgagactgcagtgagctgtaatagtgctattgcaagctggcctggactttggaagtgagaccctgtcttcaaaaaaaaaaaaaaaaaaaaagtttcttactcctttccccctggaagctagggcacttataataatgaaagtcataagaatttcattggtttgcgttggtttattcctgaatggtctggaaataattgcctatgatgcacttagagccctctgaatctggtgttctttttgccccccacccccaccctgtgctcaatccactgctgcctcaggatttttctaaggcctcattgtttaatttctcggctctcaaacacaatgattcccactgtctgcaggagggagaggggcttttatttaaccatttcctatttttgggcatctaggttgttgccaatttcgaaattttccaaatagaaaaacattgcattgagcatctctgagcatccc

SEQ ID NO: 2666 - DNA, 4001 bp, Homo sapiens
gtgaatgtgacattggcagcatcacaggtgacaggtctccttgctgggaccctccgccccccaaccaacgccaatactccaggagacacacaatacagccactttcttcattatctacttaagaggaaggggctggagggcttgaagggctgcccagctgggcagggagagaaagctgggagctggagagtgcaaagatctcccgggtttgccagatgcagctactcttttttttttttttttttaatactttaagttttagggtacatgtgcacaacgtgcgggtttgttacatatgtatacatatgccatgttagtgtgctgcacccattaactcgtcatttagcattaggtatatctcctaatgctatccctcctccctccccctacgccacaacagtccctggtgtgtgatgttccccttcctgtgtccatgtgttctcattattcaattcccacctacgagtgagaacatgctgtgtttggttttttgtccttgcgatagccagatgcagctactcttaatgtgcatattttcatcctagaacattggagagttcctgtaaagccttgtgttccaggaggaaggagatcctgacccttctgctgatggcagcagtcacgggggctgggaaaagacccttaaatcccttccacctttcaggagaatgtggagggaaaaggtggcctcagcagacctgggggaggctgagggacacagcagttgggtgcacagccttggtgggtggccagaaatcaatagaaaatgtactcttagtccctctcacctccccacacgtcaagtcccgagcacccattccttgccctcttcctaaaaccaggcagggcttccaggacgagcctccaccgcgctggagatgcccctccgcccctcctagagctcccgacgcatctctggctgcgcagcgccctagaatttagcttctggcaccgccaatctccttagcacccatccacccccttgaaactttcccatcccaaggctttcccatttccttccccactcctcttctctccccacccccacccaccccgtaactcctagatctcggccttgcccgattcatcccttctctctacccactccctctgccttctactcggcccctcagctttcccacgccccctaggcatctcccgtgcactccggacccttccgggacagactcgatccgctacgcacggcccgctctccgctagctgcgaggcctggctctaggcacctccctgctctgagcctcagtttacctcggtgctcaataagggaatggccaaaggggtccaacttgggggacgtgcccgagccaccgcccgcccgcgcccagccgggccccgcgcagtctcacctggttgcccggctccggcggcttgcagggccctgcaggcggccgcctggacggccaggcaggaggccgggaggccggggcagtaggcggccgcctgcacgggcccccccgcctggcggccgaacacggcgcgcaacagcgcctccagcagccgcagccccggcgccaccgcgtcctctggcccggcctcggccaccagcaccccgaccagcgccgccccggcccgccgccggccgcgcacgtcccgcagcatctcccgcaggcggcgccgcggctcccgggcggccagcgacgacgcgcggcacagcacgaagaccagcggcgagcggatggcgcgcgccgccgccgccgccgcccccgccgccccagccgccctcgccgccctctgcgccccgcgcgccgccccgggccccgcgccctctgccgccgcgccgcccggcttggccgcgcctggctccggcgggaacaccgcccgtgcgaagtcccgcagcagcgcgcggctctgttcgcgctcccacagctcgcccaccagcagcacctgcccgcggccccccgccgcttccaccaacgcctggaagggcggctcggcagggcgcgcaagccgggccgccagcgcctccagctcgcgctccatgctggccgccgcccgccctctgcggccgccgcggcccgggcgcacccgctgcccgcctctcggggcggtggcgccccggcacagaggacacgcccccgagggccgagcccagccggacccccgggcccccgggcggggcctctgtgtgcacgcgcccctgggcgcagcccgcatcgcgggcccgggtgggaggaagagggctttctcctcagccctccaagggtggctcctcccgaagtccctgcgcagacgcggggaaacagagagtcattcattcattcatttgttcgtccatcccacacatacttactgcgcacctactatgtgcaggcgctgggcagccgaggttgggaagacagacaattatcccctcactagataagatcgtttggagacctggagcagagtcctgcacagtttggggtcttgccgaggtggggtgggaggtaggggggtagggggcggagggcgcagaagtgggtaggaaggtgagataaaagagaacacgcaggggttatttctgccacccagctttccttttgggcttcaacatttagcaaaaactgaccgagggtccattatttccacaaatacttattgtaccaccccaggcgctggggttgaaacccagactgtttccgtaaagcagaaagtctagggggccagatgcaggacacggatggtgctctgatctgcgtggggagcaaggggccagccaggtcagaagcaggaatgcatttcccttccttctaaggatctaggtcagccttgtccaatagaacattctgtgatgatggaaaacttttttattgtctgcaccatatgtgactattattgagtacctgaaatctggcgagtgcaactgaagaactgagtattacatttcacgtaatttgtaatgaaatgtaaaattaaagcagaaagtgacaagatgataatgtacttaaagggctggcacctttctctgaatagtaccctaaagacgccgcagaagcaagaggggagttggtaaggactctgagaaaccaatgtaaaaccagggaaggcctgtcgcctcctcccctcagtgccatagaagggggataggctgagtgaacgctatacacttgtgctcttttctttgcttgcattggcctgagtagaccatttctcaaccccatctccccagcactgctgggaggcagaaaacagctgtgctagccagggatggcatatcaggctggggctagcagcacagaaaaaccagacccggcagcctcttcttcccacttcatgggtcaggaattccaaccacgagacctgcctcatgaaagaggattggccaggggagagtgcccagaagctccctgagtggggtgtctggtgtgtgtgagggtggcacatggggagtggctacattcacatttgatgccagaggcaagtcccatcacacccccattccttaagctcccaggtgggatatataggaagagcctaggttttagtctcttccaggtgtacctatcgccaaccaaagtagctgatatctagggaaacatgaattcactgggaaaaataattagacttctggggccgggcgctgtggcttgtgtctgtaatcccagcactttgggaggccaaggcaggtggatcacctgaggtcggggattggaggccagcctgaccaacatggagaaacccagtctctactaaaaatacaaaattagccaggcatggtggtgcatgcctgtagtcccagctacttgggaggctaaggcaggagaatggcttgaacccaggaggtggaggttttggtgagctgagatcgtgccattgcactccagcctgggcatcaagagcgaaactctgtctcaaaaaataaataaatgaataaaataaaataaaaaataaaaaacagttaggcttctggaaagtataaaacaaagcaggtttaatggatatatgaattaagattcatttcttaataacacagacaacactaataacaatgaaaatttctt

SEQ ID NO: 2667 - DNA, 4001 bp, Homo sapiens
aaaggatttggaaaaactgattactggtaaagtgtaaaaaacttctaaacctttttctattacctttccagagatacaattatttatttaaaggtagagtctttggggtcaattaatttattattgtaggcttctggcatcagttttttccacctgtttctcatagttatcacccaacaatatacacttgtagtgatcaagtccttgaagaaaaggactggggctatttgttatatagttaaattcatttgattaagcacttgtggtatgaatgcctacgggttgataaataagtgtgaaatatatgactcgagcaatctcttgccagaagaaaagcacagataaaaacactgatgggctctgaagtgagtcagacagggactggaatcccagttctgccatatctgagcctttgtctcatttgcatgataggaacaatacctattgtaagagatatgagaataacattgaataattcattgtttcaacagatatttattgagttgcgtgccaggtgctgttggaggcactgatgataaagcagtgacaaaacaaaaattcctgccctcatagagcttacactctaatggggaaaggcggatgaaaaagtaaattatatagtctgttaagtgctaaggacaataataaaatagagaatgggaaaagggagtgtatgtatgtaggaggtaggtttgcattttcaggtagggtggaggctgcattgtgaaggtggcaaatgaaaaaagaggggaagagagagctaagtgcatatttgtgggaaaagcattctagcagagtgaactgtaactgccaaagcttcccagcagaagtgtaaccatccttagcgcactgcttctaaaagtatgggcactggagtagcagcattggcatcaattgtgaccttgttagaaatacaaatttatggggcccatttcctttatgtacctagttttttgtttacttgtttttagaaagcactgcaaactcagaatctctggggctggttcccaggaacgtgttttaaccagctgtttcgctgattcttatgcacgttcaagtgtgagaaccattgttccagggacaaaaatacaggctttggaagagggtatccctggctccacatcattcctaactagctgtatgtactaccttgattaatagtctcaatttaaggtacatcagaatcacctggatgccttggttgaagccagattattgagccccagccatagagtttctgattctgtgtgtctcgggggtgggaagtccccaaaatttgcattcctaacaaccaggtgctgctgatgctggtctttatcactgcagatgatagcagaaaggcctgtttgctgtagcagagtcctgtcagagggaggcaagaaacggtaaggggcgtgttgtgtagactccataggccattggaggtgccttggcttttactctacgatgtcggatggagaacggcgatctaacctgggctgtaaacggatagctctgactgctgtgtcgaggaggctgcagaggggtaagggaaaagcaaagccaccaactggagggctgttgcagcatcccggcaagagaagctggtacttgggactgggtgggcacagtactgaaagtgatgagcagtggtagattctggataattttaaaggtaaagactacagaatctgctaataattgtgagaaggagtggatgacttcaagaattttagatccggtaatgcaagtcaagtccctgacacacagtatgtgctcagtaaacggtgcgttttaaaaattattgttgtaagcgctcagccaactggaaattagagaagcaagggggctgtctgagcttggcctggactgtccatgctggatcccggcctccccctgaaggaggaaaatagtttttggaaagggaaataagacaccaaaccccagcacttactgatgcttatcttccttttcctccatgggcctctacggcaccaggcagcgaggagcctcctgggaagaacagggacgcagccctgccaggaaaagggtgcgcaaagcgcggcgactgtgactcgcgcgttgctaagcgacgggcgctagtcctcggaaaggggcgtggggggaaactcctggagtgcgcaggcgcagttaagccgggttggtgctggactgttgctcactgtgcgcgactgcgcggcgaggagggcgggggtgcctggccgcgtctctaggcgtgtgggctcgacgccctgcgtttgaacttgcccttcccattgtagggccaggaggggtgtttatcaggactgatttggtccttgaggataggggaagggctgtttccggagctgcggggcagcgctgctgccgtctccgccgtgcccgccctccggagcccggcaggtcgtcgtcaaagcgctgccacgggtcgcccaagctggctgcaaaagtgcgggccggcgggaaggatacttgttttcccttgtattgttaacaatactgtgcgagtcgtgattggttgctcctgagctgcctagcctttactccagaaagcttggttgtcactgttttccaccatttctgacaaaaccttccccggctgggctgccaggattaaaatagagcaagggaacactcatctcctgcaaatgaggctccctgctgtgtgtcatctgttgcagcctgagcggggttcagaatagggtagcttaggcagcgggttggggcttgtatgtgtagcacttacccaaaaagagcaagctcctgggaaaagccgttgctgacttgcatccaccttctggccctggaatttcttacttcatttcaccattgcctcccaatttccactaccagagccaaaagtctttggcatctgtcatagtaactcacgcatttccctggataacggaaaaagaaaagtccagagttgaattctgccttatatcaggctatgcatacgtatatgtttggaatccagagtcagtgttcgtgtgtgtgtttacattcaccttggagagtgatgggagagcagaggttggtcctaggactcattttatgtatgtgacctgaaatcctatcaggaagaagaatatatgtgtagatttgacacctagtgacctaaatacctgagtgtggacttcgttgttaaagactggagtgtgtgtgaatgtgtcattgtgtgtgtgtgtgtttggtgagtaaggagtggatgagtaaataaatatggggcaagtgggttgaaaaccagaaagcagggggaactaatagcaattgagcttccactaggggaccaggcatttgttaggcattgtattaaacaccacctgcttatctggtcttatcctaaccatcacactgtgattaggagcttagggtctgggagcagtcagtgtttgaaacctggctttaccacttaactagctagttcacttgggcaaatgatctaacctctctgagcctcaatttttttcatccacaaaatggggaaaatacctagggttgttgtgaggtgtagatgatttaatacaggcagagtactgagaacagggcccgatgcttagtaagtgctttgccattatttttattgatcaacttgatctgcttatgctgccacatgtccttgagggttagtcaactccctcatcattccccctaatttctgcttcaaccttcaccaatctcttcaagtcctaaaaccacttaccctcaggaacaatctcagggcttaaagaaatgagggcattttctcaacttgatcctttcagactgacaagttcacctgcatccgtacaggattagagtcatttgcctctcttttgagcggtatggtattagttttaaatatatttatgtcaatctctgttaagtagcttgcatatgtctaggacttattaaaagctatgagaaacatttaaaaaagaaattgtgggctaggtgcagtggctcacgcctataatcccagcactttgggaggccaaggcgggcagatcgtgaggtcaggagatcgagaccatcctggctaa

SEQ ID NO: 2668 - DNA, 4001 bp, Homo sapiens
tcgaggtgtagggtattcattcccaagatccacaacaattacctccctagaaaatgtcactccttttaaaggtcttttttggctttcaacaactgaaggagttctagtgacagatgtgtgtattttctgcaaaccatcatcctgcaagagaatgggacaaacaatataaacaaataatcaatttatgacaagccctgcttttaaaattacaggttatatgtacacttaacgagaaacagaaaaagcatttctaaatgatataggaaagtagcaataatccatcatgatcacattttcacatttttatggttataaaagcacacactgacatattcaaataacatttggtgacatgtaattctctccatgaagtggtcaaacccaagagccaccaggaccatcattctgtcgtcaaccgggcatggccatggggtgggagggtatgtgagttgttcgtgtcagggaatcgcagacacagagctcaagaaggacccagctgtgttgtgtgctgttgtaggaccctggagctagcacagggggctgcggtctgggcctgagcttggccacagtggagaggtaaacaattcatctcgttttctcattggaaacaggagagggctggatccctagatagtctcttaacagctctaagattctaggattttgagaaaaacaaactgaaggggaattattaagaaaaacataaatgtaagaatgaagactaagcaagtttctagacttggcatatgtaatggtttagtaacacgaactgataagcaaccagaatggcttaaatgactgtgggcattggactcattctacttacaaacctaagttatatgcaactccatctcctattattattattatttattattattattatttttttttgagatggagtctccctctgtcaccaggctggagtgcagtggcgatcttggctcactgcaacctctgactcccgggttcaagcgattctcctgcctcagcctcccaagtagctgggattacaggcgggtgccaccacgcccagctaatttttgtatttttagtagagacggggtttcaccatgttggccaggctggtctcgatgtgccctcgtgatccgccctccttggcctcccaaaatgctgggattacaggcgtgagccacccgcccggtcctccatctcctattattatacctagctgaggaatgtaccttattttcaatcaaacaaattctaaactgctctttgagagtagaaaaacacatcacctcttcttgaccagtttctccagcattctcaggctcttgcttctcatttatttggttctcctcttctgcctccatgtcccttctgttttctaagggtgtggccaacacttccttactctgtctctggacaagaatgccaggcctcatcggcacattcaagttcatgacttgcattaagatcctagaaaattaatcggtagagttttaaacattcatgcatcctcatccccactatcaaacacaaaatggcctctgccacatcctgcaccacactcgcctttcatggtcctctggattgcttgtcaccactttggcagctgcacagtctacacctccgtttgcatctgtacaaggcactttctttgtctctttacctttcctgccttggaaactgaaaacaaacaagccacaaattcagaaaaggaagaatggccctgattttaaggtgtggtatagaaacttcacgtttaaacaggatatcagcatttctaaaatgctgaaatggaaaagtagataattatggtatcattacttgttctgttttaaattgttttacattatttctatacacatttgctaatgtgacttgaaatctgatcccaattatcagcatggatttataccatttatataaaaaaaccaccaataagaggaggatgcaaatgaggcaaattagaaggatgatgaagaaagtgattgctgtggtttcaaagctcataggtttagctagaagactcatccactctcacaatcacagactgtccaaatattcttttccagctcaatttgaatgcagttctcttgttctttaagttttctagaaacagaggaataaaaagctgttttctttgttgttcttttggtcagttcagcttcatgaaagatgctctgcttgttgcagagttgactcacactggctaatttctctccataactgtggtgggggctgaggtggccagaggggagactgagctgggacatgtgtgatcacgcagctcacctccctcaccccaaaaactatcaggacccagaggagagaggaatcggaacagctggagctgagcccagctccccattcttctctcgtcagtgacatcatagaatcatggagcccttgagttagagagaccagagagccagtccaacccagtccatcacctggaggctggagaaccacgaggctgttgcctgttcgtccccctcttctgagaggtccaggttagaggccatttgaaactgtcttgaccattctttgagcaaggattttctccctactctccaaacatcacctttcctttcctaatctgagcctgtttcttttattgcttctttcacagaccatgaacaattggtatacttccttcttatgaaatccctctctatagccctgagctcaaggcttcactgtggaattctaccaaacatttaacaaagaactaacaccaatctttctcaaacctttcaaaaattgaagagggaacacttactagtcattctatggagctggcattaccctgataccaaagccactacaaaaaaagaaagctatagaccaatatcctttatgaatattgatgcacaagtcttcaacaaagtactaggataccaaattcagcaacatattaaaaggattacacaccatgaccaagtgggacttattcctggaatgcaaagatagtttagtacacaaaaaccaaccaacgtaaaacatcacattaacagaatgaaggttaaaaataaacatattatcatctctactgatgcagaaaaagcacttgacaaaatttaacacactttcatgctaaaaccactcaacaaatgagaaatagaagtaaactacctcaacataataaaagccatatgtgagaatcctacaactatcatcatattcaatggtgagaaaatatttgtaaatcacataatctgttaatggactgatatccagaatatatgaagaactcctacaactcaacaacaacaaacccaattttgaaacaggcaaaggatttcaagacatttctccaaagaagatatacaaatgatcaataagcacatgaaaaaaatgttcaacaacactaatcattagggaagtgcaaatcaaaaccacagtgtgttaccacctcatacccaataggggggttattattttagaaagaaaaaaaagtattggtgaggatatggagaaattggaaccttgtgcactgttggtgggaatgtaaaatggtacagtcactgtagaaaacagtatagcagttcctcagaaaattaagtaaagaattactatatgatgcagtaattccatttctgggtgtatacacaaagaattgcaagcagggattcaaacagatatttgtacacccttgctcatggcagaattactcaaaataccaaaaggtagaaaaacccaaaatgtccatcgaaggatggatagataaaatgtggtggctgggcatggtggctcacgcctgtaatgccagcactttgggaggctgaggcgggtggatcacctgaggtcaggagttcaagaccagcctggtctctactaaaaatacaaaaactagctgggcgtggtggcggacacctgtaatcctagctacttgggaggctgaggcaggaaaatcgcttgaacctgggaggcagaggttacagtgagccaagatcgtgccattgcactccagcctgggtgacagagtaggactccatctgaaaaaaaaaaaaagtggtatatacactcagtgg

SEQ ID NO: 2669 - DNA, 4001 bp, Homo sapiens
taacctctgtctcctgggctcaaccgatccccccacctcagcctcccgggtagttgggcctacaggcgcccaccaccactcccatctaatttggaggttttttgttgttgatgttctttttgtagatgtgggttttcaccatgctgcccaggttggtctcaaaactcctgtgctcaagcaatcctcctgtctcagtcttccaaagtggtgggattagaggtgtgagccacacacccagcctccagtttttttgttttttgtttttttttttgagacgaagtcttgctctgtcgccaggctggagtgcagtggcgccatctcggctcactgcaacctccgactccctggttcaagcgattcaattctcctgcctcagcctcctgagtagctgggaccacaggcatgcgccaccacgccagtctaatttttgtatttttagtagagacggggtttcaccacattggccacgacggtctccatctcctgacctcgtgatctgcccgtctcggcctcccaaaatgctgggattacaagcatgagccaccgcacctggccccttttttaatattatatgtttctagcttttttaaaaaaagttattgtagtgttatttttgtttttaatgaacagcattcagataattcaatatattataatgaggaatacattgagaagtctctcaccctatctcagtcctaccctccatctcataagaaaccatgactattagtttcttgagtatattgccagaatttatgtggaaataaggatcatatgactctcatttatccttttctacacaaaaagcataatttatacactgtttggcacctgggcttttttcgcttagtaagatatgctagagatggttccacattagtatgttgggaactgattcctcactctttttcatagctgcataatgttccattgtgtgtatgtactgtagtttataatatcagtcttctgatggatactcacgtagtttacaaccttttgctattacaatcaataatctcatacacatattactttacatgtatgcaagtgtatttggaggcaaaattccccaaagtgggattgttggatcaaaatgcaaatattattcagtgtggttttgataaccactaaggattgctgcattctgctcctactagcactgtaacactgcacctgttttcctgacaccctcctatattgagtatattaccaaacgtttcaatgttcaccaatcatgatgatttgcatttttattaaaactgaagctggcctgtaatcctagcacttggtgaaactgaggtgggaggattgcttgggcttgggaagtggaggctgtagtgagctgtgatcgtgccacctgtctcagaaaaaataaaatacaaaacaggccgggcgcggtggctcacgcctgtaatcccagcactttgggagtctgaggcaggccgataacctgaggtcaggagttcgagaccagcctggccaacatggtgaaccccatctctactaaaaatataaaaattagcctggcgtggtggcacctgcctgtaattccagctactcgggaggctgaggtgggagaatcacttgaacccgggcagcggagggtgcagtgagccgagattgcattactgcactccagcttgggcaacacaggactccatctcaaaaaaataaataaataaataaaaaacacaaaaacatgcagctaagcatcttttcatatatttaaagtctatttttaactactatttttctgtgaacttggtaccccagtacttcgcccatttgtctaatgcactgctgcctgttaattcttagatattttaaatgaatatttaatatatttatatttggaaaaacttatccaaggacaaaagatgacgctaaaactcctgttataaaacgaacataccagcctttcccccacgagtctggaatccggccagagcaggattttaagactctcggacgacgtcaacatgtcctcggatctgactgcgcaggctccaaatagctcgcccgaaccctaacatctgtgtgcgcatgctcgcttgattcctagcggaaagtttgtgtgcgcatgctccaaggagccgcgccccatcggcttccctaacggaaaatccgctgcgcatgctcataaacctgctctcctaggagacctgaaggctgcttccgctaacccgggctggcgctgctaacctcacccaacgatccctgctgtcggaaaatgtccagaggcaccatccctgctatgaagagggaatgccagtacaacagccacaaggggtcttcctgtggccctcaaacaaaaaatcactgcattacatcagcaggtattcagcacctggccccctccaaacggtgtctaaagcgagttttaaaaattaatgctaggggcgggacggcgggggcggaaaaaaataaaaaattaaattacttaaatttttttctctttttttaaagagtcggattctcgccctgttccccaggctgcagtgcagtggcgcgatctcggctcactgcacctccgcctcccggactccagcaattctcctgcctcagcctcctgagtagctgggattacaggcgcgcgccaccacacccggctaattttttgtattttagtagaaacggagtttcaccgtgttgcccaggctggtctcaaactcctgagctcaggcagtccacccgcctcggcctcccaaagtgctagaattacaggcgtgagccacctcacccggccaaattacattaatattttatattgaggaggaagttggttacaaaggactttcaaaagtgtcggggttaataatctgcatattttaaaatattccaggccggacgcggtggttcatgcctgtaatcccagcactgtgggaggccgagacgggcggatcacgaggtcagcagatcgagaccatcctggctaacacggtgaaaccccatctctcctaaaaatacaaaaaaattagctgggcgtggtggcgggcgcctgtagtctcagctactcgagaggctgaggcaggagaacggcgtgaacccgggaggcggagcttgcagtgagccaagatcgcgctactgcacttcagcctgggcgacagagcgagactccgtctctctctctctcacgctctctctctatatatatattccatagactgcattggagagaaaggcgccgggacagaaaagcctgagataaaccacctgtcattcttggagaaaaggatgctgcggctttcccgatttggttgatgagatggaaaatcaacccttacaggaaggacatcaccaattccggaaaggatgctgcgccagtcatgtttccgcactctgtgagacgttgaaatctccagaagttgcccaaggttttcaagctgaacacaggagaaatgactctggatctctgaggactgttttcctcaataaggagctgcaatcttggctccaccaccctccctccaaaacatctcgtgtgtctggtatctggttatattgtggcctgacagagaagtttctttcggggccagtgaattaaaaaaaaaaaaaaaaagaaaagcgggtcctaccaactcattaatactttaatactttaaatttccctctttatagtaggttgaaatgtcagtatctcttaagaacaatggctgaaccaaatgtttcctcaaaactcacattttttcccaccatttcagaagctgcctcaggactaagctttgatttttttttttttttttaatctggcccaaattcctatctaaggggcctggggagtcatgcccaacaaaccataaattctcatcagatgagttttatttaaccctatatatggtgacttgctttccagtctgactctggcatgacatgtgacaaagaagaaagtcaaaatattttaccccaaaacatgtttctttgccatattttgaaatggtcctgcaaagctgtgctttgtgggggaaaatatgcatctgtaaagaatctctattaacacagct

SEQ ID NO: 2670 - DNA, 4001 bp, Homo sapiens
aaattaaaataattgtaaataaaataattacaacatgttacggtggctaacaaggacataaacagagctgaggatcttgcattctcagaattatgaaaagcaatattcaatcaaggccaggcgcagtggctcacacctgtactcccaccacgttaggaggccaaagtgggagaatcccttgagcccaggagatcaagaccaacaacatagcaagaccccatctctacaaaaaataaaaataaaaataaaaaaattagccaggcatggtggttgtgcccacatttccagctactcgggaggctaaggtgggaggatcgcttgaggcctggagttcaaggctgcagagagctgagattgtgccactgaactacagcctaggtaaaagagtgagaccacatcacacgcgaaaataattaaaaaacaaaaactaaaaaactaaaagcaactgatctttgagaagtgataactgcattctcaaagtacctaatctcaacaataccctaacttaaaacctgctgactaggagatgtatttgactgcaaatctggcccacacaagcaataatctgagtttccatcaaggaagctgtaagcaccaagtagagcaaaaacaaatccaggcctcaaatggaaaaagcagctctgaattgtgattttcgaagaaacctgcatttcttacacttcagtgtactttccccatatttaactccaagatttttgttaatttgtttggttttcctttctcaaacaaaattatgctcagactgaaaaccctagatttgttccctattgcatcttcatttcttcccaaacattccataaaacgtgacctacattaagttagcaagttaagtctgaaagcgtctaccttccctggggagggggaaggtgtaggcagggcagagatttgtagtccagccctcttgccacaaattatgaattagagaggaatgactttgcttttttaatgatctccagagaattttccatcatttccctctcttcacccagctcctttgcaaccactgccagagaagtcttcctttagcttcttaaacatcgatcctaaaacacttccagacacctgtgctgctcctttcagttcccatggagattaggctgtgtaacaatctcgcaaagacgttcccctccgtctcctcatcctcttttcaaacccttttacgatttcccatctcactcagcatgacagtcaaagtccctgtgatggccaacttctgcatcacctagccagtctgccaccgccaaaactctccagcctcatctttctactcttcccctggttccttgcccacgcctttacacttgttctctgcttggaatcttccctcccctccttgaggaactttctcaaatgtcaccttccctcaatactccccctcctccatttaaaactataaacttccaactctctaagcccctaaagtactctatatttaacttattgtataaactactgtccctacttgtaagttccaagattgcagggattcacccgctttgttcactgctgtctgccaaggtctagaacagtgcaagttacccaacaggagttcaataaacagccattcatttaacaaatatttgctgagcacttcgtcccgtccaagtttgttaaatcaagacaaataagacaccgtccctgcctttaacgcaccagatggagaaatgcaccacagacataaatgtgcaatacaggcctgacactacggccacaagcaagtcaaagaacgtgccaaaagttcagaggaagaagcctcggcttcgcctttcgggagaccagtccagctttccaccatcacgctgctcatcagggaccatctccgggggtctcctctagaccccaagggaggagcgggtcccgcccgccattcccaggtctcagagtttacttgtccagagatgcaacttccggcctcttcaggccgggcaagatttaaggaaagaaaagaaacataaggacctccgttcttcggtctccgtcccctccccttcccccgcgtgccgtccccacaacgggccaggactgaacccaactctcgaccaactcccggcagcaaaactaagcaccctacttccgttgtccccacctgttcccggcgtccccttcggctactcccggcgtttgcgcaagcggtcccacgtgggctcgggcggggctagcgccgcggcgggggctgggcacgcccctagcgcatagctggcttctgattggctttccggtgctcgcccgagcagggttggggcgagtggaccgcgcctctaaaggcgcttgccagtgcaatctgggcgatcgcttcctggtcctcgcctcctccgctgtctccctggagttcttgcaagtcggccaggatgtctcaggtacagcgcgtgcacagccaggctgcgaaggtgcagcgggcgggaggcccgttgggggctcagccggctgccagaagctctcgggctctttccttccgtgcccctcacttgctcatgggcccatgcctagccctgattcgttggacagagccttgtgagcgggattttccgtttggggatttctaaatctgctgcccaccccgcaactgccggaaagttgcccatggggtggacttcgctgtgtagcgggagaggggtgggagtcgagggtgcttgatggagagatgggggaaggggttgcacggattggaggagcgaggagactcagtccccatcccgaagcacagggcaggacgtcgcggcggagtggggaagcgaggagtccgtggccgagagcttggaggtcaggggaagtacggggccggctgctcagagtgcgggacgaggagaatcgcggcccggggagaggtgacccaggggcccctcccttctctccagtgtagacccttgtctgagaccgagctatgtggggcgacctctggctcctcccgcctgcctctgccaatccgggcactgggacagaggtcggtgttgaacgcgcgggccccagggggagggaggggaccaacgggctccggcgctgacaccgcggcactcatgccctgtcccctttcagctgtttccagcatactgtgccccgtctgtcctcaggccagggcttcgctgcagccccggccactccctagtgcctggcccggtggtggccaggcagttggccgcgctgcttctcccgcagaggggacccccactgggggcgaaggcttggcctgccctcttcactgctgtatttccagacctgatgcctgcgtttgtgagagctctggatatatggttttcgattgaatgagtgaactggaggggcttccccttcttgtgttgctgaatctttctagctgccctgttggggcagggaggggcagacacacttcaggggctgcattgcccgaagggtgccacctttcccacctctccatccccgtaactgggctgtcatcaggccacagtaggattcttaccctctcccacccagaggaggccctcaatcctctcctctcccttccatttaggctgagtttgagaaagctgcagaggaggttaggcaccttaagaccaagccatcggatgaggagatgctgttcatctatggccactacaaacaagcaactgtgggcgacataaatacaggtatgcagagcgggggttggaagggcatctgctcatcaaagcaggctcagcagctcagactggaagtccctgggaacttcactctcaaactgcctgaggccctactcttcaggtggggtatggtgatggttcctgaggtggaaaagaccatgttccggattctcagtgtctccagtagtaacagaattcaaatcctggttttagaaggtctttactggttatcaccagcagctactctctactagggaagaagcaaaggctgcagcttggaaaagacttgctgaaggctctcagctcagtagtatcattgttgagccgttcagcttctgccctagatgggcaggatcaaagttggagcactttttggagcacttgaca

SEQ ID NO: 2671 - DNA, 4001 bp, Homo sapiens
taggctggtctccaacttctgacctcaggcaatccgcctgcgtcagccttgcaaagtgctgtgattacaggtgtgagccaccgcaccctgcctggaagcctcatttctaaaacatatttctctctttctttttttttctttttgaagcggagtttccctcttattgcccaggctggagtgcaatggcgcgatcttggctcaccacaacctttgcctctcgggttcaagtgattgtcctgcctcagcctcccaagtagctgggattacacgcatgtgccaccatgcccggctaatttggtatttttagtagaggtggggtttctccttgttggtcaggcttgtctcacactcctgacctcaggtgatcagcccacctcggcctcccaaagtgctgggattacaggtgtaagccaccgagcctggcctctaaaacatatttccaaaatgtttatattacaaactgtcaagtgtcatctatgttcaaaaaggcaacagaaaaaagtgactgaatatgacttctgataagctgcttttcctagggatatgtaatgtagcctgtttccttcctcgtccattgatctaagcatttgctaaaatcaacttcattttgccctactctgaatacatttcactctgttgtccttctgcttttttttttcaaatttaaaatatatttttttcttttaaaatcattttgtcattctccagggcatatcccaaggggaaaagtaggggaccatgtctttctgcttaaattaaaataccaaattacttaccctagaatacctgcctccttagaacccagtactctccattttctctttccacctagtttagataggaatgtccaaaacgtgaatactacttttcttttttgtttgtttgtttgtttgtttgtttgtgacagggtctcactttgtcacccaggctgaagtccagtggtatgaacatggctcactgcagtctcagcctcctgggctcaagcagtcctctgatcctcccacctcagcctcctgcgtagctggcatacacccaaccctggctgagtcttaaaaagtttttgtagagatggggtcttgccatgttgcccagactggccgggaactcctaggcccaaagcgatcctcccacctcaggctcccaaagcattgacattgcaggcatgagctaccacgcccaactgaatattaaaaacatcactacacatcagtaaacatcactaaatttaaaataggaaagttgaaatattagtgagggagatggcctcccaaagtgctgagattacaggtgtgagccaccgtgcctggctgaatattatttaaaacatcactaaacatcactaaatttaaaatacgaaagttgaaatattagtggagggaggctattacacatgaaacatctcagaatatattgctagttttctagaccactttggttttttctctgtttctgttgaaatgaacactctcagaaagtctctgatttcattttctatacgtataccctttaagactcagtattagaaaagaaaagggccagggggaataaccagtctattatcctagtgtaatagatgaggaaacagattttgtgagagaataaaagttatctaaagtcacacagctagtaaatgtcaaagccaaaactgaaatgaggtctctggatttctacttcaatactttccctgttattccaagctgtttgggaatatagggggaaagaaatctaaatttagtggcaaagaaatctcatgaaaacctttttaaaaagtttctctctttacctgacatggtcagagaagaagaaacatcaactgcagatagaagggaagaagagacgatactagcggatgtctgggtggctgaagccaaccagtgcatgtgtccagtatgaaggccactggtcactggttactggtcactggccccttgtgatgatacaaatttacaggccacgcccaggaaaccccaagatgctaccaggtggtggtcggtttggtgggagaatgatgtcacaaagcaggcagtttaaaggtctgcgatagccaatagggaggtcagattccccacaagacaggattggctggcagaggtggtaggaaaggtgtaacagcactaagtggctgagctctggggaggtgaaatctgcaagacagacatgatagtcccactttcccccaggctctcatgttagggagatcatctcaatgtttctcataaatgttcactaatataattaactaacatttatattttatatgttacatttcataatatgtaatagtatgcatttataattatatagtacatacacaatatccttggggagaaaggaaagggatgtttaagttgagcaattacagttgttctaaaactatttcagtgaatctgattaatgaatttactgctgctttttaattttattgtattttttgtgagatggagtctggctctgtcgcccaggctggagtgcagtggcgtgacctcggctcactgcaagctccacctcccaggttcatgccattctcctgactcagcctcctgagtcctgccacttcgcctggctaattttttgtatttttggtagagacggggtttcaccctgttagccaggatgatctcgatcacctgacctcgtgatcggtcttcccctgcctcccaaagtgctgggattacaggcgggagccacggcgcccggccctgctgccgcttttaagggccaaagaagggattaaagagccttcttttgtaacttggttgaacggcaaagttcgttgactgcccattgtaggaaaggatgtggtccaaggctcttctcttttagtttcttctccttgaatcctaccttctttgggctgggccaggttggacttggatctctcttctgctctcctttttttaaccccttgattttaggcatcgtttctgggccaagccttgatcttgcatttttacatttgtggatattccttcttgtcaacttccagagcaggagtcttcttttcagtgtccggatgtttggaatacggactctgcttatgagaagcaaacaccagagaggtagaagacaaggctgactgcagaccttccctcttctagcctttggtcacatttcttttgcccatggtttgctacctctggctccttgggccacacagacaccctgccatcctgctcttttatacgtgagaagcattcaggatactttctttcttctcacataaggggatccagtatggcagttacttttagcctcctctctcttgcaaacagccactatagaatcttgggcctttgggatatcctgtcagccatgcttgggtgcaagggctaggcaaaatgaagaatttaagcatttagtggagaataggaaacaggcaagttgagggtacagggaaaaagagatttgtgtggattttttggtttatgtgacaaacaattcgacacacttattttgtattaatagaacatagaatttaatattttttatgtagctagtccagaacttccattacttctgtacactgaagaaaataatcataatattctttttccattatgttttatgtcatattacctcatttatgttattcattagtatgtctggttactttctaggaaccctattccgcctaggtctggattttcttgtgtcaactataactgagtttgttctcaccccaatgttgtgtcttttagcaaattgaaagtgtaagcccaatacagcttttctagcttctgaaagatttatgtcacgttttgtatcttgtcatgtctatagacatttgtaacatttgtagttttgggctactatacacctattggaatttttcatgcatttcagaaaaacattgtattatttatttatttatttcgtgatacagagtctcgctctgttgcccaggctggagtgcaatggcacaatcttggctcactgcaacctccgcctcccatgttcaagccattctcctgcctcagcctcccaagtaccctggactacag

SEQ ID NO: 2672 - DNA, 4001 bp, Homo sapiens
aatatttgaaagagatggttaagcctatactgcaccgtgtgtgtgtgtgtgtgtgtgtgtgtgtgtgtgtgtgtgtgtatccacacacatcctgtcagttcaatttctctgaggaaccctaatactcaaatataacaaaatgttaatagttgttgactctggaattctaagtccatggatgttcattatactaccctttgtacttttaaaattgtacgtatatttaaatcactactctaaagatgattggaaaacaaactttagaaacggttttttgaaaatggtaccatataaacactaagcttcacttgattcagctctaccaacagtaagcagagagccaacaggatggcgctgatctaaatgaatgcttccctaggccaccttcattattttggattttttttttttttttgagacggagtctcggtctgtcaccaggctggagtgcagtggcacaatttcggttcactgcaacctctgcctcctgggttcaagtgattctcctgcctcagcctcccaagtagctgggactacaggtgcacgccaccaagcccagctaattgttttgtacttttagtagagaccgggtggtgtcatcatattggccaggatggtctccatctcctgaccttgtaatccacctgcctcagcctcccaaagtgctgggattacaggcgtgagccaccgtgcccagccattttggatcattcttgctgctgctacatctgctttagtttttggggagtggacgggatgtggataagatgaaagtggggaagaaagtaagagcatttcacaggaaattgattaagtatcaagacaataatattgctccctacagagtcaatggggagaggatgcagcaagccatagaggtggccctattgcctagagaagagagagcactggacccaggaaagccacactcattgatgtggctgtgcgtcttctgcttcccagcctcaggtgttatccgaaaaagatgggcctggttaacattgccaagagcacttcttaccctaacattctgtaactctataaagtctggcatgcattaaaattcttctgattcaatagtttggaaaaacatttgttgctagactatttggcctatctcaattccttggcagggagtaaggcacagttagcatgtgctttaatccattcttgtcttgtaattctgagaaagccctttgagtttcagatttacaagttataatatttgcattgcttcgttgttatgacagcttcgtcttagatcatccctcatcctccccatcccctgcccccaccaccaccattcaatatggtataatatgcaaaggtttcagtctttaaaatatgagtatgtcccactcccaaaccactaaactgtaggtcagaagaccctgtgaggccaccaactagctgtgcaccttgaacaaattaatttgcctatgttttttcatttcttcctctgtaaaacaagcgttgaatgattggagaggtcccttacagctgtggaagtcagtgatttatatgcatttagtagctacgcctggtctaaagaaggccatttgcatggattctaattcagctagatttgaattctgccagttatccctcttctctgtctatagagctctaaagaaaacaagaccgctgtgtgttttgtgtgtggctgaaagcacacacaaaagaggtactggaaagatgtcagctgtctcaggctttagctgtttcatagaaacaattccctagaagtcagagcccccaaattctataggaatatcatttcctggagaatatctgcacattccatgcaggttccctgctgcacacctgcaatcgtggtacaggtctctcgggctgttctattaagtgcctgctcttaacaaattcccctttgagaatcgctcaccaaccggagaccggttccagtgcttttgttctttctctgcttctggaggcatgctgaagcatccgcgcatctcagactggtgctcacagacatcaggaacacatgctttttcctggttgctaggaaacagtgaatgaattaaaatcatttgttttaaaaatacactcccctacgcccacccccattaagggttgagggagggtggaaagtcatatatttgggacaggattgtgatcctggcctgaagttcacgtgtctttttacctgagtaggcttatgtttcccatctaaatgattaattgaaaaaccaagaggatgggaggagtttaccttccccagagttttttatagcatttggctgcagacataggaatcaattgactaagcaaggattgctggggaagctagtgaaactctggctcctacatagttagggtgccccaaagtacccaatgacccaaagatcattctactcgatgaatgtcaatacaaaacagtggcaatcctgaagaaacatcacctgggttcaagctagcaccatctttctaattatagatgagatccctttcatgtgcgtctgtgtgaagagaccaccaaacaggctttgtgtgagcaacatggctgtttatttcaactgggtgcaggcgggctgagtccgaaaagagagtcagcaaagggtggtggattatcattagttcttataggttttgggataggcggtggagttaggagcaatgttttgtgggcagggggtggatctcacaaactacatgctcaagggtggggagaattacaaagaaccttcttaaaggtgggggagattacaaagtacctgcttaagcggggggagattacaaagcacattgatcagttagggtggggaagaaacaaatcacaatggtggaatgtcatcacttaagactatttttacttcttttgtggatcttcagttactttaggccatctggatgtatatgtgcaagtcacaggggatgtgatggcttggcttgggctcagaggcctgacaatccctgcccacacgcctgcctcctagtcttaaacacttgctcccttgcttaaagcttgttaatggtttctgtctgtgtctcctctataccactagactaggggcagagtttgttcttctggcccatctacggctgggtgtctgttattgacacctcttaatctttatttccactcctttccactggccaagtaagtcacttgattacctgaggtcatattatgaaagacactaacaaaaccctagatatagaattttctaaactagttgttcactccatattgagtttatattgtacctagacacttccgggtttggtgagcctgaagtttatacattatggggaccgtctttaataaaaagaatgcagaattgtaaatatgaaactaatacaaaattgtatgtttatttagaactattaattacaagttacaaattttaaagagctgaaaaataccacaaacaaaaaatcagtattaatattttcatgattactaactgcctaacatacactaaaattcctttttttcttacatactctttgattatctgttaataggaccaaggtttcatagtattttctatagagagaattaaaaaataattcagtctctcctctactatgactgtttacttttatttatttatttatttattcatttttttgagatggagttttgctcttgttgcccaggctggagtgcaatggtgtgatcttggctcaccacaacctccgcctcccggattcaagcgattctcctgcctcagcctctggagtagctgggattacaggcatgcgccaccacgcccggctaactttgtatttttagtagagacagggtttctccatgttgatgaggctggtcttgaactcccgacctcaggtgatctgcccgcctcggcctcccaaagtgctgggattacaggcgtgagccaccgcacccagacaattttttattttttaattaatttttttttttgtagcaatgaggtctcactatgttgccctggctggtctcaaactcctgggctcaaatgatccatctgccttggcctcccaaagtgctggga

SEQ ID NO: 2673 - DNA, 4001 bp, Homo sapiens
gaagttctccaggccctccgaggtggacgcgtgcagcacgggcactgaaccctgagcccaggagtccgtcgtgcatgccgaaggctcctcgtcctcaccccatgtggggtcctcagctactgcagattctccctcgtcccgggccaggaagcgccactcggtgatctgcagcatggcctcccgggcctggctgatggtgaatggaatgcactgcggaggcgagagaggatctcaggtcggcagggaggggcgggagagggagacgagtctgaaggacccggatcccggcccacctgctgagtcaggtagactttgaaagcagagtccatgactcgagccagcaagtcggccaagatgtcccctacgacgtcctcgccctcctcgagggctgtaagcgccatccactcggcctcactgagccgcccaggcacaatatccacctgcggcactggcacagtgggcggccgcactttttccgccttggaccgggtcaccccgcggtctcggacctgcctctcctgcctctgtgagaacaaaacatggcaatcagagcaggaaaccaagaagtggaacggaagagtagctataggctaggaggaagctttctcaagttgtctagtgggaaggaaaagggccaattgacgaagagcctactatgtgacagatacttagtagatgtttgacctaataattttcattaacagcccactaaccacaattgacagataaagaaactgaagtggggaggctgaggaaggagagtcacttgaacccgggagatggaggttgcagtgagcagagactgcgccactgcaccccagcctggcgacagagcaagactgcgtctcaaaaaaaaaaaaaaaaaaaaaaaagaaaaagaaaaagaaagaaaaaagaaaccgaagtctgacagaagttaaccagccttgcttaggagcacacagtgagcaagcccagacaatgtgaaggtttaacttcatggcccttataccagagcaaagtgttcaaaattcttgagtgttcaaattacttgagaaagacaattcagtaaacagtcctggaattattggtgctatttagagtcttctctacattttgttttccagaaaaggattttttttttttaattcaagtaattgcaaataggaaaccagagggggagccccaggctgggacaaatcatggctacccctccctgacagacccgggggagcaggtggcccctacatgctttatggtggatttgggcccccttgctctctctgctgcagcatcctaggggagtagtcagtcacccagcctgccatgccccagcccctcttctccacgaagagtaacctgggggaggggatcatgggcagaacaggaggcaatgtggatgaacatttggcgctgctagcagcagcaatgacagatgtcaaagaatggaacattgaaccaaaaacaaaacaactgtccagaggtagtttgtgaacaaaggaaaaatggaaccagaacctgggggggtggcaggagcaggagggctgggagtgggaagggtgagctccttgttattggtgccccatctgaggagaggaaaatggccaagtggtagaagcaaagtagggttgggggagcagccccagcccacctcaggtagctgccacagggctcatgggcctcacctggacaataggtgactgcatctccatcactgcaatatgtactcagatcccaggcagacggtaagggggctggggccactgcaaagagggagtaggggactcacacccctcccgctttcctgtagccaatgggggctgtccaacctagtgcagggactagggaaggtggggaaggatgaaaggtgtgagcctcacgtggtgacaaagacagtttggctgggggaatcctgggggccagcacccccctccattggccacacctgctgctgccaggacagtggagtggggtgtgccagaatgggggcttgggccccttttaagaccaggggaaccctcccaggcccctctatgggaagccagaggcaacagtggaggagcagagaagtggctcccaaaccaaaagcccagagagcaatgtcaccaccaagggatcagggacgcagcaggtgcagggtgcggctaagcaggacattagccttgtccaggagggcacatgtgtatgagtgggtggacggggggaggagggggtagggatgggaagaggccaggggaaaagtcctctccactcagcccatagggacctgcagcggctggtgtgttgtgtagtgtggtggtgaaggtgcaggtggaagatgagggtggtggctggaggcggtggtgatggtgggtgtagggaaggggtggggggtgggaggtggggggttgggagcagatcaaagctgtccagtcccagaaggaagctgctcctccagtgaggactcctgcgagatgcccttctcttcctccttctccagttttttgggtcttccccttggtttccttcccagagttgtggtggttttcccggtcttggcagcacccttgtttttgcttccctttggtcggccccgaggtctcttaggtgttggcacttcgctgagctccttctgactccctaccagcgctgtcctgggactcaccggaggctgcttgcgcggcctgccacggccccgcttctcagtgccgtcctttttctgcttggaggccaagggctggctggacttcgagctcgactcgctcatcttcccttctctaaggactagttggaaaagtgatggctgggatgggcgaactcggccgctggcctgcggtgcatgctccggtttgccgggagcagcggtgctgggcgctgaggacaggccagtctccaccgcagccgcccctggtcgcaaatgcggatgccttcctggagccgcgccagcgccagaaatagcccaggctcggagtcccacttagaagagcacagccccggctcaggggagcttaaaaagttctctacattttttttttttaaccaactattcttatctccattttatggtaatttacccagtatcatacaagtaggatgtagtgaagtcagaatgcattcacatgcaagtctgtctgactccagagcctctcaaagacatttgcaacaaatatgaaaaaagataaatatccccgagtaaattaaaagctcatataaaaaaaaaaatggccgggcgcagtggctcacgcctgtaatcccagcactttgggaggccgaggtgggtggatcatttgaggtcaggagttcgagaccagcctagccaacatggtgaaaccccgtctctactaataatacaaaaattagccaggcatggtggtgggcgcctgtaattccagctactagggaggctgaggcacgagaatcacttgaacccgggaggcagagtttgcagtgagctgagatcatgctactgaactccagcctgggtgacagagcgagactctgtctcaaaaaagaaaaaaaaaactaataaaataaaaaatagaagaagaaaaatggccaggcacagtggcgcacacccacagtaccagctgctcgggaggctgaggcagggggattgcttgagcccaggagttcaagtccagcttgggctatattgcaataaaaatttaaactataagaagaaaaaccatttaagatcccaaagataagcaaaggacatgacatttcacaagagagggactgtagatgactaataaatatagtattgacattctgatttctagttcatcaaattggaattattttaaaaacaagaatactcagcattggcaaaggtttagtgtgataccatgctgcaacagtatgcatgaagacattaaaaaatgttttcacttcctcaaccctgcaatttcagttctataaatacaaccaaaaggcattttctgaaatgaagataaaaatatattctccaacaaattctctgcggtatttttataatagcagaatattgaaaacatgtctttaaaaagagaataaataattga

SEQ ID NO: 2674 - DNA, 4001 bp, Homo sapiens
cacaggcccccaacagggagggcctgtgcctcagatggggcctgggcctcagcccacaaggccgctccttcccttcctgtctgctacaggaccccagcccacagagcccagggccgtgtacacacctgtccagagctcccagcccaggggtggggtcaaacgctctcgcaagaacaacagccagaaccccagagactccggggttgggaaggcctggtctggcccctgcggggggcctgcctactcttggtaggacacatggagggaagtggggcagtgaggccaggtgaggtcctggctgtccccaaggcatcctgtggtggcagaggaagcccacccgcctacaatgattagggacagtctggcctgggaactctggccggcagcctgggccaggagggtcagccacacaggagtaggaacctgggcaggagccacaggcagcccaggcccagcaggcaggagccagggcctccccttcggcccacacggaccaccaggctggagaagcagcttcttcccagtgagggggctgcaaagatcacagccccaggatccaagccatggaagatgccaccttcccctttaagtcccttccccccatcctgggaacaccgcatggctcgcctaggctggcgcctcttccaccacaagggaggctggcgccctcccagcttgcgggaggaagtagagttctgttgagaccaccctgtgccagggaggggctcggaccacagaatccacattcgcgctaactggatgtggggcccatcccaaaagctccgcacgtctgaactcacgaggcctcacagacccctgcaagtgaggcagagcgtggctgtgtcaccatcctacagatgacgagaaggcacagagaggttaagaaaccgcccggtcaagactgagcacaccctggcctcaagcttcttcctgggcgtccagggagaagccaatagtctccggtgctcctcgctgtcacccagacctcccagggtgtggccgagggggcctccccaggcctgtcgtcccccagaagctctccccaggccatgctctcatgactgcggtccacctttctcacagatccacgggcgccctccagaagacccaggctgcagggtccctgaaccccgctactgtgacacagaagccagctgccctttggtccaactcccggccaaaaggagcaaagaccacctgtaacccgtctgcgccctttgtctctcaggctctgaagccagcctgggccagtcttcccctctccacagggcccttgggagcctgccagaggcctccctctcgtgggaccccagactccgccactctgatctcagtccagaggtccacaccgttttgcagagggatcttgggccttgtattctctccctctctggagccttttcccagatggggacagtacctgggtcctcattctctaaggacgtcgcagaaaccagcagggaagcttttcaaagtaatcagcaaggctctgcactcctctggcccctcagctgcttgtcctgtgcctggtgccccagctgcctcccagacctgggagacttcagattttaaagtgctagagcaatacccatgtccccctcaacagcaaaacatccctgggcctgccccccaagttgtcctccttctccagaggccattatccctcctgctaacaatttcctgagacgtccatcccacacagctgctgccagccggcctcacaagagctcttcgcagaatcaccccaaatagtcatcccatctcctgtgagagggcttcctccccagtgaacgttgaagaatctggccccaaggtagttatcggccctgggaggctagtggtggctgagacaagggccttcacctcttacctgtgagcaccgcaggggccagaaccccggagaccagcagcagcgccatgcgcagggccagacaggatgccatcctggccgggagtgagggcagcggcgggcgggacgcacggaggactgcgctggttaacttcagggcagtgagaaagaggcatcaaagggctgggaagggttttcatcaatgcaaactctgtcctcctgggacatcgtgcccgcacctccccacccccccgctccccccaccaacacacacacacaagagctcacagaacagacctgctttcctgaacctgggagcagccccgctcttggagagggaaagaggaaattgcctgtgctctctctctttctccaccccgcaacacacacacacctcccacatttactcctggaccactgaaaatgaaaggttttcaagctttcttgtgcaaaagaatcacccagggaacttgaaacatgctgctgcctctggccactgtgtttcagtggggcttgggtagcccagggaatctgcatgttagtgcctgtggcctgggcttggggaaatttggcctgaagcaggcagcactgagtgcaggacggactctgctcacctctgggttctccatgcctggcccggagtaggtgctcagtgcttgttgaagaaggacttttaaagcagttttgatccaaaccctcaggcagctctagtctttcctaaaacgctcctgtttcctctttcgctctctgcctccctagacccctgtgcacttatgacatccatttccaggctgggcctggctcagaacttagccccactgcccactgcttctcaacagccccgcagggtatctcacgagcggctacaacttacagtgtccaaagcaaaccttgactctactgccccttccctcactcagtcagtggaatcccagttccccgctcccagatgttctagccacacaatgaagtcatcaaaggtgtctctttccctcacttcccacgtctgagccctcagagttctgtcagcgccccctacttcacaccttgatggtttcccaccgcgctaagggcttgcctcggccctgctcagcttcccacccacgagctctatgtttcagtccactggccgtgactaggctcccccaacaaacccccagatcctgcctcaggcctttgcatgttcccctctcctcccagaaggcagtcctgtggtgattatgtggccaccccttccattcaagcctcagcttgataagtcagcccctcaatccccccatcacttcaaatttctttttagcatgcgtatttatatgaaattaccttgtacctaccctaacaacttctccttgcctccatatccataactagaatcaggtatcagcattcctagggagagcaagcacaaagtctgacttaggaggaaataagcacaaactaaaaactactgttaatttatgctagcaataaattagtatcaagttagtaagatacgaattttgctaatttatattaatagaaacatggtgtgggaatgaattctaaggtgtcagactaaataggcaagatgtgagtatgacattagatccggccacattctagacaggggtgtgcttagtgaagtctgaatttaatgtttcaacctaagcatctaggagcagctctgtttggctggctgaccaaaacctaggctcagtaaaagcctggatgctatgagattgagaagcctaacttaatgaagaaggggataccaatggcttagtaagaaaggaatgttggggtggatttatctttggcgaccacactaagttctcagtaggtcccatagtacacactattcaccaagacactgcgagatgcattagtgaagaccggcaactttaaaaagataggttgtggctgttttttgtaggccagagttgatgatgggatcactgatttcagaggaaataatgtgattctaaagtagcagaggccaagcggcagcagaggccgggtggacgccaaccctgccatggatggtgaagatgaaatgacctggccaggtgcggtggctcccgcctgtaatcccagcactttgggaggctggggcaggcggatcacttgaggtcaggagttcaagaccagcctgaccaacatggcgaaaacccat

SEQ ID NO: 2675 - DNA, 4001 bp, Homo sapiens
aaaatagtggcagaaaggagaatagaaggattaatggctcgtttttatttctagtcctattttacctaattcagttataggaattcattcatttcaacttaggatataatggatttgtcgaaaagtaagggaaatatctggagctgattaatgtaaaagtctttagaaaaggtaagtgcctcctaaccatgttgattaatgtaaatagatgttatttttttcaattaggaaaagagagagagatgtttgtttattgacaacactaaaggccaggaatagtgtggtttagaggccagcacttaacctgtgtaagaactcatgcagtaagtcttatattctccattttactcataagaaaattgagacattaagaacatattacatctttagggtttactttaaaataatttagaagcaggggtgagaaatttcattgggagtggagtacagatgaaacaagattggccacaaattgatatttgttaaagtttgtttcattatactattttttcaaaatgttgtatgtatttgaagttttccaaaatgaaaaaattttaacatgtcactataaacatcaagattcaaaaccagattttgctgatttcaagcttgttctctcgctaacagatgatacacagaataatttctgaaaaactgaagagcaatttgccaaccagatagtaaattaggaatttacattttattttagaaagtaatgcttacacgtcgaatagcctcaaacaagcatattatattgaacaagtgtgtagtactgaatctacatgaatcttagtgttaagatttattaaatggaagcaatcctttcctctgttgaacaagtgcgactacaaagtagatttttaaaaaatgtcctggcattacttcatttaattttgtattctgaaatgatttctttttgcctttttgcttttaaacaagatagcttctaaatattttgtaggaattctcatctatttatagagaggtaagaatgacgattttgtccatgagacagagtagatttacagaatttgggaactaagctttaataagattgaactttagctagggcaaggaaaaacctttagctgtagctaatgagaaccacttccactggaatgactttatggctttaattttatgcagttctttcattccttcacctctttagtgaaaaggtcacctgtttaatgaaaaggtttcttaagaaatagaaccttaactacaccatatttctatttctcagtataaaattattctattgaagacatcatgctaaaggaaagaaactagaaataaaaggctatataaaaaataattccattgatatggcattctataatgacaaactgtatggatagaaaaccaatcagttgttgccagggacgaggggtggggagaggggattggtggcagagaaacacaagagcactgtttgggttgatgtttatcttcattgtggtggtagtcacacagctgtacatttgccctaattcatagaactgtacatacaaagtgtgaacttactgcacgtatattatttatcaataactctgatttttaaaagtataaagataaatagatatagatatatagttttgaaaacatgcctctttgtccatgagagcacagtggcccatgcacttacctgaatgtcaacaggaagccccagtccttggttgtcaaccacagtcatcgtcacgatgggttgaatcatcaaggcaatgaagggattaattccaaacgtcagggcatagtcttccatgctcagattaactccaatctgaaatctgtcattgtacaaatggaaagagttttaaaaggacacacacatgcgcattcaaatacaaaacagcgaattgtgttcttctcaaggctttggtctgctgaggaagcccaggtttctattgacagtttctttctgaaagctcttttagcagagatagactgaagaaatagacaaatgggatggtgcaatgtattttaacattccgtgggatgggatatagtacgctaagaatttaaaactagttaaacaattctaaaattaaaccaaattttcaaaatactctgcaactagaaaacattcaacattatttgagataaatatggcttagcaagtcacttttaaaatcagatgtatcaggccggtcactgtggctcaggcctgtaatcccagcactttgggaggctgaggcaggcagatcacttgaggtcaggagtttgaaaccagcttggtcaacatggtgaaaccctgtctctaccaaaaaatacaaaaattggctgggtgtggtggcacatgcctgtagtcccagctactcagaaggctaaggcaggagaatcgcttgaacctgggagacaaaggctgcagtgagctgagatcgtgtcactgcactccagcctgggagacagagggagactctgtttcaaaaaaaaaaaaaaaaaaattaagcttatcaataagtgaaaacaggtcagcatgaagaattttttacttatttaaagatttaatcactggattatttattgagttagcaatttcagagtctaatcagtgaatatttctctgcaaaatccacaaattatttcctttcatagttcattcaatctggtaattaattcattttaaataattgtactgggatgttaaatttagtcagtcaagactgacatatatagttaaagttcttccatgcaatttagctaaaacatttgtaatgtgaatctatttacaaaatgaaccaaatgaaaaatgttaactatttttatgtcccttccaaaattctttacataaaaaaacaaatacaagcattttaaaacgatgtgattcaacaaaaggcattatttccatgcaagatactaccaactaaacatagcaaaacccataaatgaccttaggtcccacgtagtgaatatgacaggtggttcaaatgggacttgtaatttcaggtctttcttgttcagctaacagtttttcccttgaacaaatgtggaactacattgatgcttttaaaacttagatgaaatcaaatggcagatttccttttagtatgcaaattatttcatgttggaatcttgatttaatccgttcagatgcctaagcagcttgacagtgatttatttggttttggataagacctctacatgtgatggattagaaaaaaacacagttctgacggtgggctgagagtggctttgaatcctaagatttttagtccaaacccccaaattatttccaagatacctgaaattacatgtaatcatactatttcaaatcttatcttgaagctccggctgggttatttcacagtggccttcacttggtcgctgtggagacattgagctaccacgcagagaacattgcctaggactagcaagttcttagaaaagtaattgttgtatttatattcttccattgggcatttggcagtaagtacagatgagcctctgggggattgtctgtaatttaaaaaatagaactaccttgaagttttattcaatcatttatatatcgtgtattacggaagtatgagattagcatttcccaatttactctataacttaaaggaaagtaatgggaacatttactaaagcataaaaaaattaggttgtgcctgtataacaatgaaattgttaaattaaaaaaatttcaggctgggctcggtggctcatgcctgtaatcccagcactttgggaggccgaggcgggcagatcacgaggtcaagagatcaagatcattctggccaacacggtgaaaccccatctctactaaaaatacaaaaattagccaggcgtggtggcacgtgcctgtagtcccacctactcgggaggctgaggcaggagaatcgcttgaacccgggaggcagaggttgcagtgagccgagatcatgccactgcactccagcctggcgacagagagagactccaccacaaaaaaaaaaaaaaaaaaaaaaaaatcaatagctcaaagttttactttcatattgcatgtatttattttt

SEQ ID NO: 2676 - DNA, 4001 bp, Homo sapiens
gcttaactgcataatttaaaaattaataaagcctacctttatttttgtctcctttgcttgacagcaaagcacacggggtatggaggtgaggtttttagtcaacttctgagtatttactacaaatgccaattaagcaatagattattttatttgaagatggcagctcattgcaccctgcactgtttgggttaaactgacttattgaattcaattttgggctaaggatctttagcacagagaggggtcttaggtaaggaaggaaacataaaaactagtatttattgaagataactaacatttactgactcctaggcacctctactaagtactttattaatattattaatttaatcctcacagtaaccctagggttagacaaagtatattattcccattttacagatgagaaactgaggctcagggatctgaaaggctgtcaagcaaaggagacaaaaatattattttgtatcactttagacctttcatttcttaactatttttgggtcatggacccttttcagactgactaaagtttcagatcctttttgcagaaaaatcttgtttctaagttcacagttggagcgctattggccaggtaggactaatgagaaacaggtactgcttcctaagtgattgtcagttcagcgtaaacaaggccttgctaacaacagaaaaggaggaacccgtcaaaatgtaatgagcttcctgtcactgaagtgttcaatcaaaatgtggctggcctgtcaggagtgctacagaggagataataaaatggattggaggttggtctacaattttaaagcatccttttgttacaacattgtgtggacctaaataagtaatgattataatttttgtttaatggcaaaacaaaattaaaaactgaaattattcttccagaccattctgcttgaaagcagaatgcctaaataatgttatttgccatctatttatgatagccatgttaggtgtttgaaaacagcctcatccaaagggaaaaaggaatagccaactgttgatcttggtttgatttatactttgtcataataaaagtagattccctattcctccgaattcttatctaaaaatttccctgagagagctgccacatacactagatcctaaaaagatggtctttgataagaacatttactagtttacaattttatgttaacctaattccctaaaggataggggaagggctggtgtcagaccagagacaagagagacaactccaattgttccgctttgcttctttgaccccttaactcatggctaaaggatcttacccgtctactcctcttaatttcttatttgcatcatttcacctcaatattcagcctcccacagctccaaagagcacgagagctaatactttgctcatgatatgccattcagagcacaagcctgacagcttggcatatcaatgcaatgttcacgggcaaatctcttacctgaaaatcttcactcactcttcaggtaggcagcagggtggaattgcaactcataatgagatacctttcactgggaagcccagaacaaaattgaaggggtaggggctaactcttctcgattaggggacggagatgtgaggctctatccacggcagctggctgagaacggtctcgtttaattaaagcctcctgtaactcatgggtttctgccattgaaaaatctaaaaggcacagctgacaagcaaagaccgacagacacccgcccttcaccagtcacccacctcccagatgttcacttacacaacacgttgcccggcagctgcgcgcccatggcacgtccggacagccgtggggtcccggaggcagcctgcgctcaggcccggggcgggtctccgaagctcccggagcagccctgtcgtgggaggggggcttgctggcgtctgggcgggcggcagctgaggccgggcgggggcaaagtgcagtccagctgccagggcagcggcgccgccttctcgccggcgcccggctcagccaagtggcagcatgtggaggacggggcgtccttcggcggcgcccgggctcccggcccctcctcctgccgtcgccgccgcgcccgccgcgcgctcctcgcgggttcgcggcccgcacctggcctccagatggccgcccaagggcgctcggctccagggcgcgccctctgggagcgacccacgaacttcgggtggcagagggttgcctcgatacttcctcaggcgcagggtccgaggcaggggcgggcggagcggagctgggctgccagccggttggtctgggccaccgccctcacgccccccgcaactaccaagcagctgccggcgccgcagcgggaacagacccgcaaaggtcaatgaaagcagaagccagcgaggcatcgcagaggtcaatgaaagtaagagccagcgaggcatttcgctggccctgcccctggtctcggccccctgggctgcgaactctcctgagctccgccctggtgagagggggcgctgccctccaaggcctctcccccgcggggcctgccttgggacaacaggtgctgggccggggcactgagcccgcctgcagggggccccgcagcctggccgcggccttcccagctaagggttctgcgcttgggccgggcagagctgccagacctgctttgacctgaaaccccactctcgcagagctaggccagggattccgcccttcccacctcgtttgcaccatgagtatgcagagcaaaagtgttggaagtacttaaacatttaaaggacatatccattttatacttttccatacagaaatactcaagaacattttccaagcgtgtttctctttcaaacaaagtatctctaaaggccattttctcactctttaaagcattgaataccactgcctcaaaacatggccattattgagttacacttccccgcacagtccatgtgatgcctgcatctgcccagcatgatttctagcaatagtaaaagtcccaagagaactacaaaagaaccattattttccttgtgttctacaacggattagtcaatgcgaaattcatgcttgaagggaccttagtgataattttgactccacattacagatgaggacacagaggcccagagttcagcagtacaacgaaagagagtggaacttaaaaaactaacaatctataaactgagacttagctctttgaaggtacattatagtaaaaaataaacctagattgcagaagagttgagaagtttaagttacacaaaaatctatcccagaatctcagattttaaatgaatcaagcattcttatttttatccaggcttaaattagctaaggttatatacaaacccagtggcccagaaatgtaatttttcttcatgctagtatgattaatgggattggagttggtacatcctgacaatcatagaatgtaagtatacctatattaattgatttttctgataagtatcattttttttttcttttttttgagatggagtcttgctcttgtcgcccaggctggagtgcaatggcgcaatcttggctcactgcaacccccacctcccaggttcaagcgattctcctgcctcagctcctgagtggctgagattacaggcgcctgccaccatgccaggctaatttttgtatttttagtagagacagggtttcaccatgtttgccaggctgatcccgaaccccagacctcaggtgatccatccgccttggcttcccaaagtgctgggattacaggtgtgagccaccgcacccagccagtatcaattttaatgtatacaaattgattatacttacataaaacaaattattcagttctacatatttcaggcacaccatgctaaataattatgctcaaatgcaaggttccacttttaggcctagttcttcacttaagttatgtaattttcttgtgctcttccttccccagctttaaacttctatcaacctagtgctggaatcatccttaggagacccctgggttccacactgaggggatggcgtcagttcttgatgtgatct

SEQ ID NO: 2677 - DNA, 4001 bp, Homo sapiens
aagtattagaaaacaacataggtgatatttattagaatcatgggaagacctttcttgcttaaattaaaaatattttttaattttttgtagtgatggagtctcattctgttgcccaggctggtctcaaactcctgacctccagcgatcctcccactttagcccctcaaagcactggaattagaggagtgagccatggagcctggccaagacctctctttgttttttttttttgttgttgttttttgtttttttaattgagacagagtctcgctctggagtgcagtggcacaatcccagctcactgcaacctccgcctcccagattaaagcaattcttgtgcctcagcctcccaagtagctgggattacaggcgcctgccaccatgcctagcttattttttatatttttagtagagataagatgtcactatgttggccaggctggtcttgaactcctggcctcaagtgatctgactgccttggcctctcaaagtactgggattacaggcgtgagccactatgcccggcctggccaagacctttctaactataaatcaaagtctggatagttgcttggtttgttcattgcagcactattcacaatagcaaagacatgggatcaacccaaatgcccaccaatgatagactggataaagaaaatgtggtacatatacaccatggaatactatgcagccataaaaaggaactagagcatgtcctttgcagggaaatggttggagctggaatccattatcctcagcaaactaacacaggaacagaaaaccaaatactgcttattcttgcttacagatagaagctgaacaatgaaaacacatggtcacagggaggggaacaacactgtggcctgtcatggggggatggggaaagggagagcatcaggataaatagctaacgcatgcggagcttaacacctaaatgatgggttggtaggtgcagcaaaccaccatagcacacgttttcctatgtaacaaatctgcacgttccgcacatgtatcctagaacttaaaatttaaaaaaaatctggatagcataatagtcaaatgtaaacacaaatcaaccaaacatttatgtatgtcaaaaatatcccattagcaaaatcaaaacagaaatgacaaataggaaagacatttgcaattcatagcacaaactgagtgcttataagtattcttatataaaaacttctagaaatagtgaatgaaaaggccaattttatagacaagtaagcaaagaatatgaatgaatagttcacagaaaaaatacaaatatccactaaaaaaatgagatgatgctaaacttcaccaataaaaatacaaattaatattacactgagatagaattcctcaactatctggcaaaatccaaaactcctatagtacattattggagaggctatggggaaacaaacgctttcaaatattgctggtgggagtagaaaaaaggaataatgaaaaaaaaaaaaaagcaggagatcatgggaggatctcctcttgggaggacagagatcatactttgtccaaaggactagattgcagctccggacagagcagtttgcagaagctcgcatttgaattttagctccatactgactgcaagaacaaaccagcaatcctgagagggcccacacaccctctgaaggaagtggactgctcctgcaggacccaggacccaaatactgtaagtcccccaactgcagaattgggaaagggagaccctcctttcccaaacacctcccactggagaggctgaaggtctgtttgtgggagaaatttctgacttcacctggagctgagtcaatttggagagccgagtgaaaaacagtggtagaggaagcagcagaaaggacctgggatctcgctgcatcccctagcaggccattcctgcctggcaccacagagatccatcaggagggtgaccagaggagcagggagtgaaactccacagggagaaggaaatctctagctgaactttgtaacaattcgaatggggtgagaagcctcctggccagaactcgggggagggcgcaaatcctgtgtgcagactccacagagggggaagagccaagctcttttcttttgcagctgggaggtgggtagcccagggcaagttttcaagcctgtcatgctgtctgcctggaaacggattgggggctgttgcagggggcacagtgggagtgaaaccagcccttcggtttgcatgggagctgggtgaggcctgtgactgccggctttcccccacttccctgacaacctgcagagacagccataatcctcctagagataggcagcaacacaataatagtgggagatttcaatactccactgacagcactagaccagccatcaagacagaaagtcaacaaagaaacagtggatttaaaatataccttggaacaaatggacataacagatatatacagaacacttcatccaacaactgcagaatatacattctattcaacagtgcatggaactttctccaagatagaccatatgataggccataaaacctcaatcaatttaagaaaactgaaattatatcaagcactctctgagaccacagtggaataaaactggaaatcaactccaaaaggaaccttcagaaccatgcaaatatatggaaattaaataacttgctcctgaatgagcagtgggtcaaaaacaaaataaagatggaaatttaaaattctttgaactgaatgacaataatgacacaacctatctaaaccttgggatacagcaaaggtggtgctaagaggaaagttcatagccctaagcaccgacatcaaaaacgctgaaagagcacaaactcacattctaaggtcacacctccacgaactagagaaacaagaacaaaccaaacccaaacccagcagaagaaaggaaattaccaagatcagagaactaagtgaaattgaaacaaaaaaatacaaaagataaatgaaaaaaaaagctggttctttgaaaaataatgggcgtagtggctcttgcctgtaatcccagcactttgggaggctgaggcaggtggatcacctgaggttgggagttcaagaccagcctgaccaacatggtgaaaccccatctctactaaaaatacaaaattagccaggtgtggtggcacatgcctgtaatcccagctactcaggaggctgaggcaggagaatcgcttgaacctgagaggcagaggttgcagtgagccgagatcgtgccattgcactccagcctgggcaagaagagtgaaactctatctcaaaaaaaaaaaaaaaaaaaaaaaaaaagaaagaaaagaaaagataaaattgatagaccattagcaaaattaaccaagaaaagaagagggaaaatctaaataacctcactaagaaacgaaacaggagatattacaactggcaccactgaaatacaaaagataattcaaggctactttatgaacacctttacacacataaactagaaaacttagaagagatgggtaagttcctggaaaaatacaatcctcctagcttaaatcaggaagaattagataccctgaacagaccaataacaagcagcaagattaaaatggtaatttaaaaattaccaacaaaaatcgtccaggaccagagggattcacagcagaattctaccagacattcaaaggagaattggtcccaatccttttgacactattccacaagatagagaaagaaggaaccctccctaattcattttatgaagccaacatcaccctaataccaaaaccaggaaaggacataaccaaaaaagaaaactacagactgatatccttgatgaacattgatgctaaaatccttagcaaaatactagctaactgaatccagcaacatatcaaaaagataatccaccataatcaattgggtttcataccagggatgcaggaatggtttaacatatgtgaatcaataagtgtcattcaccacataaacagaattgaaaacaaaaatcatatgatcatctcaatagatgca

SEQ ID NO: 2678 - DNA, 4001 bp, Homo sapiens
acccaaatgtcatcttgaattgtagttcccataacctccacatgttgtgggaggtaattgaatcatggaggtagttacccctatgctgctgtttttgtgatagtgagttctcatgagatctgatggttttataaggagcttttccctctttgcttagcactactccttgccgccaccatgcaaagaacaatgtgtttgcttccccttctgccatgattgtaggtgtcctgaggcctcccagccctgcagaacagtgagtgaattaaacctctttcctttataaattactcagccttgggtatttcttcacagcagtgtgagaatggactaatatagccttcatattcaggtcctataaattctgccccatcctacatctctgactgcactctgtaacacctctccctttcataatggccttttctcagtctctagaaagtgccaagctgccttatttctgtaatgccctctatcctttgctcctttgcctaaatcctacttatccttctactgtaactttaaatgtcacctcctaaccaaacctttctcctaaccagctcaccaccatctaaattttacttccaattaaacacttgatatactttctttcatatcagatttcatcattgtgtttatgtatttacttgtttaaagaagactttattccccctcatgaaactacaagcttcatgagagtaggaattatttgttttgttgagtactttaaaaagtgcctagcacatagtaatccacaaaggcttgtgaaaagaatgcataaatttaatcctcataacaactttgccaaatgatattcttatccttcctttcagatgtggaaattgaggctcataaaggttaacatccccaaataagggtctacgtccaaatcctatgctcttaagtcctatattgtctcccaaatgaagagggtcttctcgtgaaaatggcctggaagtggtatagggagctaaagatgataaaaacctatctcctggctttggcttatgaggtatggacaaagaacaggctctgttggagggaactgaaaatgaagtaagctccttggggtttcaattttaaaagatgtgatggagtgccctgttaaaaggttgagggcacagaggaagtgggtttgcagataaataggaatgagttaggagactggacagctgtaagaaaatgagcaaggagagtggatgagacttctcagcagccatggggataaaaggatgaatgcattgttgactgaatgcaagtgtacacttaagtatttagtgactgtgtgaacaagaagcttggacagaattagagcagctgaactgcctaggagtatcgggaagtactcaaacagtattaggctatagtacttactgtatactccttcaatttttgtgagcactcttctccctggagggacttctactccactaatatggcctatctactcctcatcaagttctggcataacctctagttactctaccatctactgcttcacttctgttaacttagctctatcctgctgcaagggtcaggggcaagaaaataaatcatgatcagtagtgaaagtagtaactacacaaagaaggccaggaatgaatttttcagaagatgagttaaaagtttctgaagcatgtttcataccacctcttacattctcagtagtaggtagaaacctgggtgtaatcctagaccacttaagaatgtgccagagtttaggcctaaaaggaatggatgtcaatggtttttcaaaatacgaaagtacccaacttcagacatatattccattatagttaaaaagctgtgtattttttacattcagagatgggtagaaagtaagggtttggtgtgtcaatcactaaaaagcaaaatatttagtactgccttaggagttgctcagaaaaactgtaccttacaactggaatccaaataatccaaaacagatataaagtatgtagaaataggctgatagctcctgaatgatgacaacagctggctcccagccactctgcctagaagcagttgctaggcagcaccacatttgctcacaaatgcacttttcacccaataatcagtattataacacacatgccaccctccgatcagtttttctgctcctgtgtagtttaaaggcaaaagactctggtaaatattatttatgatggcgaatagtctcagggacagtaaaccatgctaggctatttcctggacaaaaagatgaagacctttgtcatctaggtctaggagtgctttggagaagtctgaaagctacatatttcatttgttcttaatttatttcaggctgagtataaatgttatccagggaccaggataatgaaataatagagctgaaacttactgtctttcaagttctttttttggttcacaaaaagccaatactgcaaaccattcaatttaattcatttaaaaaatatttaggtagacagaatttgagaatttgaactatataaaggacacaaagatataatcattccagaattttaaagttttcctttgttttatattttcttactgcttatcaaaaatttggagttcaaatttttatagactcaaccattttctgcacaaaattgacattattaggataaagcaaagctggattgcctagcttattgatgatatggatgacataatatgacaattttaaaagtttgattctagtaatgtgataaaaggtaaaagtatgattgtccctgttctgaatgaagtgcattctgctacgtcgacacatttactggatgtactaccttcaacacttccaaaagcaatcttttcctcaaaggagcttttaccatattcccatttttgccaaaagcacattcctggtccttcagacttaaaatcttagagtcataattgcttcctgcagtacatattctccaaaatctaataaccaaatcttggttcttatccttttgctttcttttctactaacccattccatctactaatgcttttctgtatttactttattctatttgccagaaaagaatatttctctatttctcacagttaaatgtgggagattggtcagagtggtgggagaaactataggtaaagaaacaggccttctgaaaggtcagaaggctctggctctgcatacctttgggggagaatagctgaaggcagctgttctctgaccctgaggcagagggcaaagagtaggtacaaggaagtgtaggggaatttatctcaaacaggcttgtttacttatgttgtccagaaaccaacctttgatcatctgcgtgcatgactgctccctaaaatgggaaacaataatgttaattacctgcagattgtgtttgctccaggcttttggcattttgtctatgctgaatgaaagcaagcagctccagcttatcaagactgctcactcttgggctgctagtgccaggcagtcacctagctgctcttacactgcatacctgtgtctgagtactcctttcatccattgctgggccagggtctgtgggacagacctggcagttaaagctaacatttttaagtttggaattaagaggattcaatcttagctccttagctgcctaacaaactttctgattctagccactctatcccttcctcaaaattcctggcacatagtagacacccatatatttatttgttcacatgtagtagacacccatatatttgctggttccttagaaggaagacaccaaataaatacatcggtgtctactacatgccaggaatttttgtttcacctggaatgcccctaatgcttttgtttctaatcagtctcaaatttagttatcccataaaactgttccaaattcccacttcctccatggcactttctttagtccttcaaactcatactaataatgagaatgccccaactggtatctttcaagtaaattggcatcttcatgtgttctagaatgctagtcaatcaagaatcttaaatcatgaagagttcatgtttgtatagtgcttattttgtgccaagcactaatcta

SEQ ID NO: 2679 - DNA, 4001 bp, Homo sapiens
aagattaaaacgtctatctaacaaactgcaaaccatacagaggctttaagtaatacaagccaagagaaaaaagaaattcagattcaagaaatgcttaactgcataatttaaaaattaataaagcctacctttatttttgtctcctttgcttgacagcaaagcacacggggtatggaggtgaggtttttagtcaacttctgagtatttactacaaatgccaattaagcaatagattattttatttgaagatggcagctcattgcaccctgcactgtttgggttaaactgacttattgaattcaattttgggctaaggatctttagcacagagaggggtcttaggtaaggaaggaaacataaaaactagtatttattgaagataactaacatttactgactcctaggcacctctactaagtactttattaatattattaatttaatcctcacagtaaccctagggttagacaaagtatattattcccattttacagatgagaaactgaggctcagggatctgaaaggctgtcaagcaaaggagacaaaaatattattttgtatcactttagacctttcatttcttaactatttttgggtcatggacccttttcagactgactaaagtttcagatcctttttgcagaaaaatcttgtttctaagttcacagttggagcgctattggccaggtaggactaatgagaaacaggtactgcttcctaagtgattgtcagttcagcgtaaacaaggccttgctaacaacagaaaaggaggaacccgtcaaaatgtaatgagcttcctgtcactgaagtgttcaatcaaaatgtggctggcctgtcaggagtgctacagaggagataataaaatggattggaggttggtctacaattttaaagcatccttttgttacaacattgtgtggacctaaataagtaatgattataatttttgtttaatggcaaaacaaaattaaaaactgaaattattcttccagaccattctgcttgaaagcagaatgcctaaataatgttatttgccatctatttatgatagccatgttaggtgtttgaaaacagcctcatccaaagggaaaaaggaatagccaactgttgatcttggtttgatttatactttgtcataataaaagtagattccctattcctccgaattcttatctaaaaatttccctgagagagctgccacatacactagatcctaaaaagatggtctttgataagaacatttactagtttacaattttatgttaacctaattccctaaaggataggggaagggctggtgtcagaccagagacaagagagacaactccaattgttccgctttgcttctttgaccccttaactcatggctaaaggatcttacccgtctactcctcttaatttcttatttgcatcatttcacctcaatattcagcctcccacagctccaaagagcacgagagctaatactttgctcatgatatgccattcagagcacaagcctgacagcttggcatatcaatgcaatgttcacgggcaaatctcttacctgaaaatcttcactcactcttcaggtaggcagcagggtggaattgcaactcataatgagatacctttcactgggaagcccagaacaaaattgaaggggtaggggctaactcttctcgattaggggacggagatgtgaggctctatccacggcagctggctgagaacggtctcgtttaattaaagcctcctgtaactcatgggtttctgccattgaaaaatctaaaaggcacagctgacaagcaaagaccgacagacacccgcccttcaccagtcacccacctcccagatgttcacttacacaacacgttgcccggcagctgcgcgcccatggcacgtccggacagccgtggggtcccggaggcagcctgcgctcaggcccggggcgggtctccgaagctcccggagcagccctgtcgtgggaggggggcttgctggcgtctgggcgggcggcagctgaggccgggcgggggcaaagtgcagtccagctgccagggcagcggcgccgccttctcgccggcgcccggctcagccaagtggcagcatgtggaggacggggcgtccttcggcggcgcccgggctcccggcccctcctcctgccgtcgccgccgcgcccgccgcgcgctcctcgcgggttcgcggcccgcacctggcctccagatggccgcccaagggcgctcggctccagggcgcgccctctgggagcgacccacgaacttcgggtggcagagggttgcctcgatacttcctcaggcgcagggtccgaggcaggggcgggcggagcggagctgggctgccagccggttggtctgggccaccgccctcacgccccccgcaactaccaagcagctgccggcgccgcagcgggaacagacccgcaaaggtcaatgaaagcagaagccagcgaggcatcgcagaggtcaatgaaagtaagagccagcgaggcatttcgctggccctgcccctggtctcggccccctgggctgcgaactctcctgagctccgccctggtgagagggggcgctgccctccaaggcctctcccccgcggggcctgccttgggacaacaggtgctgggccggggcactgagcccgcctgcagggggccccgcagcctggccgcggccttcccagctaagggttctgcgcttgggccgggcagagctgccagacctgctttgacctgaaaccccactctcgcagagctaggccagggattccgcccttcccacctcgtttgcaccatgagtatgcagagcaaaagtgttggaagtacttaaacatttaaaggacatatccattttatacttttccatacagaaatactcaagaacattttccaagcgtgtttctctttcaaacaaagtatctctaaaggccattttctcactctttaaagcattgaataccactgcctcaaaacatggccattattgagttacacttccccgcacagtccatgtgatgcctgcatctgcccagcatgatttctagcaatagtaaaagtcccaagagaactacaaaagaaccattattttccttgtgttctacaacggattagtcaatgcgaaattcatgcttgaagggaccttagtgataattttgactccacattacagatgaggacacagaggcccagagttcagcagtacaacgaaagagagtggaacttaaaaaactaacaatctataaactgagacttagctctttgaaggtacattatagtaaaaaataaacctagattgcagaagagttgagaagtttaagttacacaaaaatctatcccagaatctcagattttaaatgaatcaagcattcttatttttatccaggcttaaattagctaaggttatatacaaacccagtggcccagaaatgtaatttttcttcatgctagtatgattaatgggattggagttggtacatcctgacaatcatagaatgtaagtatacctatattaattgatttttctgataagtatcattttttttttcttttttttgagatggagtcttgctcttgtcgcccaggctggagtgcaatggcgcaatcttggctcactgcaacccccacctcccaggttcaagcgattctcctgcctcagctcctgagtggctgagattacaggcgcctgccaccatgccaggctaatttttgtatttttagtagagacagggtttcaccatgtttgccaggctgatcccgaaccccagacctcaggtgatccatccgccttggcttcccaaagtgctgggattacaggtgtgagccaccgcacccagccagtatcaattttaatgtatacaaattgattatacttacataaaacaaattattcagttctacatatttcaggcacaccatgctaaataattatgctcaaatgcaaggttccacttttaggcctagttcttcacttaagttatgtaattttcttgtgctcttccttccccag

SEQ ID NO: 2680 - DNA, 4001 bp, Homo sapiens
ctctgcctcccaagttcaagcgattctcccaccttagcctcttgagtagctgggattgcaggtgcccaccagcaggtatggctaattttggtatttttagcagagacgggggtttcaccatgttggccaggttggtctcgaactcctgacctcaggtgatctgcccacctctgcctcccaaagtgctgggattacaggcatgagccactttgcccagccaaaactcttaacccaacatcgaacacttggtaagcactcaataaatggaagccattttgattatgattatcaaagtctagaacataaagtggactgtgtacatgcactctttaggagcagtcttttggccccaaactagattctatgggaattcccaggtaagatgcttctccaaaatgaagtgaagccatgtgacccagggtctttaaacattgcttcctcaaaccctcccccagtagggtacttctcccccagaggcatggggatctggccacactataagacaaacttctggaagtgggggcacatcaagcgtctgggtggtgccagtgcctgggcctgagctaaagtcttcaccagcctgccccttttggggaagcttctgacaatttcgattaccgaaatcttcctgccttttgggataatacagtcaaatgctccattgagacagacttctgtatctttacaggccctagaatgagaccaacccaaggcccagcatctgcagaatgtcccgtgtagaaccaggaaggaaaaactaaaccactccttttcccctcttcccaacacacccttctctcctctcagatccttggagttctccgcactcagaacctacaagctgcccaggggtcttccagaccagccccagttgcttccagcctccttccgccagcacatctctgcagccttgggccaccgatcctaagccaaagcctccccaacctctgggctcagaagcaggtgtaatcccaactccagcagggaattccagaggtgaaggtcacgggagcatctttaatcttcggttcccagtagagaagatacccaaagagcagggagcaggagccagctccaggctatacatttgtttattcatcaatcattcatttatgcattaatcattcattccccccacccatcagtcattcatctgcttatttattcattcaatgtgtttgtaccttgtccttgctttggttaccgcagatgttggtcctctcctgctttgatctgtcccctgtttctctggcagctgcacagcagaagccttctcatgtcccttgttgggtacttggctgagagtgtgtctccctctcagaggtgcctgaggaaaatcaaagggacagtgcagagctgtctgctgcctgcaagttcccttccattgcaaaatccagccttctggtccgtaggtcagtgggagagattgggaggggctgcagaggggtctccaggcccaatcgaggaataatggtctggacatcctcaccatgtgtgagctctggctgtttaaaaaataaaaaaaataaaaaaataaatatactggtccttctgggagaaaggggactgcaggagactctaagcctctgtgcctggttctgaggcctgagctcagcactttggcaggcccagagaacatggtatgggaaaacctggggctggagtttcagaggcctaagctgtgagccttctgacaggtctcccaccttccatccttccatctacctgaccctgtaaagtctgttctcagccagcagccagagatcctttagtaaaagaccacgtcctgcctgtgctcagaaccctgccctgactttcagttctctcggagaaaaacccaaggccccacttgatggggtccccctcatctcccactcactccctccattcagcccccactggccccatccttcccgaactcaccagccacactccaaccttagggcttttgctatagttgtttcttctagaacaggcttgacctgggtgacttgcttgaaagtgactcactttctcacttccttcaagtcttcgctcaattgaaaccttccccataagcctaccatgacccatcctatttaaaactgcaaagcacacaggcacgcgcgcacacacacacacacacacacacacacacaccactctcaaccccccttcctctttagcactcatcaccttctaacataatacataatttacttattatttttaccatttattgtctgtctctgcctgctcaagtataacttccaaaagggtaggggtctttgtatgttttcttccctgatgtatcccgagggtgggccatcccatggatgcctggtgtatagcaggagctagtaaaacattccttggatgaaagaatgaatgagtgaatgggctgtaggaagctctgaggatgaagcttgtgaagccacaggctgtggagtttggggcttcctgggggtagaatttaggaggtccacagtggcttctatcagctgtgctgaggagagaagagccaggcaaattgcccgctgccagccttctcggggaggaaaggtaggcagcagcatcggtggggattgcgctaactcaaggtgccagctccatgctgctctggggctggccagcgctctggatgtcattagctgatttgttctgctctgcagaatgtacttttcatatttaggcagaaaaaaacagctttcgatccttgtgccctttcttctgtgagctgtagcacatggcctgctaattatgaattaatcctctaaagagcatgttcattattctaatttaattgtgcttcgtttcagaaaataactaaacccagcgtggaataaactccaatgctgatcagttttcaagaagttaacataagacaaaattctgctagagggcagcagcaatttggaatcattaaagggaacccatgtaaataataaaaacaaaactaaaatgcagaattaaattaaggaataggaaattaaatttgggaatctaatctaaaattgaggccttatatgcacaggcttaccctggcttggctcttcgctcaggagtgctcaggagaggaggttctgcagagtttcccacgaccagggaagcggcagtccctcctgggtggcagtttgctgttctgggaagagagatgtgggctgaagtgggagaaagggggctttcctcccacggggtcaactgtgatgaagatgaaagccacattgtcacagatgcatctggatagctcatcctgagccctggtgaccggttcaggagaactgcctgcagccaagagtccaagctgccactcactaggaggaagcacaggaaatgaggcagatggtgctgggtggctgctggcctgagatgctgggagtggtcagccctgggcaaagaagccgcgccagccctccttcacctttgggccctgggcacccttccacaggtgacccagctcaggacagaggctgagggagtttcctcctgcccgggcagtggcccctaagcagggtcctggcctccccaccatcaccgtgagagcccagttacagatggaggagacccggactccagcagcatcatgacaggtcaggcctccaccaggcaaaatgagaaagggaggatgggaaggacggggtgtggggaggaggagagagccaacttataaagtgtctgcaagtcagatgtacagtcaggggcagagttagcaccatggctcaggcttcattatgtattgattttttagaccctgtccctggggtattctttttctctccatattcctacctcctctggctctcttcctctctctctcccacctccctcctcaaaatgaaaagagctcaaccttctgagtcagacagactgatttggagccacagttcttcctcttacttggtactggagcttcaacaaactattttgccttccttaacctcagtttcctcatatgcaatgctaataatatctgtctccttggtttgttacaagggctaaatgcaagaaagcacttggcacag

SEQ ID NO: 2681 - DNA, 4001 bp, Homo sapiens
tggggagtgggaagggacactgcatcgccgtctgtgggggatggtataccagccatgacagtaatcttttgacaacatccctttaaaagtccattcactcctatagcagagatctgtgtgctttcttcctcttccacacctcatgacaacacacatcctgccaagaaaaactttattcaacaagcaagaggatccaagtcttacagagaaagaaacatacttcaaacaagaaactttcagaaaaagttctgtccacactagtagttattaagcctaactactgcatttcatctgaggtaaataatacaaccttgtcaggaaaacataacatgcttagaagacttccattgttgagtaaaaattttttatatgaagatatttaatgacaagaaaagcttaataagagatgtgtgtgtgtatacatatgcatacaatatatttcattatgcaaagaaaaaatacacagaaaaagactggaaagaaaatacgcaaaaatgttagcagtaaccaaatctaagtggtaagattatagaaaatgttttaaagattttctagcactccctgaattttggaagctttgacaaagatcatgtattattttgaaaagcagaaaatttttaaactgcaaaaaggtggcattcacttgtcatacacgcaaacaagtgcaagcttacaaaacttaggccctaagctgctttcacagatcgtatattctagatttcgaatacagctgctaattacttcctaacaatttgaacaaactacaaaataaagctaaacactttcacttctggctctactataaagatttcataataaaataaaatataaaaacaaagttttacctttctgtaaaaggtctacgtctggctttctacagcagaatattactaaccattttttaaaaatcatcaatttatgttattttacacaaatgccacctcaaagaatgtaggtttagcttagtaattccaaagtacatacgcctaatacaaagtgcaagaagtttttatgcactgtagcgaacgcacaaatagaaacaccttctgtgtgcagatgagcttattttatagacacctttccattacctcttaagagcctgatatctaatgaagctttctgcaaaggtactttgcttagcctgggcatggatttacttgattatctgggaagctgtcaaaatcgatctgaaactgcattacattcaaggcacagaatgtcaactcctgactgggcctcctcctctctcctttcacaagagcgcctttaatatcccctagcctacatttccgggctcatgagtcactgagaaatgagctctaagtttctcttagaatgctgctcaaatagctcctctacagcattcaaggatctggccccaaaatacctctttagcccaataccccccgccccctgcaccatgccaacaaacggaattatccatgatttctaggctttgtcttctcgcttttgctaccccttccacacacctcttctgcaatcctcctctcctaaatcccatcaggccttcaagactctgctcagcatcccccgcccaggaagccttccaggtttctgcgaggcagaagtgatcggttcggtttttccgggtgccgttctagcactccgtcgttctttcacaggacttatcacctccttcccggtatcgcagttatttgtgttctcgtcttatctctcacaccagagcctaagctcctcgggggaggggaccggggcccgcttcacctttgaatccctccggtgcgggccgactacggcgcctgcacgcagtctgcgcttggggtggttccattgaactccagaacgctccgaccgcccaattcctaaccagaaatcagttaggcattttcctgaattggtcacaaagctggtatctgcctcccgacaacaggaagtttaccaggggcgggagcgaggcgctgaagcccgggtgcagccggtgacagttgacccggcccgcacttccccgcccgcccgactccggcccggaccaccacgcgccgccagccccgccagagaaccacggggggagaggcaggagcgcctggactgcaggcccccgggcgccccacgccggcgaaggcaaagggagcgtctcagcgagggaccggagccgagccgggcggagagggcaggctgggcccggctgctcccgggggctccggggacaagctgggccggggccgccgccacccaggaaaatggaggcagccccggggccggtgagggcccagcggggcaggcggaagccgggcaggcgtccgcaccacgagcagggccggccgggggtcactcacggggctgggccgggcgttcccttctctgcctccgcgtcgtcgctgtccccgtcctcggccgccgccgcttcgggctgctcgttcggtccccgcggagtggctcggacgctcggcccctccgttgtcttccgcccgctcctgctcccggcgacgggctcccgcggcggcggcggctgcgcgggcggacggctgcccaggggctcccgcggctgccgccgcgctgctgcgctcgcttgggctgcggctgctgctgtggggcccggcgccgccttagtcttcgcctgtgcccccgccccggcgcctgaaggctctgtgtctcccaggccgcgccgctccccgaacccctcgccccgcttgcggcccgagcccggctttgacgtgcgcactgcgcagccgccgaggacgcgacgtcgggcggtgccgcaacgcccccttccgcctcgggcgcccccgagcggccggcggactcagggcgccgcaagtaggcgcgaggcccgagcgggaggggccgcagagaaaagcagaagccaagccccgcagttcctcttcctccgccgcagcttccaaggcggggctcagccctttctcctccgcctgagcgctcttactgcgggaatcgcacgcccactttcaacgaccacttcctcaactcttcaagcttaattctgcgagaggccgggatcccactttgtgcagaccgattcttactttcttggagcagatcgcttcattttagcatccagggggacacagcatccagggggacaagtgccagaacgttccagattaatgggaatattcctatttaaatcagcaacctggatttaagtcctgctccaccatttgctatctatgggctgtttcacgtccctgtgcctggatttcctcacacattaaaaaaaaaagtgtgtaataatatagtggtaccagccacgggcttctgaggatgaacgggacagtgcattgcaaagctctgacaacggagcctggcacatacaaatgccatatgtgtgtatttttgtttctttgtttttaatgtgtaactgaactactttttaagcgcctcctgtacgtcagggatggggcagtgagcgaaacagtccatgctcctagcacaaacagttgacaaataattgactaataaacctacaggtatgtataatactggacaattgggccaggcgcggtggctcacgcctgtaatcccagcactttgggaggccgaggtgggcggatcacgaggtcaggagttcaagaccagcctggccaacaccgtgaaaccccatctctactaaaaatacaaaaaacaattagccgggcgtggtggcgggcgtctgtattcccaggtacttaggaggctgaggcaggagaatcgcttgaacccgggaggcggaggttacagtgagccgagatcgcgccactgcactccagcctgggcgacgcagcgagactatctccaaaaaacaaaaacaaaacaaacaaaaaacaacaacaaaaaaacaaatactggacagttaaaaacaccactgggtgaggaggggagagaaagcagggtgttgttatttacagtgttcattcagggagcagcttcctggagagagagagcctgggagctttctgtatggaaaggcagagggaatagcaggaccaaggccctgaggcgagaatctgctggcttgaaag

SEQ ID NO: 2682 - DNA, 4001 bp, Homo sapiens
gtatattctagatttcgaatacagctgctaattacttcctaacaatttgaacaaactacaaaataaagctaaacactttcacttctggctctactataaagatttcataataaaataaaatataaaaacaaagttttacctttctgtaaaaggtctacgtctggctttctacagcagaatattactaaccattttttaaaaatcatcaatttatgttattttacacaaatgccacctcaaagaatgtaggtttagcttagtaattccaaagtacatacgcctaatacaaagtgcaagaagtttttatgcactgtagcgaacgcacaaatagaaacaccttctgtgtgcagatgagcttattttatagacacctttccattacctcttaagagcctgatatctaatgaagctttctgcaaaggtactttgcttagcctgggcatggatttacttgattatctgggaagctgtcaaaatcgatctgaaactgcattacattcaaggcacagaatgtcaactcctgactgggcctcctcctctctcctttcacaagagcgcctttaatatcccctagcctacatttccgggctcatgagtcactgagaaatgagctctaagtttctcttagaatgctgctcaaatagctcctctacagcattcaaggatctggccccaaaatacctctttagcccaataccccccgccccctgcaccatgccaacaaacggaattatccatgatttctaggctttgtcttctcgcttttgctaccccttccacacacctcttctgcaatcctcctctcctaaatcccatcaggccttcaagactctgctcagcatcccccgcccaggaagccttccaggtttctgcgaggcagaagtgatcggttcggtttttccgggtgccgttctagcactccgtcgttctttcacaggacttatcacctccttcccggtatcgcagttatttgtgttctcgtcttatctctcacaccagagcctaagctcctcgggggaggggaccggggcccgcttcacctttgaatccctccggtgcgggccgactacggcgcctgcacgcagtctgcgcttggggtggttccattgaactccagaacgctccgaccgcccaattcctaaccagaaatcagttaggcattttcctgaattggtcacaaagctggtatctgcctcccgacaacaggaagtttaccaggggcgggagcgaggcgctgaagcccgggtgcagccggtgacagttgacccggcccgcacttccccgcccgcccgactccggcccggaccaccacgcgccgccagccccgccagagaaccacggggggagaggcaggagcgcctggactgcaggcccccgggcgccccacgccggcgaaggcaaagggagcgtctcagcgagggaccggagccgagccgggcggagagggcaggctgggcccggctgctcccgggggctccggggacaagctgggccggggccgccgccacccaggaaaatggaggcagccccggggccggtgagggcccagcggggcaggcggaagccgggcaggcgtccgcaccacgagcagggccggccgggggtcactcacggggctgggccgggcgttcccttctctgcctccgcgtcgtcgctgtccccgtcctcggccgccgccgcttcgggctgctcgttcggtccccgcggagtggctcggacgctcggcccctccgttgtcttccgcccgctcctgctcccggcgacgggctcccgcggcggcggcggctgcgcgggcggacggctgcccaggggctcccgcggctgccgccgcgctgctgcgctcgcttgggctgcggctgctgctgtggggcccggcgccgccttagtcttcgcctgtgcccccgccccggcgcctgaaggctctgtgtctcccaggccgcgccgctccccgaacccctcgccccgcttgcggcccgagcccggctttgacgtgcgcactgcgcagccgccgaggacgcgacgtcgggcggtgccgcaacgcccccttccgcctcgggcgcccccgagcggccggcggactcagggcgccgcaagtaggcgcgaggcccgagcgggaggggccgcagagaaaagcagaagccaagccccgcagttcctcttcctccgccgcagcttccaaggcggggctcagccctttctcctccgcctgagcgctcttactgcgggaatcgcacgcccactttcaacgaccacttcctcaactcttcaagcttaattctgcgagaggccgggatcccactttgtgcagaccgattcttactttcttggagcagatcgcttcattttagcatccagggggacacagcatccagggggacaagtgccagaacgttccagattaatgggaatattcctatttaaatcagcaacctggatttaagtcctgctccaccatttgctatctatgggctgtttcacgtccctgtgcctggatttcctcacacattaaaaaaaaaagtgtgtaataatatagtggtaccagccacgggcttctgaggatgaacgggacagtgcattgcaaagctctgacaacggagcctggcacatacaaatgccatatgtgtgtatttttgtttctttgtttttaatgtgtaactgaactactttttaagcgcctcctgtacgtcagggatggggcagtgagcgaaacagtccatgctcctagcacaaacagttgacaaataattgactaataaacctacaggtatgtataatactggacaattgggccaggcgcggtggctcacgcctgtaatcccagcactttgggaggccgaggtgggcggatcacgaggtcaggagttcaagaccagcctggccaacaccgtgaaaccccatctctactaaaaatacaaaaaacaattagccgggcgtggtggcgggcgtctgtattcccaggtacttaggaggctgaggcaggagaatcgcttgaacccgggaggcggaggttacagtgagccgagatcgcgccactgcactccagcctgggcgacgcagcgagactatctccaaaaaacaaaaacaaaacaaacaaaaaacaacaacaaaaaaacaaatactggacagttaaaaacaccactgggtgaggaggggagagaaagcagggtgttgttatttacagtgttcattcagggagcagcttcctggagagagagagcctgggagctttctgtatggaaaggcagagggaatagcaggaccaaggccctgaggcgagaatctgctggcttgaaagcggccccagataggggaagagatgaggaagaagtgcggccctaccaaccaaagttaggacttcctgtttttactctcaaggagatgggaagcaatttgaagggttgcgagcagagaaaggacgtggaatgacatttcaggaggatccctgtggctgtggtatgaggaccagactgaaagccctgagggtttcagcagggggaccagcgagaagcctgttgaaatcagccagccaaaagataagactgtccggccgggcgtggtggctcgcacctgtaaccccagcactttggaaggccgaagcagggggatcacctgaggtcaggagttcgagaccagtctgaccagtatgttgaaaccccgtctctactacaaatacaaaaataaccccagctacttgggaggctgaggctggagaattgcttgaacccgggaggcggaggttgcagtgagccgaaatcgcgccactgcactccagcctgggcgatagagggagactccatctcaaaaaaaaaaaaaaaaaaaaaaaaagataaggctctgtccagggtggtggcagtagaagagtaaaatgatcacctgtagacacgtttaaaaggtggctcacgcctggaatcccaacactttgggagtccaaggtgggaggatcatttgaggtcagttcgagatcaccatgcccaacatggtgaaaccctgtctctactaaa

SEQ ID NO: 2683 - DNA, 4001 bp, Homo sapiens
tcggaatccaaaatgcatttatttccataatgtacatgcttagtgctcgctgaattaaatggtagtcaaaatttccgcttctgcagaaagtgaaattctgcataataaatatcatctaaatatgctttatagacccttttaggagaggtctgagttcaattttgatatcaattcctcgttgatatgtttaaattgatgataatcactaaagaaacaccagagctgccatcataggttagaaaacacattacacaatactgagtgacctagagggaaaagaacttctcaaggtcactccagcagcccacaggaagacctgggataaaagcctcttggtgcgatgaccaatgtcttcctaggtcacccgaaacctaggacacaccccgacaatttctgttccaaagaaagatcaaggtgactcattgcatgatctctctagcacccagcagccaggggtggtttcattaacagcacatggacagttggaaaactgaggaccaatttcctgtgccaaggtgaaaggcacctaagcattgagcattaccagcgatccggagatcccgagcacagacaattcgcactagaaccacgcaggagaaagcaagcactaagaaaacaaacacgaagtgaaggcgcacccagacccggagctgagtgctggccttcgttaattcctatttaaccagatacagctgtctttccctaactaagcgaatccaagaagcggtcctaaagtgagagtaaactttctgctcagtgtctttcttttgaccggagcttgacgatctctcccaagatccagacagataagagtattcaaattaggacaaaacagaagaaaccactaaatctcaactcgaatcaaaccaggtccccggccccgaggggtctggttactctaggtcgagttatacgaattaaagacatttctccacgcaccaaagatacaaccagacatatttccagctcttaaattcaacgtccctgacttaagccaggtccccaccgaactgtccacacacatgcacaaactaacttcccggggcggtgcggagacgccgggacgcgaagacgtcaagagcccaggctagagggagagggactgagcccgagcaccggccgaggccgggaagagacgcgcgcgggcttgacccgcagctcccgcacgtgtgggccacggccggctccaggacccccgcgccgcgcgctcggcctcctccccatcctggtctcccgcctccttctcatacctgtctgaggatgaagctggtcgaagtggtgctgccatcggatcttttcaacctgctcctccgggttgtggtgcctcgggccacctggactcgacacacgggggccagagagaagccggtgaggaccgcagcgcagagcggggcgaccacccccggctggagtccgcctccggacccgctccctggggtcccctagagcccgcacccaagtctcctccgcgactcccaaatacagcccccacccccacccacccactgcaagcctcgactgctgaaaagatgctcgagaagagcagcccgcaagcacccaccacatccattaacaaagactctcagggtgcggggtccgagtccccggcatccgctgggggaggctgcgggctccggagcgggagcgcagagacccgaaggagggtgaggaggaggaggaagagaaggaggagaaagaggaggagcgggaggagaaagggacgtggaggaggggtggggggagcggggccgccgactcccgggactggggccccgcacgcccggcacgaaggcggggcgcgctagggcggcggaggaggtgtgaggaaggaagaggaggaagaggagaagggggaggagggggcggtacctgcgaggtgggggagtgcggcccgtccgcggtcccgttcttggcgtaggaggaggaggacatcgttcagagccgccgcatggccagcccgtgtgcggtgggcggagggggctggcccccgaggctgggctgcggacggagggggagggcgcaggacttccccacccggctccaggacccgcgccggcgcccaggctccctgcccgcacttcggagagcgcggcaccttaaagggaccgaggcgcttcccccgcgctcgcggcggggtcccggggagggggcttctcggaaactcgcctacccgagcggattgggagaagcgctctcccacctagcaagcgctttacatcagagcttccagaggatgaagggagggggaaatctgggatgggggtggcaagattaaaatagtctgcacagtttaaaatgagacaaaggtggcacggttcatgaatcaggacttggggacggaagctggtgcagtgtggcgggaatgggaagaaccgagcgggtgtgtgtgtgtgtgtttgctgcactggaattttaaaagggcaagagcagagccaccttccgcgacttcactcatcagcctaatgtgtaaggcatggggttttgtggcttgcttttcgtccgtgtttttgtattgctttggcaattctgtccttagagctgcgagtcacacacatccaggcagctgtgagaaacccagccagcctgagtctgacgggagatgctgccccgccaaagaccagtatgtcctacggagttttgaaggtcatgttagacctgctaagaagcaagagttggtcactgtgcctcccatttctatgcgaatggatattttcaagggggagaaactcatccttgcaaccatacacaacgtttgccattggtttcctcctgtaaatacatacaagagattaatttgtgatcaaattaaaagagagggattgcggaaaggaagaataagtgcgaggtattgacagaggaataagaagagggaagaaaagtatatgcaaattcaaaaataaagagactccgtttaaattaaaatatacttactatctcaaatcgctaaatcagcttgcattctaggactttatgtttatggacacaactaccatgcttgttttaataattgcttggctttattgaggtcctggttatatcttaccatccaccagacacttcctttccattcctaatcccttcacttaatccaaacctctgtaacaatcttataactaatgtccttgcctccaggcttcctggtgcatgtgcacgtatgcacatgcacacatacacacgcagagatttcattccatctacacactacaggcaaaaccattttcctaaaatatcttgcccaagtcactcttctctaagataaagtccaaactccatggtccaacaactcagcctctcctgcatttctgatcactctccatctcatttctccatcttgatctctctatacaaaccttccagcaagcaggcaggtctagtcatcaatacccaagtattccaaatacaatcacatttgagctcttctgctttggaatgcctccttggaatatgccctcccaacaacctacacacccggctgaatcctacctttcttctaaatgggactcagctcacgcttcctccacagaaatcctatctgactactccagtcccacataattcttgtgcttctgaaaaactggagcatgtattctctgggcacttagaataggctgccttagcttattagtttgttagttctgtttttgtgaaaatctcctaattttcagaatttttagcggtttatcttctattcctataccttccatatagtagatactccatgaatttatggggaatggaggtctaaccatgcaggactccctactttagttactgtcaacccaatccgtatttagttctgagccattttcatagttgatacgtgtgtgcatattaaattactatgtgagcactggactttgaattgtgtggttttccactgtccacattctcactgactttaagttattgaaacagaacccacagaggcataacaacatgagaagccctgtacacccagctcaaagcaaaactggtgaaaattatatgttttatatataagc

SEQ ID NO: 2684 - DNA, 4001 bp, Homo sapiens
agaacttatatatacatcatctcaatcagttacgggcataaattgagaaaagagtaagaatattagaatattattttgtttgtgcttggaaggaagaataaagcattagtgcagttatgtagatgaactcaaaagttttagtcaaacagcttatggaaagaactgctgtgtaattagtatttccaagaatttgcaacaatgaaacaccactaaaaataggcacctacaaaataaacaccagcaagacctcaaacagttgcataacagaaaaatgtttttaagataaacaatatgtttgccttatcaaatacataatctaaatactgcaaaggggatagaatgcacttttagaatgaattcggaatccaaaatgcatttatttccataatgtacatgcttagtgctcgctgaattaaatggtagtcaaaatttccgcttctgcagaaagtgaaattctgcataataaatatcatctaaatatgctttatagacccttttaggagaggtctgagttcaattttgatatcaattcctcgttgatatgtttaaattgatgataatcactaaagaaacaccagagctgccatcataggttagaaaacacattacacaatactgagtgacctagagggaaaagaacttctcaaggtcactccagcagcccacaggaagacctgggataaaagcctcttggtgcgatgaccaatgtcttcctaggtcacccgaaacctaggacacaccccgacaatttctgttccaaagaaagatcaaggtgactcattgcatgatctctctagcacccagcagccaggggtggtttcattaacagcacatggacagttggaaaactgaggaccaatttcctgtgccaaggtgaaaggcacctaagcattgagcattaccagcgatccggagatcccgagcacagacaattcgcactagaaccacgcaggagaaagcaagcactaagaaaacaaacacgaagtgaaggcgcacccagacccggagctgagtgctggccttcgttaattcctatttaaccagatacagctgtctttccctaactaagcgaatccaagaagcggtcctaaagtgagagtaaactttctgctcagtgtctttcttttgaccggagcttgacgatctctcccaagatccagacagataagagtattcaaattaggacaaaacagaagaaaccactaaatctcaactcgaatcaaaccaggtccccggccccgaggggtctggttactctaggtcgagttatacgaattaaagacatttctccacgcaccaaagatacaaccagacatatttccagctcttaaattcaacgtccctgacttaagccaggtccccaccgaactgtccacacacatgcacaaactaacttcccggggcggtgcggagacgccgggacgcgaagacgtcaagagcccaggctagagggagagggactgagcccgagcaccggccgaggccgggaagagacgcgcgcgggcttgacccgcagctcccgcacgtgtgggccacggccggctccaggacccccgcgccgcgcgctcggcctcctccccatcctggtctcccgcctccttctcatacctgtctgaggatgaagctggtcgaagtggtgctgccatcggatcttttcaacctgctcctccgggttgtggtgcctcgggccacctggactcgacacacgggggccagagagaagccggtgaggaccgcagcgcagagcggggcgaccacccccggctggagtccgcctccggacccgctccctggggtcccctagagcccgcacccaagtctcctccgcgactcccaaatacagcccccacccccacccacccactgcaagcctcgactgctgaaaagatgctcgagaagagcagcccgcaagcacccaccacatccattaacaaagactctcagggtgcggggtccgagtccccggcatccgctgggggaggctgcgggctccggagcgggagcgcagagacccgaaggagggtgaggaggaggaggaagagaaggaggagaaagaggaggagcgggaggagaaagggacgtggaggaggggtggggggagcggggccgccgactcccgggactggggccccgcacgcccggcacgaaggcggggcgcgctagggcggcggaggaggtgtgaggaaggaagaggaggaagaggagaagggggaggagggggcggtacctgcgaggtgggggagtgcggcccgtccgcggtcccgttcttggcgtaggaggaggaggacatcgttcagagccgccgcatggccagcccgtgtgcggtgggcggagggggctggcccccgaggctgggctgcggacggagggggagggcgcaggacttccccacccggctccaggacccgcgccggcgcccaggctccctgcccgcacttcggagagcgcggcaccttaaagggaccgaggcgcttcccccgcgctcgcggcggggtcccggggagggggcttctcggaaactcgcctacccgagcggattgggagaagcgctctcccacctagcaagcgctttacatcagagcttccagaggatgaagggagggggaaatctgggatgggggtggcaagattaaaatagtctgcacagtttaaaatgagacaaaggtggcacggttcatgaatcaggacttggggacggaagctggtgcagtgtggcgggaatgggaagaaccgagcgggtgtgtgtgtgtgtgtttgctgcactggaattttaaaagggcaagagcagagccaccttccgcgacttcactcatcagcctaatgtgtaaggcatggggttttgtggcttgcttttcgtccgtgtttttgtattgctttggcaattctgtccttagagctgcgagtcacacacatccaggcagctgtgagaaacccagccagcctgagtctgacgggagatgctgccccgccaaagaccagtatgtcctacggagttttgaaggtcatgttagacctgctaagaagcaagagttggtcactgtgcctcccatttctatgcgaatggatattttcaagggggagaaactcatccttgcaaccatacacaacgtttgccattggtttcctcctgtaaatacatacaagagattaatttgtgatcaaattaaaagagagggattgcggaaaggaagaataagtgcgaggtattgacagaggaataagaagagggaagaaaagtatatgcaaattcaaaaataaagagactccgtttaaattaaaatatacttactatctcaaatcgctaaatcagcttgcattctaggactttatgtttatggacacaactaccatgcttgttttaataattgcttggctttattgaggtcctggttatatcttaccatccaccagacacttcctttccattcctaatcccttcacttaatccaaacctctgtaacaatcttataactaatgtccttgcctccaggcttcctggtgcatgtgcacgtatgcacatgcacacatacacacgcagagatttcattccatctacacactacaggcaaaaccattttcctaaaatatcttgcccaagtcactcttctctaagataaagtccaaactccatggtccaacaactcagcctctcctgcatttctgatcactctccatctcatttctccatcttgatctctctatacaaaccttccagcaagcaggcaggtctagtcatcaatacccaagtattccaaatacaatcacatttgagctcttctgctttggaatgcctccttggaatatgccctcccaacaacctacacacccggctgaatcctacctttcttctaaatgggactcagctcacgcttcctccacagaaatcctatctgactactccagtcccacataattcttgtgcttctgaaaaactggagcatgtattctctgggcacttagaataggctgccttagcttattagtttgttagttctgttttt

SEQ ID NO: 2685 - DNA, 4001 bp, Homo sapiens
acccgccatcaactactgccaccgagtcaagtcactgcactcttcacttcccatcttacagaaaaactcagctgtcctgtgacactggacccaaaggcaaaaaaaaaaaaaaaaaaaaatgttttcatacttataatggctcccctctgaaccagtgcatctgaaatgtatacagttctggagaacaaggagctggatttattagttcctagccaactcttcacagcagccagtttctacaggcatttctaaaatgactccagtccacttcggtgcaattcactgcctgcccaagtttaaaatcaatggccgaaaataaaacttacaattcacaaggcatcataggtttcataactgagtgagcagagaaggggtagaagaagtgatcaggccttctgaagaaaccagcccaggaagctggcttactgaactcctgtaattgcctttgccattcccccaccccacctgcaagtgtggaccttcttgatttcagccaccaatgtttcagactacagtcccttacaatacactgacagtctgatcatttatgagcacgttgggcaacacgcagagagactttgcggaaacagagttagagttagagaaaacacacagacaggaaggaaaaatggaatgccttaacagaactgaggatttctatctttcatggatagcacatcattagacatatacgtctgcattgacgtataccacagggtttttttttgttttttgttttttttttgttataacctgtttatttggtggtttagccagagaatcttatataacacactcctgtttcaaatgtagcaacatgtattggcactgcactcacataaaattcagactccccacagcacttcccattaaccacccccagccattctaccttgcgaggtttctgtgtattgatgaaaaaaataggaactaccaccagcaagagtcaaaagaaagattcaattatcagctttaccttatatttaaaagctagcactctatggtatgatttcagggatttcaggaaattatttcaccctgattttaacagattgcatgagcctgacctaggggggagaaggagtccagttctctaacccaaaacacacgtgagtctgcttcgctcttccaaggtagagtataggaacactgcccactgcctctgcactggattgctgtatggccacaagcctagcatctgatttccttaacaaagaagcagtatatctgcactgcttgtttggccagaaagcacataataatacagccacagcttaggaacttccattcatgctagctcaacaaacaatgtgtattatataatgaatgaggcttttctatgaaccctgctattggaaaacataggcactttctgcatagtttaaaccagtctgcaaggagcagttacccctggtgagatcaaacgtggacccggtaatgtataaattcaaacagcctacactcttgaatgctttgccatcaccctaatttcttttttgcttgacaataaataattttagttacctataaactacacagagaacatttacacagcagccagcaagccccagaatgatgttagctttctgctccatgttccctgcgttgcctaagaaataagaagcgggggggtggaggggatagtgggaggaggaagaggaggggagagggaattagctatctatgaaaatacttacagcctccgagtcttcaattccatgcaggtacaaattgtcatacatggaggtgtgataatccagagcacctctttcaaggcaaaaacaaaattgctgcagaaaccacagctacagcttaaagagaaaaggcctgtttgggagaactgcgcctgccttatcaattcctgtggatttaccaggcaagatgctattcattcacatcccacagggtgaggttatccccagaggcagtccagacctggcattttatctgccttcccaatacagagcacaaaaagcaaaacccttcctcaaccacagactggtgactgagctaggaaagcggcctctgattggctcggcttccctgcttcagtcagctgaagagcgttccctcggagagtggagggcgcctcggagcatcctacccagcaaagagctgcttcctgtttcgcctgtattgttagttctacaataaacacttatcaatatccaaaaggctgcgtggaatgtttggaaaggcaaactattgaatactccaaacacaactgctcatcttcttaattaaattcacaattggagaagggagcaaaggaaagattttattttcagagaatatcatgtaaagacaggtaaacagatactaatctcatccaacatctgtacttaacagatgcatttaagtcaaaagggcaatgagtcataaaaaaaatctttacacccaatgtgaagaaaaaaatgactagaataaacagatggtaagatttcttgtgggaatttctatagtaaaagttttcaatattctcgttgaagtctctctgcctcactggcaagaaaagagctctgtgtcccaactggtgaagtttgaaaaggaagccaaaaacttctcaacttttagatgtgaaatgtttaatgctctttagttgaatgtttttaaatcaactttaagcaacagccaatgtcttcacgtaaattcttcatccccttcccatgcacaaatctttaataatcctgaagtggcattggtcttttccccaaaacccaaatagaaacgtcagactccctccacctgctgctccacaccgcaactcaggtgacctaggacaggtcccacattgcagcagcctgggatgagtttctctaggtacttagaactttctggtcaaccaaaaaaaaaaaaaaaaaaagctgcagctttgaaacaggagagctttatggcccactctaaaagtagccagctaaattcaggaggacaaagaagctggtgaggagcacagaacatattttagagaagctgcatgactgactgggtaagtaatgacccagaaactcagaggctctaagtcccctgtatcagctttgccactaattggtcagatgactctggaccagtcagtcaccatcttgatgggctctggtttcttcacccgccaaaatgaggtaagaaataacttagggaaagaactctgcaaatctaaagtgcaacataaacacttaccattgagaagctgctttgtcagctggaaggcactggctgcagttcatgggagctcagcacaagagtaactggctggccctggatctaggaaaggaggcctgtccttccagccagtatctctgaaaagcgtaactcttaaaggaacaaacctgagtcaaaataataacacaacagctacaacagctgagcagagcatagttcttccaggtctgtgctgacccgttcatgtctttcaatcacagtcgcacatcttgggagtggcatcaatacctagtccactgtcaaatataaatgatagcaagaagatattgctgtccttcagaatcctaaaatggtagggtttgaacagattgtcacctctgagattgtgcccccatggagggaggacagcagcaggggatgagtgcagtcaacgggattccatagagagaaacccagtgctggctctacctgtcgacaaggatgcatgttggagaaagtccctggccacgtggaacctcggttccctcccccatacaccaagaggaccagatcaaagggctgctgtgctcaaattcatgtgtcagactcttattttaattattaactctctaattacagccatacggtatttcaaccagaatcaacagaaaactgagacaagaggttctttttttctcttaaattctccagatcatttcccgactttaccacttcaattgcaagtatagatattccccgattgtgttaaaatggacatctaaattaaggggagaagacagaggcagcccactttcacaattcaccaagatgagacaaattgttcccaactggataaactgtacata

SEQ ID NO: 2686 - DNA, 4001 bp, Homo sapiens
cagcctgggtgacaaagtgagaccttgtccccaaaaaaaaaacaaaaaccataaacttgttactcaatagataagcgtttaatagctacatagaaacagaaagtttatgtgggagggatcagcatatttaaactgcattcagctgggtgatgaacagtttaaggaacctgcattctgagactgtccagggatctgaaggatagtttggcagaaccctccctggccaggtggagtaatccatttatatgtgcgagtggctccaagaggcctttcccaccctgatcctaatcaggcctcaattttgtagttttataaactcaatttagtcagtgtgtctagagttgacaaaggtgatgactgacaaaggttaaccaaattcacaagaattcactatcaactagaatgcagtgtatttgtaggtttgtgatgaacctagaaattcttttccaggaagaacaacatgtacgtcctttatccggagctcactctccccagcgtcagggtggctgggaaggcaaattaagaattaaaggcttacacctgcagtgaggccaaacaaattttgagagatactactctaggccagattgacttcctctattaccttaattactatatgttgggttttttttaatgcttgaactgtcagagggcaacttagtttccaaatttcagaggtgaaggaataggggaaacctcactgtaggaagaaactcagttttctcacctagaggtaagaacacaactgaaaagcagagaatcagacgaggccatgtcagtaggtctagaagataatgtcactggttttgtaggtaaactggcactcactgtcacagagaagtatgtgaccctagtttccagtctctttccactaatttatgtagtcctaaaaagcactgctcccatctgactctgctgctaaaaaaaaaccttcaatggatcctttaccaaactaagctgactctgctttggcttcaggtccctccatgcccaccggatttaacttatctgcaggcttttttctcctgacttctgcatgcctaacaagttggacaaggctgttcccttacacctcttttacttttccttgatccatgccttcactacatacagaatgctttcagctatacctggagccttgatgcccttaacaaaggcggtagctttttcctgaggcctccaacactctgtgcctcccaaggcacttaacaacccctaactacagttactagtgatcttagtccttgactttactacttcagtgggtatgttttctgcaggatgcccagcagggtgtcaacgtctcctacttcactaatagttaacaattactgacttgaaaaggaatgtagagaaagcactgggtgtggctaccttgcagagaccgaactcatccatttcatctggggggatgccatagttgccgatcagaggataggtgagcactaagatctgtgccttgtaggagggatcagtgagggcctcggggtagccgaccatgccggtttgaaacactgcaagaaagaagcagggctgggctccggtagggcacccttcggaacactccccgcgcgatgagcacgccccagtggaggctgccttggtcgcgaggggtttatggcgctggggcccatgggcaccgaatgggggaagggggtacgctggcgggaaaatggcggggtctggacggggaaggttgggaggagaggcgcatcacagagtgggataaggtctgcagcctaaccgggcttgcttacccacttccccggcagtcgacacggcggccccaaagggctggccccgcaggaccgacccgtcctccaacactagggccgccatgggaagggagctcagaggcgggggcgagtacggagaagcgggaaggactgcaaactccactggaaccacgtgaggacggcgcgccggagtcggtccacgtggctaacggcgcggggcgctggagagaagccgggcgcggcagcgtaggagcctcgggcgcgcttggcggcagcagcagagactgcggcggcgcggacacaggcggcgtgaggggcggggccgggcacgtaaggggcggggtccgcggagccacggggagtgggcccccgtggtctccgcactgcaaaaccgggggaaacctgaaaaaaccggctgccctaaagcagtccctcccaccccaagcaagaaacacgtaaaggcagggcgcctttccttaaaaagaaagagaggaaaaaaaaagaaaaaagtgtttattataggcaacaacaccaatgggaactggtatttgtctacaccaagggagtgcaatttttcatcttccaatggcggcctcaaccttgaggcgaatccactggcgaaagatgcctttctaggaagcagagctccctgactgggctaagatagttcagattgatcttaggtcaatggtaagacctatgtagttcatgaagtcttggcttttcggcgctgggtcgcccaaagcagaatggagacggatagagtggtggctcccagaatcccgaagaacataagcagtgagaacgagccctgtgaacaacagaccaaaaaacacccccatacaacgttacacggagggccacatcctaacacctagttctttcctaatatacctatcactttgtctagggcaattctatagttttccacctataggaaatttgtatcagctcctggtcttgtggctctcctttctgagaagacttgctctatgcattccttgtatccctagttagacggcctaattcctcacctggcgcatacacttgtatccatggaaaccatcagcacaaacacactgcaaaagacctggaccatcaggtacacaagatccattctcaggacacatttctggaggccagagagaaatagagaacatcactttatccatttcattaggcatatttctcaattatctgtttcaacttagattctctcaatcattgctaggataaaggaagaagaaagaaaattacagataaaaacagtaacaataatgtcaggcctctgagcccaagctaagctatcatatcccctgtgacctgcacgtatacatccagatggtctgaagcaactgaagatccacaaaagaaatgaaaatagccttaactgatgacattccaccattgtgatttgtttctgccccaccctaactgatcaatatactttgtaatctcccttacccttaagaagtttccttgtaatctctcccacgcttaagaaggttctttgtaattctccccacccttgagaatgtactttgtaagatccatcccctgcccgcaaaacagcactcctaactccactgcctaccccaaaacctgtaagaactaatgataatcccaccaccctttgctgactctctttttggactcagcccacctgcacccaggtgaaataaacagccttgttgctcacacaaagcctgtttggtggtctctttacacggacacacgtgagacaaataatagagtatatcttaagatcttttctttcaaaggggttatagccccagaactctgaatgaaaggcgcttaagcaactttgtctttctgatctaaagtggaaaatacaagggagaaaagacaattcccagaagtttggaggtaagacagcatacctgggtccccagtgttattgcaaaggttcttttgcccttgacagatttggttgtctatataagaggtgatagtattccaggcattaattcctccaggacagttgacatgttgtggcagtatcctatagagaaatgtggtcataacatgcaaagttgctaaactcacagcatcatccctctttgattctcttcccatacccttactcacagagtctggagctgagtaaagccacggaaggtgttggccaagtcacctttgagggggtttgcttgcaggtctctgcaaagtacacaatgttagcactttcgcatcaacctacattatattagccttttgggtgggaggtacctaactacttacatg

SEQ ID NO: 2687 - DNA, 4001 bp, Homo sapiens
taatatgaatttttatttcaaacttccagttatgtcctcaaatatttcctttggctaatgaccttcaatgttcatcgcctagtgtttttcaaaagtatttttggaaaacaaagattataaaccatactgttagtaaactcataaaaatttaatcaaattatacaagaaaattatgggtttgggactagcaattaaacaaaaattaaggaagtttggagagtttctcattataaaatatgatcataatataatacctcctaagaaaataatctgaattaaaaataatgttgttttaatttttgttactaacccacgtcattgggttagtaaatgtgttgtttccactttctcccccatttatataatggctaaagtcacattctaaaaacacttttcccatttctacacatgtgtcagggaactcagtacaactgaagattgaaaagagagagaaatcagccatgatactcttaaagaatcacaaatctaagaattaatttaaattttcattatattgaggaatttgtggaaaaattgagttgtaaattactgaggagttactcaggatgtttgtagtctattattaatgtgccagatataagtgattaagtacaggatgcttccaatgcaggacatcttggaaagtataattgcatttaggtaagaaaatatataacttaaaaatcatatctatcaacatcatttaaaatttgacatcaaactttctccagcaacaaatttgtgatatatctacacaaacaatttattaagcagacattagtttcttaaattgttcaggacagtctgtactatcggaatgagcattaacagatgttttatccaacatttcagtaagttccatcctggaaattcttttttaataaatactttaatttctttgtttaatcgtctaatatacttctttgggaaagctgtcacgtttctttatccacagatatcgtggtatcacacccccctccaaaagcttgcagaggggaaccagtcaagttgaagtattctcttaaagatttcaaaattaagaattgttttaaaaatctacatttcctaaactctaggtttttttttttctttgtagccgacaccatgatccaaataaagagcaaacagttcagggttagcagaagagagatttaaacacatctggcaacaatgaacacaaaaattagttcagtagttacagatatatgtgtaaataaaggtgaaaggcaaataaaagcaaatgtaataaatacaaagtgattacttttcaaaactctgcattatgatcaaccacagagtaagtgagactccgagacccattaagtagttattctttcacctctttcttacagctgataacatggaaagtttaaagacccttccggggggagaaatgttttccagttgtcaagattcaagcttagctaatattagagctaattttaaaagacattgttctgtgattaaggtatttgttcagaaatatgtcttttaatccatttagatttttaatacttgctaaatttattttctagaataccatggtaaacaatattatctagtagtattagattttgtattcatgttggggtagtaggctgtattttctctagcatgtgaaataagtgagactatgtttcaacattatttcagtgctatctactaaattctataatagaaacattgccaaactatatgagaatactacttagaataaatatatttattttgaatgtgcacttacccagtccagctcttaaggaaattctttgtgaaatattctcaggatggaactttactttctgagattccgcagaagagatttacccacaagcaaggtgggaaagagtgaaagctttgcaatgtgatcctgcaattaggatgagattcagttagcagagcttgatggtcctaaagcaggaggtgacactctctgctggagagagagaggttgttctgagtagattgtaagtgttgtcagattgtaagtgatcagcagcagaagggaaacatcagagcttcctgttacatcactctgaccccgcctgcagttagtgttaggttactttctttctcaaatagcataccccaggaaagcagcactcctttcttattgtgagacaagagcaagaagcagcctgaacagagagagatcataggctgtgtgaatacattgttaccagtaaaaagctggctggctttcaccttgactgagttctgttagaacttgccaaacaagctacttgtgatttgaaggaaatctgaatatagtattctgctcaaagaatcaaaggagttaggcgtgtgtgtgtgtgtgtgtgtgtgtgtgtgtgtgtgtgtgttgaattatagcttacaaagtatccaggaaaaaaaatctaacaaatctgtgttcatagcacaacacagaaaaaaaaattaactgtattcatcataactggttttgtgatttggctcttcttaatttggagctctgctaattgggtgctgttcctccatcagttcctaagtgcagttcctaatcagttaattagatcaagaaactttatcctgcagtttttaaatcttttattttttcctttaccttcttcataagaacatgagtgtatgtgttataaattcaggttgtgtatgtgtgtgtatagagtgtttcttttataatatataagtatatatatttgacaaaatagccttttgaataattcataattttaaaattattgcacacatttaaaaatatttggtataattatgttatttataatataaaataatttataccacaatatttgtaagtcaatataatcttaaagaaaatatagatgttgtaaacataatattataaaataatataaatacaaaggatactttatttcttagacaaaatttcatctcaaagcatagtttttcctgaatatgtttaatacatcattggatatgatcaggggaaaatgtaaatttaaaatgcttttatcatttttataatttggtaaatgttcgatatgaagcaataattataatccctataacctaaacagcactaaaagtcacttaatttatcagggcataaattttctcatctataaactagaagagatagattttatgtctaaggctttgaatcgacaaatttcataacattttgaaatagataagatacggtgaggatcattcaactcttagtaaattgttagtgcaattccaggataaaatgaggtgccatacaccttgtaggcagacaaaggaggtaaaggcaaaataaattcaggaatatcatgtttttaaagcagggtgctcatgttgacatttttattgtctgaattagtggaagaaaatgtttatacaatctttgattttaagaccagtgagatcaatattgattacaaaatacagacatataaaaaatagatatactttcatctctataattatggttaatagaaaagacttgtaagaaactgagttacactggtgaaccggttctgatactgtctggtgtgatcttgacaaagctttttaggcttcatgttcccatcttgaaattcagagaaaaacaaatactagatttaatatgaaagtaataatgggtcatgtcttctcatcttccatgctaagtgtaatatatgaatcctataaagagattaatatatagtttttgaatttaattaaatcatggaaaactaaaacttttcccaatatgtttataaaagcattgatattttcgtctttccaaagattcatttttctttctttccttccttccttccttccttctttctttcttgatggagtttttgctcttgttgcacaggctggagtgcaatgacgcaatctcagctcactgcaacctccacctcccgggttcaagcaattctcctgcctcaacctcccaagtagctgggattacaggcgcccgccaccacacccagctaacattttgtatttttttgtagagacagggtttcactatgttggccagactggtctgaaactcctgacct

SEQ ID NO: 2688 - DNA, 4001 bp, Homo sapiens
gcaccagtgatgcaaacagtaactacaaaagcttaacactgggcaagggaccacaaatgcgtagataccaactctaccaagaaaaaatctattcgaattactgattcaattatcaaaactgattaaagaaaactttacccttcgtttatttaaaaaaaaaagcttactccacaacttgtaatgtttattacatatgcctgtaactacatctttaagaaagcaaatgtaaccagcacattcaaattcagaataacatttgaagcatcaagatgaagcaaatccatcaaacgtcaatgaacgctagttttatttaaggtgaaatcgtctccccacacccatacaggctggaggtttcagttggcaaggatccctaactcctgtttaagatgtcaccttgcctcctggacacacccatcgctgtaaccacttggcaggaggaaccacaaagtaagtatcacagatcaccgccctcattaggtgtttttttttttttttttcaggaaagaacatgatctcccagtctgaggtgaccggaaaatgcttttaaaaattccctgctcctcccccgcatacactcttccatcacagtatttgacagacaaacatcatacaaacgaagtgtacgtcaagacgacctggcaacttctacacggaatttaggggtcgttttcaaagcagcagaaggggagcaatgtttttatgtggtcgtggttcttgaacattaggactgcacgctgttttcaagcatagaatagggacaggggctcttcaaaggcatccatccaattgttacaagaccgactttcagaaggcagtcactccggagcctgcttccctccggcggtgaacaagaaacgccttgtagaaccctagctggagccgaacactttccctaacaagatgtgtattgcgaggacgcgcccctgacttcaagggtaagactaatttctttcaacgacagacactttaaaaagcaattttttttaaagcatccggcctgggtggtggaagacgccccagggcccagatggagaaggaagattagggttgccagagggggatgggaaaccgtcgaggcccccctcccccgcccatccccgccaatggccccgcagcgccaaggagatctccgcagtcctgcaggtgccagcagagcagctggagctcgagcggggccgagcggggcggcggctccgggtcccgcgaggcgctcgcccgccccgcccccaccggccgctccctgcgccgcgcgggctcggcccacacagcgcgccgcccgcccgcccgcgcgccccctggatcccggcacgcggaggacgcgggctaactgcgacgccgacgctcgccccagggccccgcgcgctcctcccgccccctgggcgcatggcggccgcaagcggacaaaggcgcttcctggcgcccgcactaaccgtcggtcgggtggattgaattcgccccctgcttgacctttccagacgcccgacagaaggctctctacgctccctctctcccttccttcactttctctccttcccgtgcactgggctgtccctcatcccggacccatcctcctccagccaagcccccgaggagcttcaccacctcgggaactgtgcgtccggccctcaactcactagaggaagcccccctgaagagaatgggggtgggggagcacctgcgacacaaccgtcgccggcatccctggcctctttcgcgccatccctctggcagaaaccactccttgaaggtgtaagggaggcgagtttcctttgtttagtcagttcgctccagtctcttccccccacaggcccagcgccggcagctcagcgatgcactcaccatgctgcaagcgctaccggtttccgagacgcgaccacacaaccactcagctcgctctctccactcggactaattcgcctcctccgcccccagcgcctcataaacacctccctccgccagatccctccgccgcatccagataacggaacatcgcaaacgagtcccggccaaccccctcccctcaaactcttctcgggacccctttcttcacagttatttggtcgatgaggcaagagatcaaggaaagtgggcgaacggatgacgtaagtgggtttcatttccagcgagccgttaaaaggccggtggagcggcccctgaggggcgctactttgcggcgcggaggagcatcgtggcggcgatgcgtcccccgttggtcgttgagcctgcctctgattggctggtttgtacctgcaatgcgtcactgggactcgcagccgccgccgggacgcggtgcggcttctgccgttgctgctcgggccgcgctgtcctggcaactgcgccaggcggcagagtcgcctgctttgcgcttggctggagaaccttcctcttccacgtatccttccctgccacactcacccactttcccgccccttattgaggggtagacgaaaacaccttaagccgataaagaatgaagctgaaagattccgataaacgcgtaccctgaactcagctttttaacctagtgttttggcctcatggaagccgcacgttcttcatttcacgccctcacaaaacccatgtaaatctggacacgggcaaatgtagctgttcagctgacaggctaatctcaaagggtatttcgtttatacttcctcttcgcgttctttgccaagggtaatttaccagaaaagaaaagtaactcaaaagtcacagtatccgagcttcagtgggattagtatctcgaaatggccccttgttatcgtggggttaaagggttctggattggacagagctgggcatgagttagttgggtccctctctcaggtgcaagaccttgggtgagtcatttaatttttagcctcacttgtaaaatacaggcaataagacctatctcgaaagaatattgaggaaattagaattatgcaaagattagaattaacaaagtgttaaagtacctggcacagggtaggactccaacaattggtcactataatatgccttccccttcataggaaatttgcccttttggatttctaactccacagatttaaatgaatattttaaaaaccacataaaaactaactgcttggtcccatccaaaataaacaaaggcgtacatacctgaaatatttaacaggtggatagtgaacacctactgtgtaaactcggtttgattataattgtaactatagaagggcttacgagatgcagaggtgaggaccttagtcctctataagaggttccaaaaagggttcctagagaaggtaactcctaaattgtctaatgttataaaatgggctaggaaaaagcagggaggaaagaagggagcaagttctgggtgaagtaagtaacagcaaaggcccggaggtgtgtaattgcgtggtatgatggaggagttgcaaggggataggcattactaaagcccaaagtagacagccagcctcgttaggcagagaggacgctgggaaattaaagaggaataaggtttaaatctcaaaaggcagttccttaagaagattgttggtagaatccagctcagaaaaaaaaaaaaaaagaaatcatcacaggccatatcaaggtctgagaattttccagtaaaaagcacaagcatgtagacccttaaaacccagtgaacagcattttttgcaagccaaggtgaaatcttgcctactgaagacagctccctagagaacattgccctgcccagcaagaccatttctgatgctaacagctacctgcatccacttggaaggcttcagtggaatttaacctcctttagccaagttagacattttctcacaccatcaaaaatcttttctttgccaggccagaggtgggtcctctttctttcagtcatgcaaaccaggcattaaatgctcttccaattagcattggcaaccctgtgaccttcttttcagatgaatgaccagtcagtgcaaactcaggaccctgtgcttctattgtcctcgctaatgtggtgacgtaatgatggtgggggg

SEQ ID NO: 2689 - DNA, 4001 bp, Homo sapiens
agcctggccaacatggcgaaactccgtctctactaaaaacacaaaaattagctgggcgtaatggcgagcacctgtaatcccagctattcggaaggctgagtacgggagaattgcttgaaccagggaggcggaggctgcagtgagccgagattgcgccattgcactcacgtctgggcaacacagtaaggctctgtatcgaaaaaaaaaaaaaaaaaagaagggggttgccgggcacggtggctcatgcctgtaatcccagtactttgggaagccgaggtgggtggatcacctgaggtggggagttcgagaccagcttgacaaacatggagaaaccccgtctctacttaaaaaaaaaaaaaattagccaggcgtggtggtgcatgcctgtaatcccagctactggggagactgaggaaggagaatcatttgaaccctagaggcggaggttgtggtgagcggagatggcagccattgcagtccagcctgggcaacaagagggaaactccatttcaaaaaaaaaggaggggggaaggggggttgagtccactctccccagctcacgccagatctcatttcagtggtcactattaaaaaaaattagatatttactttattatagatacttcctatgatgatctgtgaggacatgcattttcttatcctgtaataccatttgtaacaatagcaaaaccagatcattactggtctggaaagactgtcaatgtatcagcaaataaatcttaattaactctgatgatctacttaactcataactctaaaagcactaaaagaccactgtatgaaaaggtgactcaaggcaactgcaaacaaagtgatccccaaaatactaaaagcacaatctcaagtaaagtggcaatagctgggaaactcttttccaaacacaactgtcagaaatggaaaaatgtcctcctgagtaaagttttcggcagaaaacttcaggcagaggcataacactgctatgcaaaaacaataaccagacttcacttcaagaagtgagcgaagaatgtgagtgatcataaatcagaacttccgtcaagcttgcacgagtggagttgtaagtaacagcagaaactttgaagtaccagaagataccatcattcaaaaacgaacacactttgactagcccaccttggacacggagaatctcgctgatcactacaaactacaagataatcatttaactttgagacctcagtgagagagggtatcagcttttcctactccttgcacgctccgctgtacggaagatgccgagggaacgcatgccgtgtctcagtcccggcatagtcaaccacgctgggcaaaagacggggccagagggtgcagacgaatatcggtaactcgaaccaggctgggagttaagctagaagaaactggggaaggaggcaaaacagaagcaggaaaagagcagtggggagcggcgggcgcaccagagactggcgagaaggggaaaagtcccccagacgcacaaaaatgtctagaaggggttcttctacttcgatctgagtttcccaggagctcagccttggctgtcccgctccccacccaaccccacatgattcctcctcttggatgggacgcttaggtgaagcgagggggagcttcgcaggtggctcccggcaaactgagaagggtctcccagagctgccaagaggaaagaactgcgaacagtcgctcccccggtacgtgagagaggagtgaccagaggcaaaggtgaggcgagcaggttctcccttacctgccgcaggagcttccaccgggcggctcccaggggcgccgagactacgggcccccgagtggtgcagccaactgccggactcccgcccgctgctcgcgcggtctcgccggtcccagcgtccgcgactcgcgactccatctcactggagccttccacacccggaggtgccaccgccgcagctcgtcccctgccaggacctgccaacttcttccctgtcaggacctgtgacgcccggcaccctccctccaccggaccaggcatgcgcgctctccccgaattccgcatttccggtactcgcatctccttggcaaccagggccgagctgtcacgccattgcaccattcttgctggtagccatcttgagtgagggcggaccagaggatgagagagctgtggcagggctactggaacgctgtccctcattgttttagccttctgtgcttcatctcgagctcagaagactagcgaagaacgaaaagtcttatatatttcgagactaaagaacccaggaacccaagaagactccttgaccacaacaaagatggcgaaatctgcctgttgctcgtgctagattgaggttacgtagattggcgtgctgcaaaccagctctaggcggctctgggtaagttgtcgttctgtgggctgcggaacgcagacttcggctggacttgcctgcggtgacacctgctcccctctgagagcttcaggttctccggcctgccttcactggtttgtgtccagagccggactgattctctcaatttgcgtatgtatggggggtgtgctggtctctttccttctcccctttctccccccgcccagccacccacccctcagtccccaggtcctcgctttttgactaatgtcccggcactgcgtgcgtgtcacctggtccctctccctgttgcattcagatcgcctcatccctggggtggagagttgcacggggtaaacgaataggttctcctgagaacacccatttatctaccccacccccatcctagccttgcatactgtcttcttggggatgaaagatggatggataaaggctgtgggaacgtggtgatgtaggacctttgcaggtccttgttattcgggtcttttttcccctttttttactagtgtcggctagtaaactagtgttgctcccctacccccaatcgcccattattttgctgcgacatggaaagggattaaggggggcgggggcgtcgtagcgcatctgatctatggtaaatttgacgcagcattctacctttgataccagggggcattttgtggaagacttccataatgacattcagcggtgtgcaacatacctagattattcctgtcgtaaataatagcaactgccatttattgagtggtcactatgtgccaggcactgtatggtcttaatgttaagctgtctcattttgtctttacaacaacaaccctagaaggtaaatggtgtcatttcatttttgcagatgaagaaactgaggcccggagacacagttaagtgtaggagctaagacctcaacccaggtctctctgactcttaactacttattagcaatcaaggttaataaaagctacctcctgacaaaccagagatggccttacattttatttgtgcatcttgcaggggttttttgttgtttttaattaaagcgctaaatacctttttaacattaaaaatccgaagttgagtatgtccagtatttggaaccgaaccaaattggattttttgctatacagcttactgtacaagtgacctggaacagttgcttagaacctcccacagccacagtttggcaacctgtaaaatgtgcatggtaatatctactttattaagtccatataaaatttaaattagacaaacaagataaaagcacctggcagttagttaacactcaacaataattaatcttccctcccccacctttattaaataattaggcttttccagtttatcttccacatatataccaaagatacgttcataattatgtaagaccaaagggctttttaccttttacagccctgagttcctgagataccccattaagtctgtgtacttatttgcaaatttatattttgtttcttgttttgttttttgttttagtttaacccctatgtgtgccagagtcagtgctgcatagtttgagcctgataggattaactttacaaatgagacatttaagtcacatctgccaagaattatgatttgaatgaaactttaacttacacaggtttttag

SEQ ID NO: 2690 - DNA, 4001 bp, Homo sapiens
gcaatactggatgaatgtttctcattgaaacgaaattgataaaatttcactagagcaagacgggaagttaaatcttctccccaaagaacatggcctgtagctagcatccaagtgtctccatggccaaactgccaggcttaaaaatagggtaatatgggccgggcgcggtggctcacgcctgtaatcccagcactttgggaggccaaggcgggtggatcatgaggtcaggagttcgagaccagcctggccagcatggttaaaccgccatctctactaaagacacaaaaaattagccgggggtggtggcgcatgcctgtaatctcagctattcaggaggctgaggcaggagaatcgcttgaacccgggaggcagaggttgcagtgagccgagattgcgccattgcactccagcctgggtgactgggcaagactcagtctcaaaaaataataataataacaataataatagggtagtttggtggagggtgggaggagggagagattcaggaaaataactaatgggtactaggcttaataccggggagacaaaataatctgtacaacaaagccccatgacacgagtttacctatataacaaacatgcacatgtacccctgaacttaaaagtttaaaaaagaaaaaaaaggatagtctgggtgagaatcccagtagggcctagtccccacaaaaccacaggctgggcggttaacctggtagagtgataagagctagacaatttggctccttactagctgtgcaagtgacttaacctcctggagcctccctgtgccccaatctgtaacacgtgcatacagttaaatgtgaagatgaaatgagatcctatgattaatgagcaaataatacatgctcgataaacccagacttctttctcttccctttagtttgcaatgtgccatcagcacctgaggtagaaatgtgcctggccactcccctagctcccggtttctccacaggaggaaagaaagttaaaccacagagcactctcctatttccatccccagccccagcgctggaaagcttcatagattttggtcacaacagcgcataccttgggtggctcttaagttctggactctgtgacccacggagggaacaaggatcaatgggaatcactgttcctcacactcagctgtctaggctaaagcctctcctatcaccacaggaaaaaaggggagaggtttacacattaacagcgaaacaactggctgggcgcagtggctcacgcctgtaatcccaacactctgggaggccgtggcgggcggatcacctgaggtcagaagttcgagaccagcctgaccaacgtggcgaaaccccatctctactaataatacaaaaattagctgggcgtggtggcgggcgcctataatctcagctactcgggaggctaaggcaggagaatcgcttgaacccgggaggcggaggttgcggtgagccgagatctcgccactgcactccagcctgggcaataaaaacaaaactccgtctcaaaaaacaaacaacaacaacagcgaaacaaaagggccggtcgctcagcctaggactctcgggagcggctaggaactcaatgcacatgctaatgagttatctggtaacgacgctctagaactagtttttttaccagacgcacagtgttcctacccttgtggtctcccctgagcactactgcttagtttgtcccaaatgaagtaaaataaagtatttctttagcacggacccaccctctcccgccttttcttacaggaagccaggagacggcgcgcccctaagagaggaccccggctgtgggagaagaggagggagcggggcgcccccgaaccggctaagcccgttcgacccctacatggggagcccaggtccccggcgaccggaccccgaagcgcactacttgcctgccaacgccttgctccgaggccctgggcgctgtctcagccgccccccgccccctggaggtgcgcggccaggagccgcccccggtgagtcagagggaggggcccggccggtctgagctggcggggagcccctatgggaggctggggcgcccgaaagggtcctagaattgggcgtgggaaggagggtataggggaagctaaggacaagcttactgtgctgtaaactttgcgagagaattgcagtgttcacttccattcaatcgttaggcccccggcctcaatcaccctgtgaacagctactgttctgtgagagcctactatgtgcttggtgcgtcctcacatctactatcattattcctgctggaaacatgaagtctttgggaggctcagagagggtaactaacttgtccagagtgtcacattgctagttcagtagcagaactaagatttttttttttttttttgagacagggtctcactctgtcgcggcacctggagtgcggtgctgtgatcacagctcactacagcctcaacctcccaggctcaagcaatcctccagcctcagcctcctgagtagctgggactgcaggcatatgccaccacgcccagctaaacttttttttttttttggagagactgtgtctcactctattgcccaggttggtctcaaactcctgggctcaagtgatcctcctgctttggcctcccaaagtgctggcattataggcatgagccaccgcacccaactgctgaaccaggattctaacccaggctgatctgacctgcaacacctgacccttctcttctttattcagaggaaaacaggccagcaagcatctgcaccaggaggccaggccttctggaaatgtgttggacagcgatgggtccacacttccgccttggctcctgaatgtggcatagccaacccatgagagatgtcagttgacaaagagcatgaggatcaggccatggccttgtgacacagtggtaagatccttttgtgggaggcagcttcgaaaatcccaaccagaatgagtttctctgaagtccatgggtggggcctggggtaaggaaacaatctttctatctgggtgacctcagacaagcacactccagcaaggagtcctcggaaaccacctcccgctgcctactatctgccttcctttgaccaactctgctcactctgcagactcagcttaaatatccctcctctgaaactccctctgcagtgctccccaggtattctggacatcaagccactgggccacctgcatctacacgcccatgggaacacttctcaggcacacccgatagcaaaagtggatttggatccatgggcaacctggcctgcttccagacaactaggcctctccaaggttgtgcccaggcatagtccttccagagcattcagtttttgttttgttttgcttaggtcaaatttatagtgaaatgcacaaatcatgtgtacatttaaatcagttttgacagatgcaacacccatgtaacccacatccctaccaagatataaaacacttctatcacaccagaaagttccctccccaccatgtgcttcctccaccataatgttagcacctctagccagggaccgtgtcaagtcatccttgcaatcccagcaccctgcatagcgcccagcaggtaataggcactcaaaaaaatttttactgaatgcattaacagattagacagcaaaacccccacattctaatactgcccagattctgttgcctcgggataatcccttaagacttcctagccacagattcctcatctgtgaaacgagaacagaagccccagtcctcctaccttggaaggttgtgaggattcaatgaaaggctgctttttttcttttttctttttttttaagagacagggtctcactctgtcacctaggctctggagtgcagtggcatgatcatagctccctgcagccttgaactcctgagctcaagtgatcctccttcctcggcctcccaaagtgctgggattacaggagtgagccactgtgcccagccgggaggatccgcaaaaagaatgaaggcctggacaatgcaagataccatcaccattatta

SEQ ID NO: 2691 - DNA, 4001 bp, Homo sapiens
gcagtgaacaagggagccaccatacccagtgaaaccgcagacgaacttcctctaagtggggaatgtcacagaatcacagatgtcagcattagaaagtgctaaagttgaagaggggagctggggccgggggggaggaataaaacaaaaaaaagaaagcgctaaagttcttatctagtcctgctctgcctgcaccgccctacacatacccatacacgcatagtgcagaaatctcttctatagcatcccttaccatcctcttcttgaaggcttccagtgatgggaaactcaccaccttaccaaacagcctcttctacacctcttaaagcctttacttttccccactctgccatagtgtggtgagttatggacccgcctacctccactactacactgtagggtcctttagggcaggaagtgtattttgcctctggatctagctggaacctcatgcaggtgctcaaagaatgcatttgattaactggacctgctgggctctgattattagactggggtggcacctaagggatagcccaggatttcaaaaggctgggacaggctggagcagccccaggaggcagagagcaggggctaggggtcccagactgccatggggctgggggaggggaggacgcaagtcctgctggctgtcccatggtcctgacttaggctgtctttgaggacacactgggggacctcggagaggaggtcaccgttacacacacctttaaggaaagacttgacagccatcagagggacaaaaatcctgccggggtccagtggtacctttgccttcctcagaccctgattccactgacccccaataggtctcttcccttcacagtccctgcttgcccctaggtgtgaaatgaaacagcacctccacttctcctggtggaggtaggtgcccaccctcgaaaccaaactgaatctcccagcctgggacatggcattctcagaatctaggtccagaggcctcatttggggattccaaatggtttttcccctgataccaaataggtctcctacccttccccagggtcaaccacttcctccctccccacctcctacctcagacagtccacctagaccctcagccaaggtcttccagagtttgcaaaataatcaaatgtgccacttgcatttgaattcaaatggctaggactgccctgccccctccccaagccactcccacccaaatagcatcacaccacagtcctgtcttggggacaggcagcttctaatctgatttcacctccagtctggctgagggccttcaggagcagtgtggtggcctccgtcaggaggtctggcacagctgggacaagccctgacccaagagttcctccatgtgcagcatgggcacagcccacccatcctcccgggcagcttcacagctgccatcagatcaggtgcctggagcctggcataaggctggcaggacagcaggctgggggaactccaccctggcacaatgtggtatccagaaatgtgggtctctgttcccaggccaccacagccagccctcgcctgcccacccaggagggtaccagccagccgcgctggcagccaccctgccaccttcacctttcaacactcctactttcctttcttcctcctacctctgcttcgtaggttcgtcttccttccagcctgccccacccggcttctcacttccctcttacttctctggctgccccaaccaccagccccacccaccagccccacccctgggctccttccccagccggtgtggaggcgatgtcccccgacagggaggggcaggcagtgctgggaggccagcaggcctgaagcagaagagcagtcactggggtgggcagtgggtatgccaggccgtctcctcagaggggcacacagggaggctggaggtccacacagccccaccacagtggcctcagcccgctgcaggtcacagccaaggcaaatcagggagggcatctctgagtctgagaccagcaaggaaagccatgttctccattcagggcctggggcaggcgcggcacagcccccaccgctgctgggttagtcacattttctgggcagggtcactggcttcacattactttttcctcctccctcagtttgtctttctccttgccctgaatgcaagtatttgattttttttaagatcagttttttggttttttttgtttttttttttttcctgagacagggttcactgtcacgcaagctggagtgccgtggcattatcaccgctaaccgcagccttgaactcctgggctcaagcgatcctcctgcctcagcctcctgagcagctgacaccacaggcctgcaccaacatgcccgactaatttttttattttttctggagacagagtcttgctactcaggctggtctagaactcctgaactgaagcaatcctcccactttggcctcccaaagtgctgggattacaggcgtgggctactgcacctggctaagctcagttctcagggaatggctgaggccataaaacattcttcaccatcttccgcatgccatgctgatgcctctcaggtctctaccctttggtctgcttctcattcaccagatgtttatcatcatgacttctgggccctgggccctctgagagacagcccatcctgggttgacccagggcaactatcctgcctacatcacagtcactagaccctagagcttgtctcctccaactcgctggctttctggaggacaccgaggtcctgagagcacaagagactgcccacaaacacacagggagtggaagcccctgcaagggaggctcccattcccttctgaatccctgggggaaggatgagcggactcagtatgaggctccaggagaaagtgagcacccagttatgcagccacacaagcgtagttcctctgcccagaacctagccggcctgtcctggaaaggtattggtcagcaggctggcttgagacaaggctccaggttcagggtcaaggcctggggaccctggagcaaaatctggaacaaatcttcctaattagcagaccttcaaacaaaacctcattatttgactgcgtgggaaaagtctggagaaaatacagtactggataggctgggcatggtggctgtctccggtaatcccagcactttgggagactgaggcaggcagattacctgaggtcaggagttcaagaccagcctggccaacatggtgaaaccctgtctctactaaaaatacaaaaattagccgggcatggtcatgggtgcctgtaatcctagctactggagcgactgaggcagaagaatcacttgaacccaggaggcggaggctgcagagagccgagatggcgccactgcactccagcctgggagacaaagcaagactccatctcaaaaaaaaaaaaagcaatactggatgaatgtttctcattgaaacgaaattgataaaatttcactagagcaagacgggaagttaaatcttctccccaaagaacatggcctgtagctagcatccaagtgtctccatggccaaactgccaggcttaaaaatagggtaatatgggccgggcgcggtggctcacgcctgtaatcccagcactttgggaggccaaggcgggtggatcatgaggtcaggagttcgagaccagcctggccagcatggttaaaccgccatctctactaaagacacaaaaaattagccgggggtggtggcgcatgcctgtaatctcagctattcaggaggctgaggcaggagaatcgcttgaacccgggaggcagaggttgcagtgagccgagattgcgccattgcactccagcctgggtgactgggcaagactcagtctcaaaaaataataataataacaataataatagggtagtttggtggagggtgggaggagggagagattcaggaaaataactaatgggtactaggcttaataccggggagacaaaataatctgtacaacaaagccccatgacacgagtttacctatataacaaacatgcacatgtacccctgaacttaaa

SEQ ID NO: 2692 - DNA, 4001 bp, Homo sapiens
agagctgccatgcccactacctgcttcccattcactctccacacaggctcctctagcttctgagccaatcatggcccctaaactgcctcgatcaatgtcgctgtcacctctatgttatcaaacccactgggcttctcttggtcccaactctcttccccaactactcagcagcattcacaacagcagaacagccatctgctgcccctgaggtggtccccactcagcttctgtgaggccgcatgctccccgggtgtcctctccctcactgcctgctgcttctcaagtctatctgtcagggcacctgcctgaccccaagaaatgttagggttcctcaaggctcagccccaaggcccccttcttctttactgatactcccccgagacactctcccaggctgtggactgtaaaccatctaatatgctccgcctcccagaagaatgcctctagcctatccctgctccgtatccacctgcctccaggacagatccacctgcctccaggacagctccacctgaagacgtgagagcaaagcccaactctaggtcacccccaggctctgtcccaggaccaccatccacccacctgttcaggccagaaacccagaaggcatgttgatccctccactatcctcaccctctatttcaatcagtcactatggcctctcgatcccccctgcaaggtacgtctcaaaccaatctactccaaacccacatcctaacagtcgtcaagctaatctgagccccttcatctttctccaggaccactacaatggacccttgcattcttgccccgacaacccacttcccacccagcagcaagagtgagcttgtaaaaacacacatccaagagaaccactcctctaccaaaaccctctagtggcctccagctgcacctaaaatcaatcttttaacaaaataaaacccaaattccaatgacaaggctctacatggtctgacccttgcctcctcccaggcccttcagtgttgtccaaggaaaccaggtggcctgtcaaagccatctcagtcacgagagcccagaagttccagctctgttcgaagactggcggccatcagttgtctccgctaagaccgcatccacttagggcaaggttgctccctgggcagtcttattcagcagataaaccatttctaaaaatatgaacacagcactcggccagggcatcccttggaggtgccatttctaggtgttacaactggaaaggcaggtgcacaaaatccaaaactgaaattctatcacgctttgctttgtgggctcggcctagccacttcagaggggcacgagcggccctctctgcgggaggagcagacacaaacgctcttcagggcgaaagcaaacaggtggggcggggtttggggctctgttaaaacgcctctcgcagcgctctgagcctcctggattggagctctcgcaggcggaggccacgacctagtttagcgtccttagggtagcgccgagtcctgctcgttctgggcgggggtatgaaggaggtacgaaaagagggggccgggcgcccacttctgaggagaacaacggcggaccctgcgttcggagctaccctggccgcccaccccgccccgctccctgcgaggagcggagatctcagaaaccagaaacggcgcccaccgcaccccacacggccccacctggggccgcctccacgtgatgtcctcgcggaactgggccagcggcgtagacaagtcgcagaagagcgaggagtccgcggcggggaaggcggcgtcccggaacagctccctcgccggcgtcgcgccccggcccgcccgcatcctcggctccgcgggctcccatctgcagccggttgcctcggggtcgcagccccggagagaaggcgagtcagccgccgccgcctccggcccgccccgcccgttccccgcccggcccagccctccaagcccgagggccccgcaggtgctggaccaggccagtacgccggcccgctagtctcccattggtaaccaggcggcagccaaccgggcgtggggtctcgggtcacgtgacaggcggcccaatcgcactcgcgcgacggaaagcgccacggacgtcggaggcccagggggcggggctcccgagctccgctctttcgtggtcgggcggcggaccgcactgtattttttccttccgggggcggcggagcccagggctatcccggcctccgctcatacccggagggccggcaggcgttcagtcctccagccggtgaggctcgggccggggtgtcgggaccgcctgaacacgcgggctctgggagcttcagggaccagggagccacctcggccgagttgcgtcgcagactacagctcccagcatgcgccgccgctcccagcatgcaccttcctcccgaaacgcgtctctgcttccggcgctctgctgcggaggccgtggccgcgggtagttgggaggaaccgagatttacgcttggtaaggcaagttgcgagctgtccggcgccggtcgagttcctgccgccgtcgtcgtcaggcaggggagaagggggcctcaacccctctagtgacagctgtttgctacctaatagggcttttcatcccaccgggccccagggccttcgttaggagcccagcaggctcaacttcttgctgtggttctggaaaagggagtgaccacctggctcaacacctctctctgtgatgtgtttgggagttttgggaaatgagacggctccgagggaagagcttgagggagcggcgtcgcactcgttcgaccttcccgggcctgggctttgtttctaggcattttaggttgaacgctctacatcttaactgggggcaggggaggtggccagagcatcccgctgagcgttttccgattccccagatggccaggcacctggtcctggtggctggacagtgaccccgtggacgcacatttacagctatagccattcagtgccgcggggaggtgaggatagtgatcctgggacctgctcgaggattcacccttgccccaagaacctgttccattcccaggaatgaaggcggtcaggcaggggaggagaagggggcctcaactcttctagtgacagcagtttgccacctaatagagcttttcagattttgcctcctcaggccattttactcagcctcggactatcaaggatggtcacattgaagctgtttttctgcagtcaggagcgaaaagtcccggctgttgaaggagaaactgaatctggttcaggagtcccaggttcctccctctgagaggccaggtggggcctgcgtgagtagcagttgttcaggtggcaggacactgctgttttcatcccacctggccccaggcccctgattaggggcccagagtgcttatgtacttgcctcggtctgagaaagggagtgactgcatagcccaacacctgtgggatgcctcactgcccagatgtttcatctccgggatgcttcattgcccattcagcaccctctatggtgctgactcttccggaagatgtttctgattccttgctaggctggtggttgcaccatagctgagaggactcaagaagagcctggtctcagcttcacctaggagtcccggaggagtaagaaacacgtatctttcctgttctgggcacatatgggtgggtagcagagctgaggctagctgaggatcccgactctcctttgggagcctttgttgtgccgctctcccaggctgatcagatctggagagctaacagcttcctgtggccacatctgtgtccaaggctgggcccatgcctgtagccagattgccaggatctggaaggggccaagagacagctggtgctgggtaggcagcagccctgtgtcaacctgcccccactattaccccatgctgtgatttgcatgtggtctgcccctgcccaaaatggtattgaaatttgagcctcaatgaggcagtgttaggaggtggtgcctagtaggaggagtttgggtaataggggtggatccctcatggataggttagtgtcctt

SEQ ID NO: 2693 - DNA, 4001 bp, Homo sapiens
agctttgcctcaggctttgttttatagagaacccaggctaaaataatgtcaacaataatgactaaaatatcttcagcacttgccatgtgctcaagtactgctaagtgctttccatataggatctcatttgatcctttcactgatcttttggggtagattactgttgctaccatgtcttagtgatgaggaaactgggacccccaagaggttaaggagcatgccccaaatcacacagctcaccatatggaagcatcaagcacaatgcttgatacggagtgagcctcagggccagtaggttggtcttttttttttgagacagggtcttgctctgtcactcaggctggagtgcagtggcatgatcatagctcactgaagcctcaacctcctgggctcaagcaatcctttcacctcaaccatggacccctccccctgcctccaatagctgggactacaggtgtgcaccaccacatgtagctaatattttttcccagacccccaatttttaatttatttttgtagagacagggtttcaccatgttgcccaggctggtcttgaactcctgggatcaagcaatctgtccacctcggcctcccaaagtgttgagattacaggtgtgagccacagtgcttggcttaatgtgtgcatttcttcatagcatcttttcttctaaggtgttctttcaagagggtaactgaatacaaccaaataactaggggacaagacagggtacctaccaggcacagcagaactccagctctgtcatttgcatctggtataaacttttgcagcaagtcactcaccggtccctcactttttccatctacaaaatgggataatgaactcatgctatatatagcttttgcctattacacagttggtagattattacatttccatcaaccaatctactaataagtaagcctccctacagctgtcactcctccaaccttcaaaataacaacaacaacaacaacaacaacaaaaacccacaatacttatgtcaaggtgggtacaaaggtgagacaattcaagaggataatctgattgaaagtctagttaatgccactcgggggtaaccaaagttgtgtttgtgacccaggacaaatgggacagtcagtagttcatgacccaactgtaactatagagggaaaatatctgcacttattctaatctggttaacttgggtccaagctgagcagctggaactgtctccctgagaacagcatcacatctcaaagattacataactttagcagttacagagacacatgtgtgtgaccatgacaccactagaggcatataggaacctcctgaatctctgaagttgtaatgatctgtcttttgtgattaacccagagttgtcaacttcattcctataactaataagctagatgattagaaaacaaagggcccaggtcccattcttccctttagcaaatgtttattaagcacctactatctaacagaaactacacatcagtgcacaaagaagacatgatttctgccatcaatgtgtcccttacggtgaacacagccctcaaggtcacaacttagaatgatcagaaatcgaaggtgacagaatgattaagaaatactctctttgcatgaaatatgcaaagtttggattagattctcttagaaaattaactcccactttgccctagtttttcttaaagcatatccttggaccacctgcatcaaaaaaacccagcttccagagctactgaatatgtaccttgggaggtgggaactcagaagcgacatcatgaagctctctagaaaattgtacatgctcactaatgtttagaggactgccttggtccacagctctgggacatgaccacgcacaacttacctgtttcctaggcaggtgtgtctgatggaggaggggagacgggcaggttccacaggctctcaggttagagagtggtggaggagactggcagaggaggagagcatggccggccgtcttggagaaagagcagtgctggtgtctgcttactcctgacctcaggcttttccttatatgggtgtaccaggtaaaggcaggctccaccttcgttaaacagtgacttcagcattgggcagtggcctgccacctcttggagagagagaggacattgaatgtaaacagcaacagcttccagattctccgccccaagcctatctctgccttatcccacctcacttcctggggcccctaagctgcccgtttcttggctcttgcagttttcattgtttccagatatttaagtttctttatctttattctgcttcagggaatttgtgttttgttttggtttgttttacaaaacccctctgctgagaaaagactgagggaagcaaccttccttcaggcctcattctcatacaggaaagtacaattgccatgtctcctgcatcaagagtggccactccacgtcaatcatatcacatctctttctactagacgcagtatcttctttctacaaatacattgtagaacacattaactcctgggcatggcgagacccagggaaggtctctgcatcatccctgcttgctggatggggcagaaagagatgaggcgtgtaaagtgcatgtttcctgttctcaaatccaaggggctatttgcttttctggcatctttaattccttgatgttcttcatccccattcataagtgctctttagaagccagttccagaaccctgatcgcatggcacaccctatgctataggcaataatgataaaataggtaaaacagggaaacaatgtggaaatcaccaaaaactgttatgactggtccattcccaaattctgatgagtagaaagggatatttggcacatgaatgaagaatctgagaagctggaaagtatggatatgagttttaaccccagttttgcaacttttggctgtgtgacctgggcaagtcccttcccatcttagtctattaatccgtgagctgaggattatgatgcttaccctgtctgccttgtgtttgtttagtgggattcctgcatcccagcggacaccttctattagaaatttcactataaatacagtaaacaatacacacacacacactattgcataaacatcatcagtgaataaatacgcagatatctgtggtgcatgttcaaaatgattttactaatagagcatgcaatgaaaaatgttggaaagccatagtttcagaaaaaaatggtgagaaaatgcttcagaaagccctacccacaaggatatatcacaagacagtgtctcaagaaaattaattgggagttttcttgcttattgatgatggttttgtcatctcccatctctaaaaatatatttttccccctaagagtgggagctgttatccccagagcagtctttgggagtactgagttaaaaagggaaacagctcccgatggagtgttctaggtgccaagaaacaagccgctctgggtgataattgtgccggaagaatggcttaggtgagggaccctgtcaagaacacctgtgcacaaatcccaggggctgttttcttttctggcatctttgattctttggtgttcttcctcccatttataggtgctctttagaagccaattctcagtgatttgttttttccagagaattccagccgaaggctataaactgggcaacacctaacagtaagttcttagctggacttgctccaactctgaaggccgtgtggcatgccccttaaatgcttccaatgcctttctggcattccctgctgagcactgcatagctgccctgagatgcagtcctttgcggcatgcatgggacccaccacagccctcctctccctctgagtctcgatctccttcactgtatgtgatggcttctgtgtcacggagccccactggggcctcccctgccactacctgtgtctaccaaatacactgatcctgctatggctgtccaagcctggcctgtgagggctgttcttcgagtgccaactgtgggtgtaggaaatgccgtcattgccattgtgctgtggccatacctg

SEQ ID NO: 2694 - DNA, 4001 bp, Homo sapiens
cctctacctcaaatctccctcatccttcaaagctcagggcaaatgtccctcctctccagagccttccctggaaacctcttgtcttctccttgtggggctttcctgcccttcactcacactcatgaactggggagagaatgctggttaacagccccctcctctcccaagcccactcctgggctggaagacttggccggtcattttaggctctgattaacgctactccagaagatcaaagtatgcagttaaaaacccaggcaaacttttggaaaaagtaagtcaattagaaacatcttaaaaaagaaaaaaaaaaaaaaaagaaactatttgacagtaaatactatagctaaacacatacaaactatatgatacaattccattcctggttattacccaacagaaatgcttaaatctatgcaccaaaagacatgtacaagaatactcacaacagaaatatgcaaaatatccccaaatgaaaactacccaaatgtccatgaacatggataaatattaataatagtgataaccatttatacaatgaaatacttcacagctctgaacaaacaagaattacatgctgcaatatgatgagattcacaaacaatattaagtagaaaaaatccagacacaaaaactctttgattccatttacataactttcaaaagtgacaaaaccaatctatatgttagaaattagcttagtggttacccttgaggtcgagcgatctatcaccaaaccaattataccactgatagttacatcaattccattccttttctactgcttgttttgatggtcaggagagagatttacaagggagtttgaaaagtgggagaatcaattcatttaaacaaggctttattgcatgcttccccatgggccaggcattgccctagatggtaggggtacaggatggattagacagaatttctgccctcgaggaagtcacagtccaacgaccaggctcacactctagaaagggccctcactcttcagcatgaggtgcccactctgtgaaatggccagtacctaactcatccaagaattctccccctagaaagtcaaagacacccctcaccctatcaggcctggaagatgtacccaggctgaaacacttaggtaccacccaccaaaacattgtcaccctgtgcctccataggagagggttataagctgaactgagagccgactacctcgctctggagtcctccagagctttgaggagtgatttccagtgcccataggccagcagaccactcagacaagggcaatttcgagatttctaatctaggcaagggccgtgccaagcaccacactgacagctatcatttgaggcaatatttcactcttatagtgtggtcaccgtcccagtgtgtttttcacatctaatttcatacaggaagtcagcccagcctcactgcttatcagaacagagaacagtcggcctccttgactctgaggatcccataaggcctcagtgataagctggctgcccccagattccttctcatcaggaggctcaggagacaactgggatggcctatgttctgggaaatgacagcacctagcagcatcagtaactctaccaaatgacttcgagagaaaccagagctggagggacctcagaaattacccaggcccaaagatactcccatctttttttttaaatgaggagattggggccaaagggctgaagtctattcctcaaggtcacactaataagtgatggcaaaactgaggacaaaattgaaatctccagactccagggttttttctgtatacactcacctgcaaagctcaaaccaggagaagcaaataccatcctctcaccttctaaacccagaccctgtagagtctcatagggcctctgggctaacttggacccacccttggaactaaagaaatttacctgcacaggagattttgcttctttaagcgcctgggcaagctctaatcccggtgcagtcagaagcatgcagcctgaaaccacctcttatatatgggtcctttctacacatggtgtttagccaagaatttgcgaccccacctcccaggaccttggttcctccccactgtgtgttctctggaagggagtggagtacccagggctttgcgactggattacacaaatccaattatttctttagaacaccatacagagaaagcctgtttcagtaatgccttaatgagagagagttagtcatcttctcacttccaaccctggggagggtactttcaggtgtgacctagaaaagcatttcactgcaggagcacatgatactgcttgctcacctccccacaactcccaggacaccaaagaaccaagacagagattcctgtacatccctatgtttaaactaacattgacagaagcctggaaagtattttcaagaggtggctgtgggttttcttttatggttgtcagagtctgaggcagccctcagggatgtttcctgctaaggaggaaatctgtgattcatttgtgctattgagatcgctccctcttccttcccaacctactttccaaatcccccattttggccatctgggactcagaacattgacctcccactggttgtctcctcacagttcaccttgggtcccgttgctccaaatctggttgttcttcccttaaagcatttcttagccctcctgtggttgctctagacttcttcactccctccccacccccacccccaaatccttctcctaggttcccaccaccacttgcacagatttccatcatagcagcttagttggttccagcttgcctgcctccacgcttgcacacctaggatccccagaacccagaaccatgcctagtacccaggaggtgctcaatatgtgtcagtggaatcagagtcccttgcctgtggaaatcctctgtcctcttcctccccgcctgcttcttggcctctgccttgactctaatctctccaactcaatcattttgtgtgattatcactccacccattttattagtactgataaattaactaatattgataataatagccaacacgttttgagcacttatgacatgccaagcacaatgctaagcacattgcatgcagaatctcatggaatcttcacaactttgtgaggtagtgctattattatccacattctacaaaaagaaaacggaggcacagcatggcaactcgcccaagataaccgcagccagtaaacagcagagatggggctaaagtcccagggtgtcaggttccactaacttctcctcatctttgtcaaggaattgtctccctgccactgtcaaatcaaatccaaagctttcttcctgagctaaacgctctttggagccttccccctgcctcatgtgccaaatagccacccttcctcgcatgggtctgaaggtgttatgaggatagcagaagcagtggatctgggaagaccattattattattatctatctcccagacataaccttttcattttcatctcctcatcctggcccttagttatcttcccccttctattcatcatcttttcagggactccaggtggggggcttccgctcatcccttgggacagcaccctgcacctggcacagggttaggctcactctatgtctaagttgttgttatggtcaccactgggcttaccataaattgtgctgcggattcacagagccaccgagacgcatagggtaaggcccaagggccatttcctcccgtgacaactcttgaaagttattgtcctgggtgacaggaaacagatggccggggagccttgcacagcagcactgtggccttttaacatctcagaggtcatacatcccttccccaggcttccgactgtcacccaggacagactagtatgcctgagaaaaaggcagtgaaggcaagtgcatctggtgatgagccttctgtctctgcaaggcacaggcaatcctgacccacagtgggctgtggaccagaagtgggttggcaagtttgtgatttatgaccagaaatttactttcccgtggaaacaagattt

SEQ ID NO: 2695 - DNA, 4001 bp, Homo sapiens
caatgtgtctccatgaggaccatatagtaaatacatcccataaaaaatgattaccaaccaaaagcttgcaattaatgttccaactaaagaaaaagactcaaagtaaaagcatcagctatcctaggtactgtttggaggcaacaccaaacacgacacataaatcattgttgaaaaaaaccgtaaaacataatgctgggtatttagttatgttgaatgctaaaactaatctttccttaactaaaggtctccgtcaaatgaaaagtgtattttagtcaagtcaggatttctgttttgcaaactgaaagtcttatattattaagcatatattcaggttattttcctgatcataattttcaaatcaaattaagatcaaactctactgtcaggtactgtatattctcattttgataaatttcaaattaatgataaaaatgtattaacctgctggtcaattatacattttataaatatattttaaccaatgacatattaccagtaagtacagattcaacggcaagatttcattaagaaagtgtttcaagcttcagatgcccaagacttatttaatgtgtaaatcctcaccactacaataaccacatggttaaacgatcaccacttccattagcaagctcaagcctaataagtgatctcctgggacttcagcacagaggttttctaattttattcctccactcaatgtggctattctcccttatctattcacgctggcaaagcttctagttaaactggaattagtaactatttgatgataataattaacatatactgagtgcttccgatgccgcagttaattcttatagttgataaaagtgtggcacaaaaaggttaatcaagtagcagaggcaggatttgaacccaggaattctggttccagggcccggattcggagctacaaaggtgagtaaactgaaaagagtcctacttttattgtcattgctctctaataaaaattattttttcttccaattgtttaaatctcttctcattctctatttaaatattaggcgttcatttaaacattaggcgtctaccttacagtaggacatctttaaacaacgtaaaaaaggaaagctttgtcttcacctgcacacataccggtctgcccataaattttgcaatccagttctgcctgattctaaactgcttgtctcttgaagcgaatgccttaaaaagtgacattgggatcaggatagttatctccatccatcctccctcagaaaaacaactatattagagtaattcttgggaccattgagaacaatacacaggcctttgggtaacttcaagacaaaaaaggcaaaaagtcggggagaaggtgtgggaggatgattttccccttctaaacgtaaggtataaaagggctcagaaagcggaaaaagaaccctaaaaagcaaggtgcgggacggcgtgagggaccacacattgggcgctccgcccaaggggtccggctccttctccgcggcgatggcgcgtccttgggctcagcaaccctcctgaagacacctaacctcctccttctccagcctgcccctctggggcctgcgagccccgtcccgggccgggggtcggaagccgtgccatgtgggaccccgaaaaggcccccaagcttggcgcggaaggcgccgccagtgaccggctgcggctgggggcggaggccggcagttgctcggagctccggcgggtcaggaggtgacgggaggaggaggaggcaggaggaagacggggggttgggaggtagcgtccggtaggtctgcgcagacagcgctgccagacctctgactcccccagtcctgccgccgccgatagccccacaaggcgacatgggaagtccgccggagcagaggggagaaaattcaaaacgagtctactcaacctcgtcttggctccgaggccccgccatggagaccagcataatgcgcaggcgcgccccaccgggagcgcgcagagcagtcccacgacagtaggaccactatcggccaccgtcgaccgtttcctctctcatccgttcttttctttgtatttccgcctctcgcctctctctaaaagccgcagttagaggcgagatttaggaaaaacctctgccgagtgagcctctggttgggaatatgtatgagaaaaaaaaactggcaaggcgttagtcaagcaaagctgaaggcagaggaaatttgatatctggctggagtctagaggatttaatgcaaataagatactctgagggcagcgtggcaaaaaaagactacaattcccggtggtcacagcgtttgagaagcgatgctttctgagacttgtagtaactaggagctgtgtttgaactatccaggctcaggacagcctcttgaaaaaaaattttttattaataaagcggatttgagtgggatctttttcctaatcgattacgggcccacacgtatgggaagaattctaacaatgattaaagggacatgctacctttacgactatccttttctaatcgatgactcctaaatctaggagtaggtagtcgatgtttgtggtctgggcgtctgtagaagggcaacctcgtgctttctgcagaggagaccggagggcagaaggcagagtccaggcttagactgcagttcctcgcttacctgtgcagtctaattttgagctgcctctttgtagtcttaaaaggcaggagcttcgtgttgtgggtctgctaacccgtacgtttccgtgggcaagtcgtgtgtactcctcgccatggctcagctccaaacacgcttctacactgataacaagaagtaagtaagcgttccagccttctctcccttccccaggttcctttccgaccacccctttggtatgaccttgtggatccctggttgtttctgctgtcacccccacccttttttctgagattacctgctttctaaccagcttcgtaggttctatataatttgaattgtgagtgtggaggaggctgaagggcttcaggtttgctttctgaatgaaacattttatatgtgtaatttaaaaatgaacagtgggccttgttatagggtgtctgctagtggtggttcacagtttttgaaaacggaaaaaaagtttttgaaaatgaaaaaacatatttaccatttatgtatatctatatagatatataaacattttaaccagtggtctcaaggtctgttagcactcattcgaaaactaattatatgctgccttgtggtatatattgcattgttagctttctttgtgtttgcctggtctcttccaactatattggaagtctcttgagggcagggactatatattaattaagcttcttggattggctgagtcaacaaaaaatgtcaaatttttcagtgaaaatgataatatttgtcgtgttaataagctaaagttagccataaactaggaaactcccacctgagttacatctgtggttttgtttgtagctttatgaggagagctagtaaatcatcttctctccccttgtgttgttgctgaaagtatacataaatcgtattatcaatgcacctgagtatatgtacttacttacatacattgccttaatacttctctaggaatgtggtgatgcattaacataaccactgtgttttttaattgaaagtaggtttttttgtttttcttaaaataaaattttttgaaatatgtggggcttttttttgtttgtttggtttggtttttttggagacagagtctcactctgttgcccaggctggactgcagtggtgggatcttggctcactgtaacctctgtctcccgggttcaaacaatcttcccgcctcagcctccagagtagctggaattacaggcatgtgccaccaagcctggctaatttttgtatttttagtagagacaggaatttgtcttggtggccatgctggtctcgaactcctggcctcaagtgatccgcccacctcggtctcccaaagtcctggaattacaggcatgacccactgcgtccagccttgagataattgttgattcacat

SEQ ID NO: 2696 - DNA, 4001 bp, Homo sapiens
tctgtctatggagtagccattcttttgtttctttacttctctaataaacttgttttcactaaaaaaaaacaaattacatgagtcaatgtttccatctgatcagtttataaactatgctattctctatactaaatttcatcataatcagaggagcaatgcagtgataaaattttcattgtaatactatttattctataagcacttgaggtatgtagtcaatatgcagaacttggctatttttagaaacaagaaaatactttataaaggaaggaacaggtggggtgtcatggcttacgcctataatcccagcactttgggaggccaaggcgggtggatcacttgaggccaggagttcaagaccagactgggcaacgtggtaaaaccccatctctacaaaaaatacaaaaattagccaggcatggtggtgcacgcctgtggtcccaactactcagagggctgaagcagaaggatcatttgagccccggggatggaggttccagtgagccatgattgtgccactgcactccaccctgggtgacagagcaagaccctgcctcaaaaacaaaacaaaacaacaacaaaaaaacctcctagacctcagaaggaaagggtgattttagacaagagttgctcaaatcagcgaaggaagataaaaattacatgagtcaatgtttccatctgactagtctataaactatggtattctacatactaaatttcattataatcagagaagcacttcaggagactgaggcaggtggatcactgtgaggccaggaattcgggacaagcctgggcaacacggtgaaaccccgtctctacaaaaaatacaaaaattagctgggcttggtggtgtatgcctgtggtcccagcttcataggaagctgagatgggaggattgcttgaacctgggaggcggaagttgcagtaagccaagattgtgccactgcactccagcttgagtgctggagggtgaaagagggagactccgtctcaaataaataaatagataaataaataaataaataaataaataaataaaggaaggaagacacagcaaaaatcaaaacctccataacaaacagtggttatatcgaggtgacataactatagataatacaaatttccttctgggcttccaattgaatttctcaaattttatgcatatgtgagcatacacattacttttggtgttaaaagaaacaaaaaaatgtcatttttaatgtgataatccaggggatcttccctgctactagccctgaggtcaaatgagtggtttattggagacacctttctattctaccgcatctagcatttgccttgtggtttcttgacaattctgatctctagttttagtgagtctaccaaactttgtctctgtgagctaacatatttctgccccggtaaaaggctatgttggaggcttccggattttttaacttttgttttcccaggcatgacaaagaaatctaagaaaaaatagtgccattgctgacaagtttttgcaagtttctacaacacgaagccatgaagcaaaggaaaagattcaagcatgagactctggagtaagaagggttgttaattacataccttcagatcaagctccaccaatcttctggaagtaaacggttctcagggaaattgcctgaaaacaaagttttaaagaaagtagaatcctctgtgtgctccaaggtccaaagaagctcccatttgcttgggaagagacttcaagacttgctggttgtttaagtgaaaactgaatcttcaggactgggtagcctgatactagtttcctgctgatgtcatcactgcttatctgcctttttccctccccttttccagggttaagataactttgacaaacagcgtctcctaaaggctaatttacaactttctcactgtagagcttggggtttccccaggtaaagcaaaagcttcctagaaacgaacccgtggaagccacaaagtgcttcaggctttcctttggatctccatttccttggtaagtcaaaaagggaagcatctgttttcctaaccaactccttccccaaacacacttcacttttcaaataaagccaaaaagctcatgaaatagttgtcggccatgttaaccctttcttatgtccacatgcaaataaacaatggagcgatctccacttaccgcaacctctgcctcctgtgttcaagtgattctcctgcctcaacctcccgagtagctgggattacaagcatgcgccaccacgcccggctaattttttgtatttttagtagagacgaggtttcaccatgttggccaggctggtctcgaactcctgagcttgtgatccaccctccttggcctcccaaagtgctgggattacaggcatggagccaccgtgcccggcccacaaataaaatttttaaaagataaaagaaaagtggggattcactttcagtctttgtgggagaaattaagaaataaaaagaaaaagaaaggaaaaaaaaaagaaaagtggggatggtgaattacaagcccatttggaggtacctgcaagagactcaacaaatttgtggtaggcaaaactgacagtatgtgttctcacagcacattcaaaccagcaggaaagtgagactttgaagacattatttctaatcataaaaacaatactgcacactaatattgcaactaccatgtgccagggcatttacaaatatttactcatttcaccatcccaacaacactgtaagataaatactattactatgactgctgctttaacatgtgaaaactaaggcacagaaaggttaattaatttgcccaaggtcacacagtgagcggctggaagagccaagatttaaaccagcaagtttggatcaaagtcactacactataattaagctaactcaaatgtgcagcactctggaaagaggtacagagtcttagaaagatgttttatctatggggaaaaaaagcaagatttatgatgctttgattagcaaatgtattaaaatgtcctttccatgtcctaggcatcattcagagaacttctgtgcttaagaaagacaagtcctggggccaggtgcagtggctcccgcctgtaatcccagcactttgggaggctgaggcaggcggatcacgagaccagcttggccaagatggtgaaacgctgtctctactacaaatacaaaaaattagctgggcgtggtggcacacacctgtaatcctagctgctcgggaggttgaggcaggataatcgcttgaaggcaggaggtggaggttgcggtgagcggatatcacgccatcacactccagcctgggctacagagcaagactccttctcaaaaaaaaaaagaaaagaaaaagacaagtcctggccaggcacagtggctcacacctgtaatcccagcactttgggaggctgaggtgggcagattgcttgaggtcaggagttcaagaccagcctggccatcatggtgaaaccacatctcaactaaaaacataaaattcgccaggcttggtggcacatgcctgtaatcccagctactaggaggctgaggctggagaatcgcttgaacccgggaggcagaggttgcagtgagccaaaatcgtgccattgcactccagcctgggcgacagagaaagactctctcaaaaaaaaaaaaaaaaaaaaccttcttgggaaaggggggccggagcacagcaggctgggttactcactaccccagttccagggaaggtggggccctgaccctagaatgctgcagcagagtgaggagggggccccaactgaccataaagagtgtagggaccaccttctttgcctgttctgttgggaccaggctagtcattatttgtcccagcctggggctccccctgtggtttccaatttgcagttactttaacttaaaatataaatattattttctggaaaataacttaaaaaggaagaaagacaagccgtaagtcttggtcttctatttagttgttttattataaatattaaatttattgggccatttag

SEQ ID NO: 2697 - DNA, 4001 bp, Homo sapiens
atatagtagattttagcccaattatattgacaattacattaaatgaaaatggactaaatactgtaattttaagaaaagtaccttccagaatacatttttctataataaaagaaaaacttgaacaatacaccacttacggcagacacatttcaagtataagaacaccgaaacactgaaagtataaggatggaaaaagatgtaccaactgatatcattatactaatatcacataaggcagacataaaggaaaaatgatcctaatttaaaatgagaaattgacaatctacagtcatagtgtaagatttttatgttcccttctcgataatgggtaagaaagacagacaagcagtagagttatacaagatttgaacaacacaattaaccttgacctaaataacataaaatcttgacctaagtaacataaaatcaattctgttagtgcctttctttcctcattcatacagtcactgtaatagtgactcctgcatgtgaaggttattacgagaatcaaatgagttaatacatgcaaattcttagaattcctggcatgcagagtaaattcataataagtaggaacttaaccaagaaataaaagcctaagtatattgctttcatctagtggtcacattatataaaaatacataaatttttataatgtggtcatattatctaaaaatgtgaaatcagccgggtgcagtggctcaggcctgtaatcccagcactttgggaggccaaggtgggtagatcacttggggccagaagtttgagaccagcctggccaacatggtgagacccccccatctctactaaaaatacaaaaaaaaaaattagccaggcatggaagcaggtgcctgtaatcccagctactcaggaggctgagacacgagaatcacctgaacccgggaggcggagatatcagtgagctgagatcgcgccactgcactccaggctaggcgacagagcaagactccctctcaaaaaaaaaaataaaaaagaataacttttcactatgtgagccattgtcatttagtgcataatgtctgcgtactacccagtatcccctgcggctcctccacagttgtggggtcccgcactataggaagacaatgcattttagctccgagtacaggtctcaaaaacttggctaaatacttcccccatccactcataccagtgtacagggaacaataatggattaataaccaaagagagggcgggaaggtcccaactggcatctgctccactcggcccactggtgtctagatagggaacagtaatagcgttcaccacttctctttcccccaaacctcctctggaaatcccaggcttacctcaatattcccaaggttcaagtgaccaactcaagggctcaggcggccaaggcccaacctcacgtgcccagaaagtggacgcacccaggggctgctcctggaaggaaggagagatgacggtgagtagaagcccatgtcagcctctctggctgggccctccttctactgatgtcttgacccgcagcccgcagcctctgggcaaggaactaaagtcgttttgagccagcagggtcagacttctagaagcagccagctaaggtaaaatatctgtcttctactccctggaaagcagtccggagaggtggaaccagcctagacttcagtatcaggcagatctggattcaaatcccagctctgcctctcacttgctgaggactctaaatacctccttttgctccacccagcctccatcttttcacgtggaaaagaactgcttggtaaggttgctgtggggagtgaataaagcaatatacatagtgcttaatctcacagacagcagatgctccagaaatgctaattctcttgcccactggtattcctcaggcagccaccagtcaccttcttctgaagctgttggcggggtacaggcaggcaggaagctcagtctgaacaaccagccttcagaccagctcagacacaaggtgaaacagaaaccaaaaactcagagcacatgacttacctcctccaaacctttgctccaaccactgccactccccagggaacgccctcctcgtctcctcccgcccactgcggagagtgctcccattctccaccgtttatcacacacttgtttctcacttcctggcactgtgagttgtcgtttattaactggtttattttcttcttggaaaaataatttttttaaaaaatataccttatctatgcacacaaagcagccccccaattcatgaatggatatgcttgtggtttgtatttgcgttttaattactaagcaatctggctcatccctttgtgcaaagcattgccttaggttacagtgtaggaaactgtatcagctcatcctagcactgttataaagaaatacctaagactggataatttataaagaaaagaggtttaactggctcacagttccacaggctgtacaggaagcatagtgacatctgcttctggggaagcctcactgtatttatttatttgaaggactgattttttaacaaagtgaaaacttctcccatggcctcttcaatgcttccttgaggtccccgctgttaacattttgattctttcagactttttcctaggcttataaagccatagtaattcttgctctgccacttactagctgcgtgaccttgggcaagttacttaacgtctcagtgccttcctcggctcattcataaagtagctataatgattcctgcatgtgaaggttattatgagaacaaaatgagttaatacatgcaaaatacttagctcctggcatgcagagtaaagacataaatacataataagtagaaacaaatattgttttatatacagagagacaaagagagacatcacatataccattttgtttacaaaagcagggtaagtatactgtgccagtatcaatcattgtgttgcatctgagctccaagtccactctgttctctttggtgacaccaagctacatcccataaaaagatctcctttgctagcggcacaattttactggctttgtcagtagagggcgccagagggacggtgcaaggcctagcagaggactggatttctcttccgggttctggtgcttctcttcctgctcttaacgccatgactgccagcagcttgtagaaccagtggtgctcaccttcagggaactttggcagcctcccagcgggcagcttcctgctcaccagccggggcctgctgactgcagacagcttgagtgctcttgtacctttagcagttagccttcttttactagttaataattcttcatattacattttccctttcaaattactggtgtgctttccatctctaactggaccctaacttttagctcatgcctggtatctaccagatggcttgtaaaatttatttaaccattcccctactgaagggaatgtgagtattatcgtttccagttttcagctgttataccctgtgcagtagtgaacatgtgtttttcatccacatcactgtttttgaaggaaaaaaaatcctggaagaggaataaatttctctgccatagggttgtgcatgtaagtctttggaaaatgttgtgagattgctctccctataaggttgcaccaatttatatttccaaacataggtgtaagtgcccacttccccacaccctcaccaattattatttttctttaacatttactaatcttaggggtaatgtctcattgttttagtttgttttgtgcaattactaaggagactgaacattttttcataacttcattgtcaatttttattttttctgtgaaacacattgcttatatcccttattcattttttagttggattgtcacttttttctaattcatagaaattatttgttgattcattcctaaaagtgtgtatagttttacagattttattaagggccttcattcttagttatgtagcaaatattttccccgattcatttcatgtctttttttatgtgatgaaatacacataacataaaaattaccattttcatcattttaa

SEQ ID NO: 2698 - DNA, 4001 bp, Homo sapiens
ccagattccaccctcagcagcctaaaatactctaaaattaaaaaaaaaaaaaaactctaaaaagaaaaaactctaaaatgaaaaacctctaaaaagaaaaaactctgaaataaaaaaattctaaaatgaaaaaaatctaaaaagaaaaaactctaaaatgcaaaaactctttggtaagatggtaagtccatcttaccaaaggtgatccttgtatatgagtgtagctgaggaaaccatgaagttagctgaaagctgggtttaccatcttatcaaagaagcaaatcctggggccctcaccatgttgggctctagggatataccagtaaacaaaatattgccttcatactgagagttagatgaaatgttttctgatattaaaagtaggaaaagaaaatcaaacacctctcttctttgaaactgccttttgtctttccccaaatagaatataagctttcagagggtagggactcatagctgagaagactgaacgaagtatctgaaaaggactcttcaccagagagggctaggtcaagatggcctcataatatcaatgcctggatggccaccgtggctcatgcatgtaatcctagcactttgagaggccaaggtgggaggatcccttgagcataggagtttgagaccagcctgggcaacaaaatgagacaccatctctatgaagaaaaattttttaattagccaggtgtggtagcacgcgcctgtggtcccagctaatctgaaggctgagatgggaaaattgcttgatcccaggatgttgaggctgcagtgagccgtgattgcaccactgcactgcagcctgggtgacagagcaagactttgtctcaaaaaataaataaataaaaaagaaatagaaacagaatgagcaaaataaaataccaatagtattaatatgcaataataattgctaactcgtgtagtaagtgatgtatgcgtattatctccttcaagcctcacagtcacctctggaggcattattaatcatttaatgatgagataacagaggcacagaggaattacttgcctgagatcgcatagttaaaaaacagtgtacacatacaaaagaaaaatacattttgcaaagatacagataaattcacgaatccacatcaaaacattagagaactgtctttggggaacaagagagagggcaggagggcaagggtgggggtggagagataaaaggaaacccttcagacacggaagagggggaaggggctgtgcacctcagggcatcgtgattcgacagaatgacagaataaagtacttaaccgtcggccccagggccaaatgaaaaagaaaaaaaagtggattgataaagtcttctggactctccaaacgggtccacaggagggagaccgtgtatctgcattcgaggcggcagggaagcttggaggacaaaaaggtagcagaggaactggagactgctcagagtgaaaaagtagcaaagtcagaggcaacggctcagagagaaaccacacaggagacctgggccaggcagcacccagaggtgtcctcagaagggcagatccaagttgcttccccacccccacagccctgtttctagagcaagtcaagaaacaaaaatattgtggtttcctgttgaagaggccaccttggcaacaggcactcacccgctccaccctttcctggcaccatcgcagtctccgagtcccctaacctgcctaactccacgtgctcagcagggaagggggtgggaaaggctcccaggaagaagtttcttttactttcaataaccaccctggctcttctgcctccctccatggcctcacttcctgttgagttgactagcaaattcagcagggcttgaaaaaaaacacaaaagataaaaggaggagaacctgtgaaaacacttccctccagcagaaaggcagaatctggtctccgagagaaagagaaaacttcaccacagaaggaactgcagggtaaactttactcctaaagcagaacagagatgactcactcgaacaagaaatgtttcctgtttaaaggaacagatgcccaatttccaaccattcagaagagggatgtggcagacaattcatggacgtgcaaactaaagcccgagcgctggacatgctttattggaaagcatttatactgactccatttagtaataataacccctgtcggtggcaagtaatatgccattctttcttgcaaagggtctgggaataggaagtttccctttgccttgatcaaacctcagcactgaagtcacagaccagccctctcctccctcccgccggactgggtaaagccagccctgtagctgaaatgtaggtagattgttcagaaaaaaggaggaagtgttctggctcagccctacttggcttagccctgctcggctcagccctgctcaggctgagttcccatccttggccatgttctccagtttagttgtaacccgtgtctttgtagcattgatcctggagtgttggtgctactgaggtctgttctccaaagctctgagccctagaccctcccctgttctctcattttttttttttttttgagacggagtctcggtgcgttgcccaggcaacagtacagtggtgcgatcttgactcactgcaacctccacctcctgagttcaggtgattctcctgcctcagcctcccgagtagctgggactacaggcacccaccaccacccccggctaatttttgtatttttaatagagatggggattcaccatgttggtcagactggtcttgaactcctgacctcaagaaatccacccgccttggcctcccaaagtgctgggattacaggcatgagccacggtgcccagcccctcccctgttctctgccatctgcctctctttcccatttgaattttttgttcgggggacggagtttcgctcttgttgcccaggctggagtgcaatggtgccatctcggctcacagcaacctccgcctcccgggttcaagcgattctcctgcctcagcctcctgggtagctgggattacaggcatgcgccaccatgcccggctaattttgtatttttagtagagacagggtttctccatgttggtcaggctggtctcaaactcacgacctcaggtgatccacccgcctcggcctggcagagtgctgggattacaggcatgaggcagcgcgcccagccatgaatttttaaaaagggttttctgcccttttgctttcacatcttgtacattttataaccagaacaccagcaataacacattacctatatgttgcaccttgacatgaactatctctaattctggcagcagaattctctaattcagggtattgttctcccatgttatggatgaggaaactaagactcagacagttacatggagtcaaactcagtcctgctgagccaaaaacagagatttttctatgacatactaactccctttctccaacacttcaaatttggaatgaatcatgtggatggaagagcaacaaatttaaactaatagtgactggtgcataaagggcagaaggtccttggtttctcagtcacctaacaaaaaggagttggcctaataaaggcacaagctaatacttatcaaaccattggcgtatgccagacacagccacctaaactagctcatttccacttctgaacagttctcagaagtggatgctacgattggtcccattttatggatgaggacactgaggcttagagaggctgaaagacttggccacgctcagtcagtgagtgacagaataaggtctgtttgtctctaaaaccctgagtggttagtcaccacctaaacattaatgcatagccatgaatctcaatctgacccacctcagaattaactgtaacatttctaaaaatatgagtcttccagctccagctttggaactcctatctgagcaaaactgtgggagataaaacagctggagcacttagaatagtgcctgggccttccacatttctcaataaataggctgtgggtgcagtggctcacaccagta

SEQ ID NO: 2699 - DNA, 4001 bp, Homo sapiens
gtaatacatatattttatataatctctgctaaatagtaaatgtatataagtctatttgtattacataagtatatttattattttatatatttatgccccaaagtatttaaatataaatatgtgtttataataatcatataaataaatgatatataaatgtttgtaatctatatatccatataaacataaaaatattttttaacctcatttcactaaaagcctctgaagaaactactattactgtccccatttttctgttgtgaaaaatcacggcttggaaataagctagtaagagagagagccacagccagatttaagtgtctcactcaagggcttcagtgacagatcacaaagatttagacgtcattctacttgcagctggaaggcagtgaaagaatctcatgaagaaaaacataaaatcataacttttttagagaacaacatttcaaaaaattttataataacaaagccacaaaaacagaagttcttaacaaatccactataggagagggggttagagcctcacaaaggaagtgctagaatctaggccccagcatctcattccagagtcccattctaccactgtattacatgtcacaattaaactgtaaatacattccatctcatcacaatcattccagtaatattctagcagcatcctagctcttgcagtgataactaaaaagcaaaacatgcatttgccatcggaagcagaaacctgcatctcatccgaagcttgagagaacctgaaagccactcgctctcaggcccaaacccctaaccggcaggtagtattgccactccctccaatccaggctggctgcctcagactgcgggctgccccggaacctgacagacatccattctgcacgcacatgatgtccataacagggcgctgcagccacggcattcaaacaacccagcaaaggtgtccaaacctcagcaaaacatataatcccatcattttcaaacagaatgaaacttgcaacttcacctgtaaattcttaaccccacaagtgcaggtctctgattgtgtctatctagtcttcccattatattgttttttgaactgttctgtatctttttaatttttttttttttttttttttgagacggagtttcgctcttgttgcccaggctggagtgcagtggcacgatctcggctcaccacaacttccacctcccaggttcaagcgattctcctgcctcagcctcccgagtagctgggattacaggcatgcgccatcatgcccggctaattttgtatttttagtagagacggggtttcttcatgttggtcaagctggtctcaaactcccgacctcaggtgaaccaccgcctcgacctcccaaagtgctgggatgacaggcgagagccaccacgcccagtcttttttaatttctttaaaaaataaataattgaattagtaggaccacatgggtgtgtttgtgtgtatgtgtgtgtgcgtttatgttggcaagtgtgtatgttggtgggtatgtgtgttggtgggaggatagctgtagcagcaaagtcagtagagatttaaattttggcttctattatttcacaagtttgactgggatcaggatgaggcctttatacaagtagttaaacttgcagcatttcagaagctcctaggacttcatcagtctaagctagaatggccttcagatctggaaactgcacggccctcggcaaggctctcagagggactgctacctcttacactaacttcatggtttccccatccacactcacatacgaggatcacctccatggccccagggccacccgatctcactctcagcagcctagaaaactccagaatcaaaggccttcctcccaaaaggcccctctgaccttaacaaagaggcaaatccttaccttactctcacgatggtagcaccttcgtcacaggcctatccactaccatctgagcatctaagacaagagcaaacgtctaatgaaggacggaagggcacagccagccagctctacttcctgtttcgaaactcctgagtcacaaacactagaggggaaagagcgcttaccacttgcccctgagtgagcagagtgccttctaaagcttctaaagctgcaggaaaaaggcctggtggtccaggagaccgcacgcagggcacctggccacctgagcactggcccctggctgtgactttggatgggccattttacctttggggcctcatttccacattccaaaacaaggacgttggactggattgtaactaagaacactttcatttcatatttaggatttaaagatttttctgggttcatcattaagactttaattttttcattcaatgaatcttgatggagcacctcagagaggtcttgagattggacactgcagagccctctcatcttggttctcagggtggctgtgaactttcagagctaaagcccctggtttagccaaggagcatctctgtggccccaaggtcaccagattccaccctcagcagcctaaaatactctaaaattaaaaaaaaaaaaaaactctaaaaagaaaaaactctaaaatgaaaaacctctaaaaagaaaaaactctgaaataaaaaaattctaaaatgaaaaaaatctaaaaagaaaaaactctaaaatgcaaaaactctttggtaagatggtaagtccatcttaccaaaggtgatccttgtatatgagtgtagctgaggaaaccatgaagttagctgaaagctgggtttaccatcttatcaaagaagcaaatcctggggccctcaccatgttgggctctagggatataccagtaaacaaaatattgccttcatactgagagttagatgaaatgttttctgatattaaaagtaggaaaagaaaatcaaacacctctcttctttgaaactgccttttgtctttccccaaatagaatataagctttcagagggtagggactcatagctgagaagactgaacgaagtatctgaaaaggactcttcaccagagagggctaggtcaagatggcctcataatatcaatgcctggatggccaccgtggctcatgcatgtaatcctagcactttgagaggccaaggtgggaggatcccttgagcataggagtttgagaccagcctgggcaacaaaatgagacaccatctctatgaagaaaaattttttaattagccaggtgtggtagcacgcgcctgtggtcccagctaatctgaaggctgagatgggaaaattgcttgatcccaggatgttgaggctgcagtgagccgtgattgcaccactgcactgcagcctgggtgacagagcaagactttgtctcaaaaaataaataaataaaaaagaaatagaaacagaatgagcaaaataaaataccaatagtattaatatgcaataataattgctaactcgtgtagtaagtgatgtatgcgtattatctccttcaagcctcacagtcacctctggaggcattattaatcatttaatgatgagataacagaggcacagaggaattacttgcctgagatcgcatagttaaaaaacagtgtacacatacaaaagaaaaatacattttgcaaagatacagataaattcacgaatccacatcaaaacattagagaactgtctttggggaacaagagagagggcaggagggcaagggtgggggtggagagataaaaggaaacccttcagacacggaagagggggaaggggctgtgcacctcagggcatcgtgattcgacagaatgacagaataaagtacttaaccgtcggccccagggccaaatgaaaaagaaaaaaaagtggattgataaagtcttctggactctccaaacgggtccacaggagggagaccgtgtatctgcattcgaggcggcagggaagcttggaggacaaaaaggtagcagaggaactggagactgctcagagtgaaaaagtagcaaagtcagaggcaacggctcagagagaaaccacacaggagacctgggccaggcagcacccagaggtgtcct

SEQ ID NO: 2700 - DNA, 4001 bp, Homo sapiens
gctggagtacagtggcacgcacattgctcactgcagtcttgacctcctgggctccgctgaaccttccacctcagcctcccaagtagctgggactacagacacacattaccacacccagctactttttgtattttttgtacaaaatttataaacatttttggtgggttttgccatgttgcccaggctcaaactcctgggctcaagggatcctcccactttggcctcccaaagtgctgggattataggcttgagccattgtgcctggcccaccctcattgttttttaatttttttcttgagacggagtcttgctctgtcacccaggctggagtgcagtggcgcgatctcggctcacggcaatctctgcctcctgggttcaagcgattctcctgcctcagccttctgagtagctgggactacaggcgtgcaccaccatgcctggctaatttttgtacagatgaggtttcgctatgttggccaggctggtctcgaactcctgacctcagggtgatccgcccacctctgcctcccaaagtgctgggattacaggtgtgaaccactgtgcccagcccacccccgtgttttaaaatcagttttctgaagtgcgttgcttttgagctttacattgcatcataacacgattgctattcttcagcttcactgtgtatgtaataggttttttggtttgttgttgctgctgttttttaagtcaaaatctgtcttctctcccctggattgggtcaaggctggggccctgggaagtaccttgatgaagtcttggctgtgctgttccatgagctccagcttctctgagagatagcctggggtgcagggacacaggcattgacgtcacaggagatgtgggtcagaggctgaaggaagggaaggtggtggcgcagctggaggactaggtgtaatacggtcccagaaaaactacaggatgggtaagatgtgccctcatcccgagtccatgaggaactcgctcatccctctcccaccccgtgccttgtcctggtccaaggcaaagccaagggcttggtcctgaaaaaagattctaggaattggtggaggggagggttggaggaaggggagagtgacgggcatcaggcagtaggaacgctacccaggagggaatttccgcagagcattttgtccaagaagcctcggctagaggcatgcacgaagaggcagtatgtcagcatgccgagtttttcctggtatttccctctctgcacctcaatggtcagctctccctgaggctccccggtgtctgagaccatggccagcgtctcagagaagaacagcatctgtagctcctccttgtctggggtgaggggcccgtgggaacagataaagcccctgctcctgggccccaatccaatcctctgaccccatgaccaccagtgtccccacagtccccacctgcctcctcatcccacagccttcctcactggcacggacaggtgaagactcctgccccatgtccccatgtccccggggggccttcccttgaagaatgtcaacaaacaggcctcaggccttttctgagtcccaggagaatcaaggaagagagagagagagagagagagagagagagactggactttcttccctcctctccagacttgcacccctcccgcacccccaaccccgacactgtctgagctcacggagggagctgaggaagtcgatggcttcagcattggcctctgggagtggcagacactccggacccgagggctggtggtccttagctctggagcctacagagggatgagaggctaagatggcagaccctggggagaagggcaggggtcagggaggcaaggcagggtacctcagtcctggccccagcacccaagaacagaatcctctaagactaccccgagggtggattgggaagaaagaagaggatccccgcctccagccccagcagtcctcttcccacctgtggagtaaaccttggaggacatgctgtgggcctgcctctacccggtctgtgtccagctgtctccatggcaaccagagctggacagtgcctcttaaagggccatcaacccactttactacacccagaccttggagggaactgacactgcaggtttggggctcagcacaagcttgaggtgttgtccagcagagggagcatttgatatatatttttttcttttttgagacgcaatctcgctctgtcacccaggctggagtgcagtggcgcattctcatctcactgcaacctctgcctcccgggttcaagcaattcttcttgaggtctcagcctcccgagtagctgggactacaggcgcacaccaccgcgcccagctaatttttgtatttttagtagagatggggtttcaccatattggccaggctggtcttgaattcctgagctcgtgatcctcctgcctcagcctcccagagtgctgggattacaggtgtgagccaccgcgcctggcccacatttgatattcttaagaggcagagtgaagaaatgggtcattagaatgaccttagaagaggccaggtgtggtggctcacacctgtaatcccagcactttgggagtcccaggcaggtggatcacttgaggccaggagtttgagatccagcctggccaacatggtgaaacccatctctactaaaaatacaaaaattaccagggagtggtggcacatgcctgtaatctgtctcaaaaaaaaaaaaatgaccttagaagatatgaacgaaagtcagacagagtctcaaatgcacactatccaattagctgctacatgaatatctctgcaagttacagttctaatacatgtaacaataatgataacaacaatgacaacatagcaaactctttgactggacttattcctggtgaggcgcttttttttttttttttagagagtctcactctgttgccagtctggagtgcagtggcgccatcttggctcactgcaacctctgcctcctgggttcaagtgattctcctacctcagcctcctgagtagctggaactacaggagtgtgccaccatgcccagctaatttttgtatttttatttttattatttttatttatttatttgtttgttttaattatttttgagaaagagtctcactctgtcacccaggctagaatgcagtggcatgatctcagctgcaacctcctcctgccaggttcaagtgattctcctgcctcagtctcccaagtagctgggactacaggcacccgccaccacacctggctaatttttgtatttttagtagagatggggtttcaccatgttggccaggctggtcttgaactcctgagctcaagtgatccacctgtagagtccagccctacggggcttagcgggtgttctccctgtgtgtggagacgagagattgtaataaataaagacacaagacaaagagacaaagagaaaacagctgggcccgggagaccactaccatcaagacatggagactggtagtggcccagaacggctgggcgcgctgatatttattgcacacaagacaagggggcacggtaaggagggcgagtcttctaagtgattgacaaggtgaagcaagtcacatgatcacaggacagggggcccttccctcttaggtagccgaagcagagagagagacggcagcatacatcagcgttttcttctatgcacttataagaaggatcaaagactttaggactttcactatttcttctaccgccatctactacaaacttcaaagaggaaccaggagtacggcaggaacatgaaagtggacaaggagcgtgacctttggagcacagcaccacagggaggggtttaggcctccggatggctgcgggcaggcctggataatatccaaccttccacaagaagctggtggagcggagtgttccctgactcctccaaggaaaggtgactccctttcgcggtctgctaagtaatgggcgtcttcccaaacactggcactaccgcttgaccaaggagccctcaagtggtccttatgggggcgtgacag

SEQ ID NO: 2701 - DNA, 4001 bp, Homo sapiens
acattagttcattgtgcggggccaatttggcaggctggaaaggttggcaagatccagatgctacaggtccttgtaattcatgttaaggaatttggattttaacccatagggatgccactgaaaggtgtgacgcagtcggattgacatttataaagatcattaaggctaacatgcaacgaataaattaaagggcagcaagactccagattagtcaggaggcttttagagtattacaaatggttgggatcacagaagcaggatttggggggatggtaacagacgaagtttcagacatgttaagttttaagttgtaggacatcaaaatagaaattacacaggtgtgtagctaaagatggacaaagggggaaggaggagggagccttaaaaagaagccagagaagcaggtggaaaaatcagaagaaaaatgtaatagaagccaaaagaacagtgtttcagaaagggaaaatggtcagggataggagtgaaactatccctagattcagcaacaaggttgctggtattaattctcactcctgagcttcagatcattttctccagtgatctactgacctaccagtgagcaatacgggaaaggcccgagcggcacgtttgaaatacattgttttggacaagaaatttgttcatcttctcagcagagcagcctctgaataactgtggggaaacgccaaaaataaattcctttataaaattacttccgagcaaaaaacgggaataaacttacagtctacaaagttttttaaaaaacaaaagcagttatttcttatttttacataaaaggtcacgaagtggcccaagtctgtacctgtctctagcaacaactaggaatattatttcccggaaacagtatcattttatttacatttcttaactttttccaaacttctaatacagtcatatatttgttctagcccttctatttaactgtaaggtttaaaaatatatttctcaaacttttccagtaagaaacttctagtgtaagtgcataaaccgcccttcacgaaactaccaagttcacaaacttgtggtttcgagtatccctgtacactctaaacgttcttagtttgagaaatagtcttggaggacagagattttattcttacttcctacgcagtggtttacaaacagacctcaaaaaaaaagtgtttaagataggagcgctccctgccaactggctggaggactttggctcgtggggaaggggaatctactgacgaaagccccacgtgtcgggcattttacagacgggacatcctttaatggcaacaggtaggtggttccggccctgtttcacaggtgacaggtatttctccattttcaggtgaggtagatgagcgtcaggaaggtaagataacttggtaggaggtcacagagacaatcaggggggcgtgtcttagcgtcaaagccttgtttcaaaggctaactttccatctcacttgagaaatgggaatctaacgcagagggggccgggcatcattaactcccaagatgagaggcaacccatacgagaagcaagtgacccagcccctacctcgaagacatttgctcttgatcatgaggccccaatgcctcaggagaagaggcaccggcagcccgcaaaatcccatgacaccagaggtcacgccattttgtgactgggatggttagttacctaaatacccggtgataattgtgactgggatcttggcgccgaggccagacttttcctcctcctcgctttgcgtcgtctccatgggaaccaattcaggacaatcctcctccgcaggatcctcctcctcatccgcagatccaacagccggtaacattccggcctacagcacgtccctacctcagctgaaccgctgggaccaacacgccgtaccgcagccgcgcacgcccagcacgccactcccggcctgcccggggcctgacgtcatcacatcgcgacgctcgctgatcccgcccggattacctgggctctggacgagaagcgcctcgtcccttagccacaccccccggggaggtgggctctccccgacgacagctggacacgcccctgggcgtgttctgtgaacctgagcgacgctgcggagagtccttagggcgcactaaccacctgtctgaaggtgtcactggcgcctagagccttaataagctactggctgtaggtagagctgaggccagcctgctggaaatctggagtgggtagcctgacctaaccagttcccacagggcatagattttatcaacttgattttttagtctcgttaaaagaaaaagttttaattcataggggaaagaatggaaggttataacattacaattttaattgtaatttttatacctgaaggataaccagtgacaattttttctttttttattattacatattatatatgtaattccaaatttttagtattcatgcatcacttttatttacttttttctcattatttatttggacctcaggtaacctaagttcattaatcgtatttgctggtgcatgacactctcatcactaatccatagatagcccttctttctaatataaatttatagtgaactcctttgacctcattcctaacctaaaagcattaccagtaagttacacgtacctatgtgcaccgcccctgcttccaatccacagcctgccccataagatagtaacaacagtcatgaattggttctggattgctgatcattcccttttagttttatcacatatcccacgtatgtacttacagaatatgttgtttaattttgggtgtttttgagcttcataaaattatccatataatatataaactcctgaggcttgctatatttttcagcatcactgctgtcttgtattctattgtgtggctacacggcaatttattcatttcctctcaattgttccaggttttgctcttatgaacagggctgctatgaacatttttcctgacatatgtgtgtgcaacttcctcttgagtgtctgtgtaagagctgaattgctgggtcctagattattcaaatgttttacttcacaagaaaatgcacaattatttttcaaaatgtttgtacaaattgatacattttcccagcaaattataagagatctcattggtctgttatgtcaatattatcaggcatgcatttttcaccaatcaattgagtacaaaagaagacttcattgtgatcttcatttgcatttccttgattactaacaaggttgagaatcttttcatgtgttttggcaatatttaattcttagaatgaccctgtagagtgttatccctctttcaaacatgaggcaccaagagttaagttacttgtccaggttaggtcataaaaatctatctgatgcacaagtagaatgttttactactatcctgatgccaaataaaaggttgacttttccttccttctctgaaattccccatataatatactgtgtgtattccattagttctactgataaggacatataacttgaaagtatttatcacgccttttgcagaacacagttaagacagagggtttatatttgtgcaaatgagtatattatattcacacatacactcggtctgagaaatcaggtcttgaatgctttgccagctttgacaatgtaaccatgaaccagctgaggaagaaataaggcaaataccttaggcatggtggttcagttcactttattctaccaaaggagagaagctgtgatgggtagcccaaaatagatagcttacgccctaaacacaatggttcataagctttttcgtttcaggaatgctatgaagtattgatttttttggcaacctaagggaaggagtaacattgcacccacaggcatcacactatttgcttgatgtcccttcagcactgcattactgcctgaatagcagctattacagccctcaccacgttctttgacatattttttaaagtacattcttgtgggttcccaatatggcactggctgaatgttatactaaaatccctctttctgtgttttgagacagggtctc

SEQ ID NO: 2702 - DNA, 4001 bp, Homo sapiens
ctgccccccaaaatataatgcaatccacatgtgtactttaaaacattctggtagccacattaaaaaagtaaaaagacacaggtaaaattaattataatgatatattttatttaacccatcatatcaaaaatactacattgaatatgtaatcgatatgaaattattgaggtactttactttcttattttgtattaagactttgaaatctggtgtgcattttacatttacagcacatctcaatttggactacccatattttcagtgctgaatagctacatatggctattggctaccacattggacagcatcactttaataccttttttgaacatatgtttatttttcagactactcagtatcctccctcacttcttcaaataacaatctcaaaaataataatgtctattaacatgtactgagaatccacgtgccaggcagtgttgtaaagtccttagagggattttatttatttatttatttatttatttatttatttatttaagacagactctcattctgttgcccaggctggagtgcagtggcaagatcttggctcactgcaacctccacctcccaggttcaagcaattctcccttacaggtattttaattcttacaacagtttatgattacgtgtgacttgcccatttatttggcctaaaatgatcctttttcaagtttgtcgtttagttccttattttaatgtgttcagatttagcaaacaatttcatgatcaccctttaggaatttatacagttccatcagacactctcttatccctcccccaccacccaccaacacccttccaaagcggaagattctgttgaccctggttttcctagttggcaacatgtctaaaccctctggaggggactatctagattcagtcgttcgttcattcacaaagcacttactattatgtaccaggtactgtgctaggcaccagacaaggcaggcaaggctcctacctccaattgtgaactggacgttcagatgaaatcaaagaaatgtaagctgaggagacacagagagagtccattacttttctgccacgggatggtcttgcagccctgtcctgactcattaatgcctctgacctcaggggactgtacagacagctcctgcctcagagctctgaaaaagtctccactcaacacatgaaactattccagagagtgcatggaagagatgagagatgatggggtagaaagctggtccaacacaggtcatagggctagggaagtggtcccagggcaagggacgctgggtgccagcatcttctcagactctacggggataggcaaatttctccatctcccggagcctcagcctcctcgcctgtaaaatgtgggttatcctgacgatttcacaaagtcgatgtgcagctcgaatgaaacagaggatttgaaaaagcactaaacaaacacgttatagtaattaacaaccataactttcccactagcctgcactattcttccaaaagactcacacatctgcagtcgttgtgaagagactgggcaagcgaggttttttgttttgttttggatttgttttgttttaaattgaagtttccaatttcgaggactttaaaaaatatatatcatgagcttcctttatttgcctaattgctgatctaaaaatctccaagatgaccactagaaaaagtggcaggtcgtcgtatagagtcgagggagaaagaaatagatgaaacaaagggggacaaaatacacttagagctgtttcttctttctcttcgggatccttagtctgattgatctcgcccaagactcagtcccatggggctctctgaagggcatggaggggacctctggccacgatttcccgaaggatagggtctcccgggacagataccttccctggccactcgcgccgctccctgagaccctgggaccttgggactaacgctcagaacttacatcgcctccatattgccgtctccatagatacaggacgcgcaggaaacggcgtcttcagatatcccagggcaacgacggcagcccgagtaagtcaagattcgtagaaggcgaaggcaccgcccaattttatttcctatattcagttttgattccctgacttttcctgctggtagtaactgtgggcttctacctgtcgcgacatggtaatgtagagcctcctagttgtcgtgacgttccagcaatcatgactttaattgacgaccaaattcacaggaagctactctgtgggcttggcactctgacatgcatagagacagaagctcattctctgtgattgcaattgttaacttaaaagcagcccgcagttatttcttatttgaatattgctttgcaaatagaacccttttgctgatgagagggaatgcgtcctctgcgttttctcccggcatttcttcttggtcagcaacaagaaaaataactcttttgaagggatcggaaggttaatgtataaaggaattattatacataatgtagactttcggaagcccattggttcatttgttggtatgtgtgttggaggaagggtcctattttgtgaagactccttagtaggtgaagctgaaagtctcaaagttcactcttgggtaactaaggatgttttgctcctcaagacagtgaacctatttcctttcagatggaaggggggatgtgactagggggagagagcttagtgagtctaggggtaaacacagaaaataagctatcattttgggagagttggagttgacttgtgaaaggtgaaagatggactgagatggcaaagtggcctgagctggcctgggagatcacatggccagagactggcagggctggagggaaggggcaggcagggcgcctggtaaattacgccagcaggatcaagagttttccgggaatcaaagaatgtggaactcagtgagcttttccctggatttaatgggattctcagaatctgaaacctgcactttggacatgacgacttttatgctgtttgtagtttctataattatttcctttttgtttttccccaaattctttttgaaatggtcagcctaactcagctggaccttaaggacaaggaaaggaactggttcattcttaggcgaaaatgaaatagggactttgggggcagggtttggtgttggccccaggaatctcagtgggaaaactccaaggaggaagcacagctcatgctaaaggcgtcctcgtgcctcttcaccggggagtctccttcctgagctcttgcctgctcaatggtggattctgggtttggaaaaattaaagggaatggttcctcctcttagcagggcccctgtagcctctgcttctgtaagcgtctagctgcctcctagaagccctgatgcctagtgaccacagctgacatcagtggactcccagggagaagcctgtgtgctggactttgcccagggaggcacacacatggaaagagccttcacaagggattgagcctgaggagggaaaagaggaagctgagtttgctttgaaactctccctttccaggagcctagaaccagtggaataatgggtcctgggacctgttgatcatattttccctggacccaaaaatagatcatgggagaggcagccaagtgcggtggctcacacctgtaatgcccactctttgggaggtggaggctagtggatcaggagtttggtcaggagttcaagaccagcctgaccaacagggtgaaaccgtgcctctactaaaaacataaacattagtcgggcatggtggctcatgcctgtaatcccagttactcgagaggctgaggcaagataattgctctaacctgggaggcagaggtcgcagtaagctgagatcgcaccactgcactccagcctgggtgacagagcgaaactctatcttaaaaaaaaaaaaaatcactggggagggtttgctgtttggttcaaggctgggtgacaatacagaaaattgattatcaggatgtaggagaagggaggaaggatggaagggagacggcctcagatcctcctggcctggaag

SEQ ID NO: 2703 - DNA, 4001 bp, Homo sapiens
agtcttcatcagggcttacatcacctgactccactctaggccaccggcctcggcacataccagatatatctggcttcagggcttttgtcctggctggttcctccatctagagcactgttccccaaaatcacccacaaagcttttccttcacctcctcagagagacctcccctggcccactcctgtcccactccattatgtgtttttcataacaattttcacagcctgacttatgttaagggcctacttatttgcacgttgcctttgtctgcttctaaacattacatgaaaagtgtttgtctcttttgttccctgctgtatccccagcagctagcatgaacccgaatgctgccaacaaccagtaaatgcttttggaaaaaataatgggtgtacaacggaagtttggatggaggaaaacctgcaaagcctttcacagactaaccccagccatggcagcagtgctcaagtgttccctgtggatagagggtctgagggccacagagccaaacaacacggtccactcaccatcccggaagcttgcttgagcctgacgtagactgtgaggaactaggattccaaaccagttcagggggtcctgaggggcctcagaggactccggttctggggtcttagtggggcccttgcgcctccgcagacctgaggaaagaaaggttggaggaggctgggatcttactccctgacctttatcatcttggtgacaatgttgagcttgatctgagctcatgattctataaaacactgttggttggaaaattccaactttggggttccaggaaacagcttaccacaaaacacagcctttccccttgtgattcagatgagactgtttgtccactctttcccgtgactcctgtaagacccactgatgaccctgtttgcctgtgacactgatcttacccattgtacctgaacatgccaacagaccagacatagacgttccaactccccattctttgtctcaggatgattaactgggattagaagtttgtccctctgaaactagctagacacacagataaatattttctgttcagctgactgaaatgtatgtgattgtaaatctattcccagtgtaaagcaactcaccaacaatttctctacttcctataaaagtctaaggcaaaaccaccctacaaaaacattctgttcttctgctctgggatgctctctcttatcgcaaaaacctaatttaaatcatctccataatttgcattttgtctttgacactgggaaggggttctgcagaaggaagagggggctcacctgcttcgcgaggccccacctcctctggggcgtggacaccagctctcaccaccttgaacttctggagtccctcctgggcctcgctgaaggacgagaagggaggatggagctttggcagcccgggcctagaacgcgcccgcccgcccacccagcccagcatggaagcttcctcacctggcgtggaggcagacctggggctccatgtgggaagcatactgcaggggccctaccgacttggcgcccatcgcgtagcgagccttggcgagcgagagccagccctgcagggagaggaaagcggtgagactcagtttacgcccgtgtaccctcctgcccgccccaggcgcctacctcctccacccgggcgttcaacaccgttcgtttcccctccagctcctccaggtccccaagcagctgcaggaccagcgaatccagctccgctcgcaggtcaagcgccgccatggacacacctccagatctggagccaccttcttccttgtcaccctccgcagtttggcaggacagccaataggcacacgagatcctccatcaaggggcgttcccatctggggatccccacgccggcagcaccaaggcctctgggtcagcttctttaagggcaagcgcccttagagaagcagcacggaagcaaccaatcaactggtttctccaattagcccccaagtggatcagcctgctgaactgtcggctagggttataggtggttctgagtccttccggaagctgccgaatcttagaagtcgcgccactgttgtggcgatggaagaaggcgaagctctacagaaaccattttggttgagggaagagtggttttaaagttaatttggaaaggagccggcaagcaaccttcagtcggtgtgcggtttttacagttgaactgtttccagccgctaattatgattgttttagcggttcgtcatctgaaaactgcattctgcacggcggtggtggggggaggacgaggatggagaagcctgggcggacatatttattagctgcggtcctaagtcacgtgtgacattctgtatccagtctatcggttatcccaaggagaacgccctgccggaatggccaatcgccttgagatgtccccgccctattcgccatcttaacatagggcattccccacagctgcaggcaccagtgaagcgtctaagggaccatcttggttgagggcggaagtgaggactgtgtcgcgctggaggagcccacagattctcccggacccacgtggaagcggcactcaagatggtaggagaatgagctcctgtttcggaggtccggggcgcgtgaagtgctggggatgtggctctggggacttggaggctcagcggctccggggctccggggttccggggctcgggagcgagtagtgagtgactgggcctgctgttcccacagctgcgccgcgaggcccgcctgcgccgcgagtacctgtaccgcaaggcccgggaggaggcgcagcgctcagcccaggagaggaaggagcggctgcggcgcgcgctggaaggtaaggcatcggccccgcgggcgtctgcgtggtaaaccaccccggcacgcatttgtgttcgaatatccgagcgtctttccaaatgcttgccggccgttttccttgcccattgggttctcctgttggttttgagagtgtttcttccgtgtgatggtattaattacttgtcactgacgttgcagtacccgggttttgcagcttgcccgctgtgtgcagtgtgtcaagttcgtcccaagttttaaagactttatcttgtcctgtagaaattctctttagagcggtggctcactgctgtaatcccagcactttgggaggccgaggcgggcggatcatgaggtcaggagttcgagcctgaccaacatggtgaaatctcgtctctactaaacatacaaaaattagccggccgtggtggcacgcgcctgtaatcccagctactcaggaggctgaggcaggagaatcgcttgaacccgggaggcggaggttgcagtgagccgagatcctgccactgcactccagcctgggcaaaaaagcaagactccgtctcaaaaaaaaaaaaaaaaagaaattctctctaaagactatctggatagcgctggtgctgcagactgcgctgcccatcctccctgcaggagttcctctgagctccgtggggaacagtgctggccccgagtgcgcacctggagcgctgtgctctgcggtaggcagcctgtggtccagggcccgctgaagccatgccttcgaagcgctgtgggcatcgtgaccaacggttttgctgtctgagagcttaaaggtctctggtccaccatcatacgtacagaacagtctatatttcttttcaaaagtaatttttaaggccgagcgctgtggctcacgcctgtaatcccagcactttgggaggccgaagcgggtggatcacgaggtcaggagatcgagaccatcctggctaacacggtgaaaccccgtctctactaaaaatataaaaaattagccgggcgccgtggcgggctcctgtagtcccagctactcgccagcctgaggcaggagaatggcgtgaacccaggaagcggagcttgcagtgagccgagatggcaccactgcactgctctgcctgggtgacagagcgagactccgtctcaaaaaaaaaaaaaatcgatgtttagatttctacctgattataaaagcaatacagt

SEQ ID NO: 2704 - DNA, 4001 bp, Homo sapiens
aatccaacagcctttctaaccaggttaatgtagcacttaagagtacttgctccagttcttatttaatcagtgttattttagaagttactttggattaatccttgatttggtgccttggggaagactgggtgtggtctttggaacatcctgtctatttaggcactgattatgacttccttgcagtctctgcctcgcctggattaaggactccagataccactgttcctgctgcagctgctgcttcctgttttctaagtggctttgagtagccgttagtttctgggcttgctcaattagctgcagtaattccttcttgaactgctggttctctctgttgatgccacaggagtattcaaaaataaaccgctttgctgccaacttcaaggcctgggccttcatattaagctctcttctttttctctttcccagtagcctcctgtctggctcgctcagttgtttctccagtaatcttttctcctggaggagctgggcctgtacttcccgtgtctttgaagctgtctcagcttggactttctttgtctcctcctgtaatgtctgtatttctttctcctgcttttcctttaatatagcaatgtccctcattgcctgcaacttccgcttcaaactggattggatattttccttttgcaagagcgctgttttaagcactgaaatttgttctgcatatctggaggctgattcttgtcttcttcgttcaatctctccacttttttgtaaatagctgttccataccttctcaggttgctctgtgtactcttcagttttgttagtcaggtattccagaaagaatctgttttcagcctggacaagtaacttttctcggtgtagctccctggattcctccagtagctgtttccgctgggtttgagcttgttttatatgcttgttcagatccgtcatttccgccactatcttttctttaagccttgtctctacctttgttagcttctctggcttgacaaaattatttattagactatgatacggtggaaggagccttctggggccctcagcaaacctgaaagaacaaacgagacattcctctgtcagttaatgaaactttaggaagtaagtgcacaactgtccttcattcatacaagagaatatttctgagcaccagaatgttccagacattatgcaaggtgtggggaatccagctagtggtaaaggatgaggaatgtagctcgtcatttacaacgtgcattcactacaaccctgggaggtattacctcagttttaaaaaaggagaaaacaggttcagagagtttaagtgacttgcccatgactcacaccactagcaagtggcagagcctgggtattaaagccagatcttatgacttactgaacactgtttgcagctacaaagggtcacagaaacagactgggtggtcaggagtagaaataattttctaggctctttcatcatctttcctgagtttctgagggaccttcagtgactggaggggaggaagctcccctccagtacctacttgcacctggaatccaagcattcatcctgaaggtcacggcaactgtgtagttcactgagggtgactgccaaggaatgagcgctagcatcaggaacctgcgtctgcaactcgcgggaacaatgtgcaagtgtggaaagctcccgtagtttattcgttcggtgctcaaagggtctcggtgctgcccagcaaccctggagactgcaccctgctccagtcccggctggtccagccctgaactgtttaaccgcctcggctaccgaataagcccgagcagccggtcctccagtggctccgctccccgttctctgtgggctcaaaatgacaggcatgctcctcgttttcttgctgtgtgagccctgccctcgggaccccatctcttctggccttcctccgggagacaaaagccctcccaggctgcagagatcagcgcccttttcctagctcccttcagccttcctctcgcttgctcagcgcccccacttcctcgccactgtcactagttgactcatcagccctgcccgacgctaagaagatgccctggcaaccgccgcgcccctcacccgctcctttctgacgctgtggtggttttcgttcgcagcccagaacattgcggaagtttctctacccatgcggtgtctctatggtcgggtgggtggggccaggaggaagatggcggcgtccgcagctgccgctgagctccaggcttctgggggtccgcggcacccagtgtgtctgttggtgttgggaatggcgggatccgggaaaaccacttttgtacaggtgacgtacacagcatgggtgtagtaggggagcgcaaaaggttgcctccggcaggcggaaggccaggaagaaagggagggaagaggatttggagggtaccggcgcatggctttcgggggcttcccatcaactttagttccttccccggcaaagcctcctcgggccctagccaggttaattaaggctctcttctgcgcaccttcagggcatactcggtccagcttaccacgttgtacaggaattgtcttgctgataaaattgcgtttctcggaggcaagttacaagtaactttaaagattaatacagtgctagcacacaggttttggtgaagatttgccaaatatttcttgcacgcctgtcatgttccattcactggggatatagcgaaaatgaggttgacaagattcattcgtggggccaaatatttaatggaggagatagagaaaacccacatacgaagaatcaaaacaagtaaacaagtgactacgagtaggggaagctttgttagatgggtgatgaagaaaggtagcatttgaactgagagttgtatcttggaggtggacatggtggatatttcaggtagaagaaaatctaagtgcaatattcttaaggcatgggtgttaaaggaatggaagttctctcttgtcccctctttgtctccttccaaccctctccccatatctctgcagaggctcacaggacacctgcatgcccaaggcactccaccgtatgtgatcaacctggatccagcagtacatgaagttccctttcctgccaatattggtgagtaaaccagtaacataacttgtgtgcagtgctttaaagagaatggaaaaggccaggcgtggtggctcacggctgtaatctcagcactttgggaggccgaggcaggtagatcacgaggtcaggagttcaagaccagcctggccaagatggtgaaactccatctctactaaaaatacaaaaaattagccaggcacggtggcaggcacctgtaattccagctactcgggaggctgaggcaggagagttgcttgaacccgggtggcagaggttgcagtgagccaagatcgtgccactgcactccagcctggtcaatagagtgagactctgtaaagcctccagcctgccagtcttcagtgccttcttttttcatgttttctaaactatctactttcatttcctttggatttgcttgcattcctaaacagcttaggtttttttttttttttttttttttttagacagagtctctgtcacccaggccagagtgcagtggcgtgattcacaggtcactgcagcctcaacatcccaggctcaagtgatcctcccacctcagcctcctgccgctatgctgggctagttttgttttgtttggagagacaaggcctctctatgttgcccaggctggtcttgaactcctgggctcaagtaatcctcctgccttggcctcccaaagtgctgggattataggtgtgagccactgtgcccagcctaactccttttaaaaaatcatgtctgcattgccattgtgttgcctttgtcagtaataggcaattagtaagaagcattttttcccccttgatttttgcctccctttttctaggcatgtttaagttgcatgaaactttgcactttgtggagacaaaactctttgccacaactttagagctcctagccctaacattcttcatgatttacttggcattt

SEQ ID NO: 2705 - DNA, 4001 bp, Homo sapiens
atttaggcactgattatgacttccttgcagtctctgcctcgcctggattaaggactccagataccactgttcctgctgcagctgctgcttcctgttttctaagtggctttgagtagccgttagtttctgggcttgctcaattagctgcagtaattccttcttgaactgctggttctctctgttgatgccacaggagtattcaaaaataaaccgctttgctgccaacttcaaggcctgggccttcatattaagctctcttctttttctctttcccagtagcctcctgtctggctcgctcagttgtttctccagtaatcttttctcctggaggagctgggcctgtacttcccgtgtctttgaagctgtctcagcttggactttctttgtctcctcctgtaatgtctgtatttctttctcctgcttttcctttaatatagcaatgtccctcattgcctgcaacttccgcttcaaactggattggatattttccttttgcaagagcgctgttttaagcactgaaatttgttctgcatatctggaggctgattcttgtcttcttcgttcaatctctccacttttttgtaaatagctgttccataccttctcaggttgctctgtgtactcttcagttttgttagtcaggtattccagaaagaatctgttttcagcctggacaagtaacttttctcggtgtagctccctggattcctccagtagctgtttccgctgggtttgagcttgttttatatgcttgttcagatccgtcatttccgccactatcttttctttaagccttgtctctacctttgttagcttctctggcttgacaaaattatttattagactatgatacggtggaaggagccttctggggccctcagcaaacctgaaagaacaaacgagacattcctctgtcagttaatgaaactttaggaagtaagtgcacaactgtccttcattcatacaagagaatatttctgagcaccagaatgttccagacattatgcaaggtgtggggaatccagctagtggtaaaggatgaggaatgtagctcgtcatttacaacgtgcattcactacaaccctgggaggtattacctcagttttaaaaaaggagaaaacaggttcagagagtttaagtgacttgcccatgactcacaccactagcaagtggcagagcctgggtattaaagccagatcttatgacttactgaacactgtttgcagctacaaagggtcacagaaacagactgggtggtcaggagtagaaataattttctaggctctttcatcatctttcctgagtttctgagggaccttcagtgactggaggggaggaagctcccctccagtacctacttgcacctggaatccaagcattcatcctgaaggtcacggcaactgtgtagttcactgagggtgactgccaaggaatgagcgctagcatcaggaacctgcgtctgcaactcgcgggaacaatgtgcaagtgtggaaagctcccgtagtttattcgttcggtgctcaaagggtctcggtgctgcccagcaaccctggagactgcaccctgctccagtcccggctggtccagccctgaactgtttaaccgcctcggctaccgaataagcccgagcagccggtcctccagtggctccgctccccgttctctgtgggctcaaaatgacaggcatgctcctcgttttcttgctgtgtgagccctgccctcgggaccccatctcttctggccttcctccgggagacaaaagccctcccaggctgcagagatcagcgcccttttcctagctcccttcagccttcctctcgcttgctcagcgcccccacttcctcgccactgtcactagttgactcatcagccctgcccgacgctaagaagatgccctggcaaccgccgcgcccctcacccgctcctttctgacgctgtggtggttttcgttcgcagcccagaacattgcggaagtttctctacccatgcggtgtctctatggtcgggtgggtggggccaggaggaagatggcggcgtccgcagctgccgctgagctccaggcttctgggggtccgcggcacccagtgtgtctgttggtgttgggaatggcgggatccgggaaaaccacttttgtacaggtgacgtacacagcatgggtgtagtaggggagcgcaaaaggttgcctccggcaggcggaaggccaggaagaaagggagggaagaggatttggagggtaccggcgcatggctttcgggggcttcccatcaactttagttccttccccggcaaagcctcctcgggccctagccaggttaattaaggctctcttctgcgcaccttcagggcatactcggtccagcttaccacgttgtacaggaattgtcttgctgataaaattgcgtttctcggaggcaagttacaagtaactttaaagattaatacagtgctagcacacaggttttggtgaagatttgccaaatatttcttgcacgcctgtcatgttccattcactggggatatagcgaaaatgaggttgacaagattcattcgtggggccaaatatttaatggaggagatagagaaaacccacatacgaagaatcaaaacaagtaaacaagtgactacgagtaggggaagctttgttagatgggtgatgaagaaaggtagcatttgaactgagagttgtatcttggaggtggacatggtggatatttcaggtagaagaaaatctaagtgcaatattcttaaggcatgggtgttaaaggaatggaagttctctcttgtcccctctttgtctccttccaaccctctccccatatctctgcagaggctcacaggacacctgcatgcccaaggcactccaccgtatgtgatcaacctggatccagcagtacatgaagttccctttcctgccaatattggtgagtaaaccagtaacataacttgtgtgcagtgctttaaagagaatggaaaaggccaggcgtggtggctcacggctgtaatctcagcactttgggaggccgaggcaggtagatcacgaggtcaggagttcaagaccagcctggccaagatggtgaaactccatctctactaaaaatacaaaaaattagccaggcacggtggcaggcacctgtaattccagctactcgggaggctgaggcaggagagttgcttgaacccgggtggcagaggttgcagtgagccaagatcgtgccactgcactccagcctggtcaatagagtgagactctgtaaagcctccagcctgccagtcttcagtgccttcttttttcatgttttctaaactatctactttcatttcctttggatttgcttgcattcctaaacagcttaggtttttttttttttttttttttttttagacagagtctctgtcacccaggccagagtgcagtggcgtgattcacaggtcactgcagcctcaacatcccaggctcaagtgatcctcccacctcagcctcctgccgctatgctgggctagttttgttttgtttggagagacaaggcctctctatgttgcccaggctggtcttgaactcctgggctcaagtaatcctcctgccttggcctcccaaagtgctgggattataggtgtgagccactgtgcccagcctaactccttttaaaaaatcatgtctgcattgccattgtgttgcctttgtcagtaataggcaattagtaagaagcattttttcccccttgatttttgcctccctttttctaggcatgtttaagttgcatgaaactttgcactttgtggagacaaaactctttgccacaactttagagctcctagccctaacattcttcatgatttacttggcatttattctttgtaaggaaggaaaccagtgtgaaagtggaggtggtagaagagaatgctgacaggagaaggctagaaggccagttttactttcctggtggtagggaatgtgtatgtattacattccagttaattcttttttttctcctcagatattc

SEQ ID NO: 2706 - DNA, 4001 bp, Homo sapiens
tttaaaatcttctctctcaaatttttttttctttttttttctttgagacggagtctcgctctgtcacccaggctggagtgcagtggcgcaatctcggctcactgcaagctccgtctcccgggttcaccccattctcctgcctcagcctcctgagtagccgggactacaggagcccgccaccacacccggctaattttttgtattttttttagtagagacggggtttcaccgtgttagctaggatggtctccatctcctgacctcgtgatccgcccgcctcgcctcccaaagtgctgggattacaggcgtgagccaccgcgcgcagcctatttttttcttttttgagactgagtttcgctcttgttgcccaggctggagtgtagtggcgccatctcggctcactgcaacctctgcctcccgggttcaaccgattctcctgcctcagccttcccagcagttgggattacaggcgcccgccaccatgctcggctaattttttgtatctttagtagagacgggatttcactatgttggcctgagtggtctcgaactcctgacctcaggtgattcgcctgcctcggcctcccaaagtgctgggattacaggcgtgagccaccgcgcccagcctcaaattaaatttttgaaacccccaaatatacaaaataccggcttacctggggaggttagagttcttctcttatacttagactgataaaaatttgaaaaatcatactaaaaaaaaaaagaaaagatttaatttgtatactaaaaatcaatttactgtctcaaaatatttccccacaaattatgtattaattacaaaggttagagtggagaaatcttgtagacaccatcttaaccaagtgatcaaaactaatatcatcaataatgtgacaaaccaacgtcatgttcctccccacagcaggccacacatcactcatctcatgctcctgccaaaaatgcataatcaatctaacgaagaagcatctataagataaacccaaacggagaaacaatccaataaataattcttacacttctcaaaaaaaaaacaaccttacagaaaacaaaggctgtgaacctgttccagattaaaggcaacaaaaaggacaatcaaatacaatcaatgctcgttcttgggtcggatctgcactaggaaaaaattttcctataaaaggttttatcgagataattgctgaaatttcttatgaactctagattaccaaatattataccaattctaaatttcctgaaaatattactgtggttattaaaagacaacgtccttatgcttaggaaaaatgcacaagttatttctattcagaggtaaaggggcatgatgcctgcaaatcaccctcaaatagttcaaagggaaaaaatgcgtttgtagggagggaaggggagagaacgaatggtaaagccaatgtggcaaaatattaatttgtgaatgcaagtgagggtacaagggaattcttggtaatactgcagcaacttttgagtaagtccgaaattatttcgaaataagccgcttttaaaaagcaattcaattgttttcacaactccactcacatcactgcaaaaaaaagctgaatagcactttctccaacaccacaccatgcccagtataccaggaacacagaggcataggtgaagcggcacccccgcacccccgcagcgcaacgcccgcccctcccgcctgcttccacgaggcccaagccgcagccacggcgggagtgccggggccgggaccagagccgctgcgcgcccccaggccggctgcgcggggcacggagcgggccgccccccagcagcaggagcccacccgcggacctcaggcggcggcttcacctcgtcggggcagctgcccccgagtccgtagcggcttttgagactctccactactaaatcctgccccggtggcttgacgaccctcggctccatagcacacagcaaccgtaccagtctccccgggaaccgcgttcatcaaacccgcggcgctacgcggccgcagtgcgtcacgacgtgccagaccccgcccccccgaggcacgcacggcggcagggaaagggcggggcggggcgacccggagactgcagcccggcttgtcagcgcgtcctccaagtttctcgtgctagcactacacacctcgtaactgagtagtattgcatctccccgcgatagtcctgccccggctgcctgggtgccacgggttgaggggcaccgaggccccgcacctgcctgcagcgctccgctccagctccatttaacctgttaagtttggtgtgcgttgcgctcaccacatagaccggtcgttccatcagaagtgacctttgctaactgccatataaaagaaaaaccaagagtatatctgagccgggagtggtggcgcgcgtgtagtcccggctgctaaggaggctgaggcgggagcattgctttgagcctgagagttacatctatcttgggtaacatagcaagactcccatctcttaaagttaaaaaaaaaaaaaaaaagggaaagctgagcatagacattgcagattacctcactttccctgtgttccatatggggtataacagggtattaaaaagaatagttagaatgtaagcaccctggaaaaaaaactttttttttttgaaaagaaaaaagcttttgccaatacctacaacagtgctaaccatagtacatagtatacatcaacctgaaaacctatgttaaacaaaactgactgaggggaactgtacaaccacttcatttttctcattcataaaattacagtggtgtaatcttttactttctaaattgtgactgtcagctgcatctctggactaacaactcctaaattctctggattaaagttcccaaatgcccaagttttataaaatctgtacttcagcagttattatctgaaaattacttaggccatactttttgccataaagtaccacttaagatgtacaaataatgaattttattctatctttaagcagattttaatgagacaacataaaatccagtttaaaaggaaagatacatattatcgtgggtttagaccacatcagtgattaaataacaaagagaaatcaaagtcctttcctgaaatgtgacacaaagactttctcataaatgccacaagccacttttaagcatctttggaatactaatacgggaaaagtcagtttacatgtcattttgtcaaatttttggtcaaagtttttaaagctttttaatttgtaactttagtgctttaggaaagcatacaaatctgtaaaaagtctcttaaaaagcacttgcattaacttaagaatttattctaaaatcatgacgaaggcatcaactgtctcagctgaaaagttacaacacactttacatcagtttatattacatagatttccaaataagccaatttgaaatatttagtgtaaacatatgtaatccatggttcaagactgaactgatacatttggagtaggtttatttcaagtatctggctttgtggccgagtggaatggtgatggtataccatcactcattactcgcacaacatccctcccctcttttgactggtggttgaacagttacttgctttaggatacccaatttccaaatccccatgtaacagggaataaacctgtctttcctcactaaataaaatgaggtaatttcacccgaaagaacacagatgggtggaagacagtcaatattcataattgcaatatacaaaattttgtgttctacctggattctttgtagttccatattgagtaggccaataagaacatcctcttttctttagcaatttgcctaacatttgatacaagccatttccaaatacgtttttggtgtgtatcaaacttgagaaactaggagctctggaaattatgcagcagtttgaatttactgcctttaaattgtcttccttactttagaatgaacccgaagcgtaagtaatgaattttttggatgtcagtggctcttaggaattgtcattttatttctgcta

SEQ ID NO: 2707 - DNA, 4001 bp, Homo sapiens
gggctggcactcgggggtgtaaaggaggcgagttcgctggcacttaccaagttataaataaaaggctatgcacaatggtaccttctctaaggacagacagtctttacaacactcctggcgtcatatcctgctggggacacttcagctcctagccaagacttcgttccttttatttttccagcagtttagtctgaatgccataataaattcctgagaacaaacgctgaacccgggcaaaactttaacatacagacacatctctgtcgacgcatcggggatctatatgtagagatttagaaccgcagcttgccagagcggtttttacaccaagaagaggagccaggtttttttctgcaccctcccccatacccccagccttcaactaacgagtgcttgggcctagcgacggctgcctgtgcttcacattagccccgcttgcggacggagaagacaaaagaacatcagcgcaccctggactcctcccaggaggagccccatcgggaggaccccttaacaagcctaggccaaggggcactgaccacaggaaggaaagctaaatatgtctggggccccagatgccttcttattggaattgtgccccctccagtggcagtaagccaagagaaatgagagcgagacctacaggtagaaaaaatgagacatagagagagacacaggaaatcacaagaggaatagaggctgagcgagacacacacacagaggcacagaaagagacagagagggaaatagaaagtcaaggaaagagtgatcagagaaagacacacacacacacacacacacacacacacacacacacacacacacacacagagtgacacagacagagagacagagacagagagacaggaacttctccgccctcagcaactgccatctccctggggctgtctctctcagtttccaccgggccaaccttctctcctgggcaaggggcgcagcgcgggtccccctcggggccagcagaggcctcggcaccaccagagatgggaagagaaagtggtcgctgttgcccaatcagcgcgtgtctccgccacccgggacggtctacccgtcggccaatcgcagctcagggctcctgaccaagctttgggtaaaagaactaataaatgctcccgagcccggatccccgcactcggtgtcaccacaggaggagactcaggcaggccgcgctccagcctcaccaggctccccggctcgccgtggctctctgagcccccttttcagggaccccagtcgctggaacatttgcccagactcgtaccaaacttttccgccctgggctcgggatcctggactccggggcctccccgtcctcccctttcccgggttccagctccggcctctggactaggaaccgacagcccccctccccgcgtccctccctctctctccagccgttttggggaggggctctccacgctccggatagttcccgagggtcatccgcgccgcactcgcctttccgtttcgccttcacctggatataatttccgagcgaagctgcccccaggatgaccacgctggccggcgctgtgcccaggatgatgcggccgggcccggggcagaactacccgcgtagcgggttcccgctggaaggtaagggagggcctcagcgcgccgcctggatcccagggcctgggaccggctgcctcaccccatccccaggctccgcaggctcctttggtgcttccaggaagcccattccctgggcaccccacaccccaagaagcaccagtcgggggcgaggacctactcgatttcctttctgcaaatggagcgcgctgctctctgcaaatcctggcggagctgggcggtcaggcctgcggcgagccggggagacttgtccctgttgttttggaaatgccgcggtggagaaggaggtgaaccggcttctgagcggcagaagcaacttctccgcaatttgtccattcgaaattgtctcgaagttgtctcgaaattgtcccggctgcgcccacacttgtgaaacatatgttagttcaggaagtatttttttttttttgccctgcaaagttgtggtggctaacgccgcgccattgtgattggaatttttagaataattaaataaattagaattctatgtatctcaaatagcatctagaagtttctataacttgtttaggaatcgcctttccgtccacttgaagattctgggaatcccggggaggcaggaagtcttgcaagcctgagccgttttcaatggttttccaggttagggcgccccagcagagatgctcatcgcccccgccacccactcccttcacacccagcctagagtagaatgtaacacccagagcaagaatgggggctgggggcccaggaacagccctgccgctgctgtggtctctgtcccaagatgtaacaggtgacacaggcactgctgcttgggcctcctttctggaccctctttgacccttggctgctgcacttttggctagaaaccccaagggctatcagctggcccaagtcccttagaaagggagagatcccaattggacagggatcggtgggagcagagttcatcaaggccagctcctgggtgaacttctcttcgccaggaggctgtttctagagcaagctagactctctaccagctgcagggtctcctaagttgccactccccgggcccgaaggggaagacgctttctctggggagaattattttgccccatttgctgtctttacacaagattacatgcgctatattgctgaataatttgaacaaatgtgattgaaaggaggtctgggtctgggagtccgatgtcgagcagtttcagcgtcggtgctgtaacatgaggataggacagaagactgcgaaattacgtgctgctgttctttgctttttattttcctccagtgacttttcccttgcttctctttttcaccttcccacagtgtccactcccctcggccagggccgcgtcaaccagctcggcggtgtttttatcaacggcaggccgctgcccaaccacatccgccacaagatcgtggagatggcccaccacggcatccggccctgcgtcatctcgcgccagctgcgcgtgtcccacggctgcgtctccaagatcctgtgcaggtaccaggagactggctccatacgtcctggtgccatcggcggcagcaagcccaaggtgagcgggcgggccttgccctcctggctcccagactgtggtcccctgtgttggggaagaccgggcggggggtaacggctgacatctggggctctccaatgagttatttctgaggtttgtgaaggtgcgtaaaggcgcgcgtgtgtgtgtgtacgtgtgcacgcgccctggacacttcttgatgaacacttagggaaagctcttgcctttttgcaaaggaaaaataacatctgttttttaaagcccataagccttgcaatcctcatcaaattattttaatggataaacacctaaagcaggcaagctctatgtgcccacctgttgccgatttcttccctaagtgtcttcccggctcccacccatggcaccgtcctttccaaaacgaatgtaaggaacttctttaggttttataatggtttgtctcccaaaccccgccctcagtctcccccagtgcaaattgttttcaatgagtcaaatactagggtgatcagttttctttgtaataagccaatgactccattaaaaaaaaataagcagtttggtgctatccttaaattatttttggttctgtttttaaaaagaaagagtcacaccagctagggctgagtgggagggaattacacaaggtctgtcttttcttctagttgccaccgggcaaaatcaagagggttatggtaaaccgaagacctccaaacaccctcctcttccttcccacctactgaaacactttcacagcctttctaagaatctttggaaccttcttcttctttttaaaaaatatatattgggggtagagagaagagtcagtctctcttaattaatatttgttat

SEQ ID NO: 2708 - DNA, 4001 bp, Homo sapiens
ccacacaagatttacactgctctaagatataatttgtcattgcatttcctgaggaattgcttttctaagaagcaacaactcattaagcaaaatgaaccactaacacgcatacgcatgtagatacctgaattactaaagagaaattagaaaaatgtatttctattttagaatatattcagtcccctgagacagtttggacagtcactataaatcacacacaggcacttccattccattaaggtggactttatactctgaattgcttggggtgtattttgtatggagatggcagtaaggtaagagggctgaggagagggtagtgggggaacattcttagaaacacaattcagttaaaataagagtttccagtgtaattttccagtgtaatttccagtgtaatttttttgtgttcaatctacctctgattcttctgtaatttatcctctaatattattcctcatcctgctccaagaatgttcatatttgaggaaatggaaagttaactttttgaaaaatagtgagtttgcctcttttccctcattgctgaaatctgcagttaactcaaagtatcattaatcccgtgcaaatgatctgtttgccctacttctgcatcaggcttcttttcatctcctctctgggactctgaaaagatgggagggtgaggaagtcagcagaggcctggttcctgtgggagagaagtctcacaacaccagaaaatccacctcggcaggaatactttccattctgtccttctatagtgaactgttttgctcagtatcaagtgctcttttcctggtatgaattttcacattaccataaaattcacagcaattaagttaaagtaaacatggcttgctgtccatgctctaacaaaaggccagaaaagtcattcaattaaacctggtggggacctgaaagtaactggtttgtgaccatcagcttgtttgccagctttcccttcattaaacactgaattatttaggtggaatatcatctaaagcccaagcctagtgcttgaaagcttttttttacagggcatttccatggagaataaaatcatggagttcttcttcagcctaaagatgtgtggtcatctttgcaaatgggcaaatgggttgtcataaaacatgcagtaattgtaaaccctaagtggcttctacttcctgctgttaagagcaaatttgacacaaagcttttgtacctttccttgcatggtcttcgttactggacaaggatttagtagtttctttaccatgtcaaaaccagtgtggcaaagggcacatgtcggagccctttacttggtgttttctgagttccatcgtgcttaaagcagtgccctccccctgtctgtcgggacctgcctcctcccacctccatcacatccactctcaaaaatcacaagcattccacaggtccattggactctttagtcaggcaatcatgaacttccagttaccaatgccttgcttttaaagaccaaattgacagtatatgctagaggttttcttttctttatttttctttcttttctttttttttttttttttaaatcaagctgctatagatgctttctggctgactgaaaggaaagagaatctctggtaactgctgaaacttgtagaggtttctcttagtagcccattttagaaagcagtaagagtgcttgctgcgttgtcttctctatgctgtgtcctgccgattgcatggaatgttctttagggttttcaacacacagctagaagcccacagccgcacagaaaaaaggaagttgttagcttacctttatgacagctataacgattttggagtccccagcctgcacagcaactgaactgactgtcgtcgtagaaagcgcaacactaggacttccttggctggacatggtactttagaaccagagtttatactttgggcagcctctggacagttgtgtgtctgctggtcatttcagaaggccagggttacttggattcattcagggaaagagctcagctcacactgattactctgccaaaaggaaagaacaggaggttaaaaatagacaaccccattgagtttatcgtgagagagaaaggagcgaacgagagagaattgccacgcccctagtatggtgacactaagtgcctgttatttttgctgttatcttaaatgtggaggacagcttcaagctctttccttatcagctgatgtttgataacaaatggaaaaaaaaattacatcctgacaacccaaattagttttgccaccgaaactatgccattgtaaccatggactttgaaacaagtaagtctttgacctggttatcaatcttttcaagatttttgaaatctctctgatgcaaagagaactaccaaagtgtactttaaaaaagttttggtatttgtcttggggttaagtcacaaattgcttaaaacacatttttagattaatctgcttttctaaaacttactgttctttgctaaatgaagtttagatggaatagccacattttctcagagcctcagatttcttaggaatttttaaaaaatatttcaaccagcatttataaataggtgcctatcatttcagattttctttgtgactattctgctccattggacaaggttttcaagttcagttattaataccatgagaaagcaaaatactttgctgttaccttttaattgcagcaagaaaatgttttctgtgtggttaaaagttattaagacatatattttgctgcaattaaaaacaaaaacaaaaaggaaagtactgtgcttcaggctttttattccctacccccacctcctgttcaggaaaattatagccagcttcaaatcagtgccccacattggtagattaatcctattgctagaaactcagcctgtgtcacaagttgtctgtggtattaaacagcagctgttggattccctgtcaaagaacagctgaaaataacactaaagtttaggtcagaagtcagatgcaaacatatcagagttactaactccaaagctgctggaagcattggaaatctctgggacaaagccacaacagagaatatagcaaaaaacagttttaatgaatccacttgctctgtaaaccttttagcccaatttaatagtaggttcaggttcagggccaatgtttagaagactgagtcagctccattgctttgttttgctaaggttcatgatcatattcttgattcaaaggggaaaagtacttttacacatacttcagtgttcaattatttttgtttccaagagcatgtcatggctgctctgcagctgtgtagccaccacccatgtcctctgcgctcagcatctgcctgctgccccagtgagatggaaaccatacctagatcctagtccctatgcaacacgaacttcacctgaccccatgaagggaacaattggagcgagctcaggaaagcagatgccgagcaagctatgatgtagcaactattgcaaatggtttcattttatggcagggctggagagcttgcaaagaggtaactgacctggaaggttgcaggcaggctccttctttcacttgcatctgtgtgaagagaccaccaaacaggctttgtgtgagcaataaagctgtttatttcacctgggtgcaggtgggctgagtctgagaagagagtcagcgaaaggagataggggtggggccgttttatgggatttgggtaagtaaaggaaaaaggggggttgttctctggcaggcaggagtgggggggtcacaaggtgctcagtaggggagcttttgagccaggatgagccaggagaaggaatttcacaagataatgccatcagttaaggcaggaacaggctattttcatttcttttgtggtggaatgtcatcagttaaggcaggaactggccatctggatgtgtacacaggtcacaggggatatgatggcttagcttgggctcagaggcctgacattcctttcttatattaataagaaaaataaaacgaaatagtggtaaagtgttgggacggtgaaaattttgggg

SEQ ID NO: 2709 - DNA, 4001 bp, Homo sapiens
tggcagaaaatccgtcgtaacctgggctctcgaagggcatccaagagaggaggaaagagctgctgcaaaagttcagcagtgccagaggatgtgggaaggctgctctgacccccaagagctgatcccaaggcctggcagaaacctgaggatgagagagtatagtgtggtggggaagcggtaacctgggacttatgtcacccccagtgccccttccttctcaccttggtcccagctccagataagcgactgatgaagtagtctgtgacacaaagatgccagctccttctcacactcctgaggcagggatgctagtgggagaaatgactctggggcctgaaaacaaggtctcactttccacaacccctgcccactcaatgatgaggcaagaaggcatgcttcctccaagactcgggactggggtggaaagcaagactttgccttgaaagctcagaagctatagtctgaacccaggggtgttctttctaaagggcctgcttttgccttcaggatggcaggtcagtgagttggccaaggggaaggaagagaccccagccttcccaaacgcccacccaagcccatcactcaccctgacccagtgcctgactcagctgttgcgctgttgccctggggtccctccagggtcccagatttaggtccagactctgagcacaggctgcccacagcagggtccagtattggctccacaaggccccagcccctccgagccctagtccacagctggctgaacccgccacgcccccgaccaggcccagcagccctggtagcagatccccctcctcttggcaccgcctgcggagctggtccctcaacgccgatccttggagcgcctcgtccagccgacttgccacctggcaaccccgctcccccgtcaagaggcggagcacacgggacgtggggaaaggacgtgcggcccctgggacgtggctcaaggcttttctctgtagtgtgtggtaggcgggaagtgcaaagagcagctcggcgagttgggacgacaggcccgggctggcgggctcccggccgagagcgcgaagctgcatctcgatgacagcctccaggcactgggcggctagtccgatggggcgcgctagcagcagcggctcgagagtctccccagggccgattcgcagaaccgccccttgggaagggtgcagctgcaggtcgcggcaccactggggcaaggggctagggccgccggatggcgagccaggactcagggtcttcatgagtcgcacagccgactgtaggtggtaggcgcagtctcgggcctggaggagctgctcccgctcgcgatgcagccgcagcaacaccgcccggagacgctgcagcgcgggagggatcgggccgccacctgcgggcccccgcctccaggccgcagcatcagcctcgtagtcctcgctcacatccgccggcgtcggccaccacggcgtccctccagaagttccgctcggccagcagtgaacctcccagcgaagaccgcccgttcgacttctctcccactgctcctccccagtgcccccgggttgcgccctcagcgggggcacgataacgagtggaggcaggctacctgagcgagacgcctgggccatggggcggcgggtccagaacgaacctaacgattcccacttccctgcacggaccaacgcccgccgcagctcggacttcgccccatcgcaagagccgttttctccagtccgggagtcgcggggaccttcatggactctctcgtgctccgtaatgggaggcttctgcccctaacaaacatggccgcccactctgtcccaccccgccctttggctggtatcaaatactagactacctttcatttccgggtcactgtagatgcgatggcgccgattccaaagactgtggggcggatcaagctaggtgagcggtatgacaagaccagtgggggtctaggagggcagaggcagcccctcttgggtccacctgtggtctgaacgtttcgagtaggattttatgcagagggcggagagtcgagggtagagtggggaggactctagcccatctgtcccgagcccgctgacgaggctccgccttcctttcctgtagactgctctctacggcccagctgcccactggaggtcgctgctgcacccaaactttgcaaggaattcggtccagaggattacggcgaagaggtaaaagcgaccctcagtttcccccagtcctgctcattttggtcacgcctctttgaagtcagctgtgcagaaacccgcgacggatgggcgccagacggggctctggaggctttggggagttgtagtctccggccatgcccttgaggatcttaggcaagtgaggggcaggggatcaggaggatgatcctgatgtaacagatgctcgaagtgggtagaattgagcagacaagggtctctgagttgaggattagggagtgggtacgagttccttgggaaaagatggaggccgggcgcggtggcttgtgcctgtaatctcaacactttgggaggctgagacgggaggattgcttgagcccaggagttagagaccagcctgggcaacatagtgagaccccatctctacaaaaatgtttttaaaaaatttagcccgcgtggtgggtgggggatctcttgagcgcgggaggtcaaggtttcagtgaaccatgatcgtgccactgcactccagcctggggaacggtgagactctgtctaaaaaaaaaaaaaagctgggcccagtggctcacacctgtaatctcagcactttgggaggcctaggggggcggatcacttgaggtcgggagttcgagaccagcctggccaacatggtgaaacgccatctctaccaaaaatacgaaaaactagctgggcgtggtggtgtgcgcctgtaatcccagtcactggggttactgaggcaggagaatcgcttgaacccgggaggcagaggttgcagtgagccaagatcacaccactgcactccagcctgggcaacagagggagactccatttcaaaaaaaaaatgaaaaaatatctttttatagatggaggggacagtgtgagcaaagacagtaaaacaaggaaaagttgagagaactttaccaaagtgagaccagagtagagaatctggttggaacagtaaaagatggggtgggagagaaggcagcagatggcttgaaaggctttgacttagcacaggggtttggatgttctcaagtaggcaacagagtttttttgttttttgtttttttttaagatggagtctcactctgtcgcccaggctggagtgcagtggtgtgatcttggctcactgcaacctccgcctctctggttcaagcaattcttctgcctcagcctcctgagtagctgggactacaggcacatgccaccagtcccagctaatttttgtatttttagtagagactgggtttcaccatgttggccagcatggtctcgatctcttgacctcgtgatccgcccgccttggcctcccagagtgctgggattgcaggtgtgagccaccatgcccggtagacagcagggttttcgaaggagggacaggatcagatttggaagcattgaggcgctatactccctagaatctcaaactcaaacccaaaagttaatttaattaacttttgttaaattaatttatcatgtttgtaaattggttgcttttcttctaatcccaattttggttaataacacaaactttcatctagttgtttaatctggaaatctgataatcattttatatccctttcttttacctcaaacatttagttagtcactaaaatttacttttttttttttttttttttgagacagagtctcacactgtcgcccaggctggagtgcagtggcgccatctctactcactgcaacctcctcctcccggattcaggcaattttcctgccacagcctactgagtagctaagatggcagacacccaccaccacgcccagctaatttttgtatttttagtagagaggggtttcaccatattg

SEQ ID NO: 2710 - DNA, 4001 bp, Homo sapiens
atgaagtgattctttaaccttgtctagcaatgcttagtagcgcaggagcaagttcaaaagaaacctttcaactaaatacaaaaataaacaaaaaaattaatgttgagtggcaacttatttcaggggacattattcatggtggatttcagtaacattttaattatgacaaacacgaaatctacaatatcaaaatagtcatctgagaaaaacacccacacaaaaagattattggagtaataatcttttattttcttctttctatgctagcctaaggcaagagaaaagacccattttttctttccattagacacaactttcattcatttgatgttattgaaatttaaaagaagcaaaatcattggtatcttttcattaaacatgtgtctcatataacaatttgtggtttactttttctgttctataaacaaaaacacacattaaaaagccggaagaagtaaaaaacagcctatttccatgatggccagccatggcacagcacttcctggcccctgctgatcccttctcaattctgaaaatatttagggggaacatacacacgttcacctgttttgttccacagtcctaccctgtgtaggactgtcaactgagttcacattttactacaaatgtggagaggtttttttttttccaatcaaggcaccatattaacatttcttaggttacatctttgtaatcttcaattatagtaagataaaaaccagtagcaaagcatatcacccaacttaaaattcagaacaatacttagacatatgcagcttgcacacacattaacctgtttctcccaacaaaatatttgtaatttccaaaatcctatcagctttttcacacaatatggtccctccaatttgaggggtagtaacatagtctccttactaaagagattagtctaaaaaaagtaaaatcgccaaaagaatgtaagaatatcagtggctataggctagagcaatatcatcttttaaagcctaatatgttcatgaaatctcactttaagaaggtgatatctaaacataaaatttattgacaaaaaacaattagtattgataaaccaccacaaaatgattttaaatgaaagtagaagacattattaaagctcaagatttttgcgtgtactgatttcatgcctcaggttatttccatatcaaatttaaagagatactggaaaatagaaaacaaaatccatcaactgtaatccatttcccttactcttttgtgaaatcatcacaaggtgtgaaggattgtttctgtttcctctatctttaacaagcctgtaacctctcaagtgaaagaacatgcacctgtcaagctcatagtgcgggatgtacacacagatgtgtttaataaatatctgcccacagggagattagaggtttgctttgagaatcagggaacaggctagctcatgtgttgacgctttggcatctatcatacaatccgccacctcgttcccttaccaaaatatcctcaaaggaaatcctctttgagtctttcagaagagttatgagtttgaggacccaaaacgttgaggaaagatccaccccagggaagggggagtggctgcagagaacaaacataagtaggatttaggtggctcagtgacgtcaggaggaagcagcgatggaagggatggggtgcaaactcacctggagaagcagaagctgcacacatgtcaaaggtcaaagggcatagcctcagggactccccaaacgcaggaaaagtgaaacgcccactcctgggctctcgccgtcaggggtacatctaagggctcagctgttcctacctttgacgccagggacaaaccctaccaggcacagttgggattggcagtaaggcaaggaaagcctgccccagatttcagagccagcgctggggaatctccctgtcctctccgccaccccctcccgcgcccgagacctgagacaccttctctctcacacccaccctctccaggccctctcgcgctgaacagcatcggtctctatggcgacctgaaaccgcagctcccattggcctgttcaatatgagggccgggccaatggggagggccagccctctccttcccgccaatggggtggcgggagctggcccggggacggcggcgtgctgacgttcccgggagcccggggctggccgggcgggagggctggcagcggggcgggcggcggcggcggcctctgggcagtagagggggctccggggctgagtccgcgtcgacgccggccgcggaggcggcaccatgggcaaggggtagaggggcaagttggccaccgccgccgccgggggtggtgggagagccgctccgggggcgggggccggtgggggagggaggggcgggcagccgcgccgccgcggcacttttttaattttttcgggtgccgcagcggcgacccctcggcgccgatgtccctgatccctggagcgacgacggccgctgcctaagctggaaagtaagtgtgtgggctcgcgggagggcgcggagactcctgcccacgagaccctcggccctcgccccgaacacgcgccagggccaggacctgcgcgccgggggccgggggcctccctcccgctgccgcgtccccagcgcctcgcggccgccgcggctttcctgccccgcctcgtgttcctgcccgcactcgcctgctgctcccctccccccggcaggcgcacaagtttcaccctccatttgcttttcccggcgattcctctccccggtctcccgtacgcgcagcgcacgacctctgcccacgctgggctgttcggattcagagctcccagccccgaacttgagcgccgcgctgagccctgctggacgccctcgcggcggcttccccgctgcctgccgccgcgcgccccaagtcgccctcgacaccactgggcgcccgccctcctcagcactcggggccggctgtctgtccttctagccccagatcctgcaccttggtcccctccccgtcttcccacgcccctgctgcccgcgcggtcttgcgtttgtccccgaagtcctgtactccttgccggtcctgcccacccctctgcctagtgcgcccctctctaccggccgcggatcctcacgctccacccctcccggctccccagcgccgagcctcgccgctgccctcctgcgccgccgcttcctcctctccctgccaggagttgaagcggagctgcggcacctccctggcggatctggtatccccgcccgctgccgaggctgccggccctctcccctggaccgctacccggagagcgagcggcggggccgggatttggctgcgtgttggctgagtgcgacacaccgcgagcgcgggcagtggaggtgccgcggcggccgtggccgctcggggcgcagcggtagtcaggtgtgtgtgtacagcgggggacgcgcgctgccggctcctgggctggcgacagattgtgcaggaatgcgaggaatgcaccaggggcagagtccacacagcccgccgcggctgccctagcgccttccctccccagctctcgccgcgcagccagaggtcaccggagcatcttcggagctggtgagcctcattccactcctctcctcccatagcttccctccatgcggcagaggggaagcgcggtaattctttggggctccagctagcctttcgtctgggtttttgctgcattggtcttcaggaccgtgaatttggggccgatgactgtgtagccaaggttattgatcattgcacagggctgttggcaagtttggtgtgcaaggtttggatagtgcctggttttcactagggttttctgaaaaccagcagaaacagggggcctgaaggttgttagagtaatgagcttgcagccaacatattttagctctatcaaaaaatgcctgttagtgctcacgggcatgtactgcgagagagatcttgaatgcatcactttggtatcctaagaagtgtaatttttttccctcgtcatactgggctgtgtttagacctcgtataatacataatgaa

SEQ ID NO: 2711 - DNA, 4001 bp, Homo sapiens
gcttatattccagctgaagaagacagacactaagtaaaatacatagtttgtttattggtgataagtgcaaaggaggaaaatgaaataggaaagaacatggtatggaggctacagggcagattttcattttaaacagggtggtcaaagaaggcctcataacatttgagcaaagacctgttatatagatatcagagggcagaaaggcccagaagacggaaacagcaagtgcaaaggcctgaagttagaaggtctgatgagtccgcacataataaagaggtgggtttggctggagaggaaggagtaacacagagaacattgagagatgaggtcagacggtaataataaaaccagaatacggctgggcgcggtggctcacgcctgtaatcccagcactttggaaggccgaggcgggcagatcaagaggtcaggagatcgagaccatcctggctaacacggcgaaaccccgtctcactaaaaatacaaaaataaaaataaaaaaaaaattagccgggcgtggtggcgtgctcctgtagtttcagctactcggatggctgaggcaggagaatggtgtgaacccaggaggcggagcttgcagtgagctgagactgctgcactccagcctgggcgacagagcgagactccgtttcaaaaaaacaaaaaacagaatacacagagccttgaaggccattgtagaagtctggcttttgctgtcagtgattctcagagtcactggaggtctatagctgaggaatgctatccaactttccttttaactggatcattttgactccctcccactccaaatggtggaagaacaaaagcagaagtagagatgctgctggccagaaccaaggtgacagcagcggtattcctactgtaagaagtggttagtggttagatatacttgaaagatagcttttgctgatgcattagatatgagatatgagggaaaggaagaagccaagattactacagggtttttggcctggatggtgctatcactgagacaatgcaaacttattaaggaagaatccgttttgtggaaaagataaagagtagtttttaaaatgtcaaatttaaaacatgaaagataccaaatacattattgaatttgtggatctgaagtttgggggtgaggtgtggactggagactaatttctgaagagctcaagaaaaccataaggcgggataacagagaacacaaaggattaaaggacctagtcctgagcacgccaagattaacaaattagaagcatgtgttggggggcatttaagacggactaatacgaacttctctaaagtggggttaaaaatagacatttttctatctttagagcctaatacagtgcctgggaaattataggtggtaaataaacaggagaatacttcgacaggaatttaacgaatgtctattccgttctagcaagagcgccaggtactgcggaaaccgtaaagaacaagtgcaaattcctgacacctatattctggtaagcaagccagggaggattaactggtggcaaaaatcaaacattaacgccgaaatagccttcccaggaacctattaaactccaacttaacacataaataaaggtggtattgggcttatctggaggcttcggtggctatctcccatccctcagctggagccaggccaatgcaaacttcgctcctaaatggctttcaccggcagccaacgccaaagcgccttaaatcagggccctgaggtccagggagtgagactggactccgtcaggacagggagagggcgccagggagtggtgactgtccttatctgagccgaagcctcgcgagcctccgaccacccctcaccagcccggggcccggcagcctcaccttacagtccatctgtccgcctgaggctccgtactgcagcaggcgagcgggtttccgtggaactaacacagcattttaaaccaacccgctccccggcgcagtagctccggtacgcaggcgcacccgtggcagggcatgtcgggaactgtagttttcccggcccaggagggccctcagccctgggcgggacccaggccggcatccggcggcgctcagggaatgcgtagcgccgtgaaccgaatggcggcaggctccactgtgctcgcgagcggggcacgccgggatatgtagtttccggcgcctgccctccggggggtcctgtgctgcccacttcacagtgacttgtctccgcctggtgaactcgcggtgttctgctaatcttggtaaatacataccctacagcagagtaacgagcataaaaattggttaaaaattcagagcttaaacattcttctcgttaaaggaaaaatcaagtccctcttcgtcctcgtccatgatggccacatggagagtaaaacacagaaatctgttttcaggtctttcgtctcttcagcataaattatttcttgccctgtctacaagttaataggtatttgtaaatctgagtgtaagtagctatgaaacggaaaagagcattgagctgtccctggtttttttggtggtttgcttttttgagatagggtcttcctctgtcgccaagggtggattacggtggtgcgatctcgactcactgcagcctcgacctcccgagctcaagcgatcctcccatctcagcctccccagtatctgggaccacaggcgcgcgccaccacgtctggctaatttttgtattttttcgtggaggcggggtcatcaccatattgctcaggctggtctctttgggctcgagccatccgcccacctcggcctcccaaagtcctgggattacaggcgtgcatcaccacaccagcgtttctgagttgttttgctttaagaatatgtattctcacttaagggaaagccttctatagtgcaaagacgcggctttgcgttttggtagctggacagaacacctgttatccctgccagggcaattaaaatgcatttctctcttctccctgagagtgcagccaagaatcacttcagccctctcatataagcaatcagatccgagatgagagctcatttacttagcctgacaattgatcttgctattctaattcttttcatagcggagcctcaatgtgagatgcagagactgcccatcaaaccacagccatattcatcaagctttgagccgatccggtgaagagaaatgagcactgcatacattattcagagaaagggaccaaataaagcttttaataggaaatgaaaatgtattttaaagcgtcagtgcaaacagccaattattttcattatgtatgttttatcttgcaatgacctctggtttatcagtggaattaagagatgagtgatacatgtatccacgtgtttttgtgtaatgagagttttcaccttctcctcaaatctccatattaagcagcagtcagggaaccaaactgattaaattcgtgtttttcatttgttttcccttattcactgtctggcaaaccgtataagaacttaagcaattacagagttagagaaaaggacctgaagtcttcaataaacttgaaatcagggagtatagtcctccaactttgtcctttttcaaatttgttttggctgttcctttaactttctagttcctttacctttctcccaaattttttgaatcaacttgttgatacctacaaaaattctgccaggattttgattgaaataatgccaaacataccgattttcttgctgatttccctcttgattttcagttgataaatagttctcagacattaccccatttatcaaacaagatcatttcattcacggaaatcctagatattccatgaagaccacattctgtttcactgcgataacctcctaactggttttcctattaccccttccaaagtatccttcatatggctaccagatcttttaaaaaagtaaatctgattatctcaggtctttgcttaaaaacatttaatcgttcccccattgaacgaaaagttttccattgagcaggatgaagaccaaactggtaatagcttcagccaaaccctcca

SEQ ID NO: 2712 - DNA, 4001 bp, Homo sapiens
aaagagagggcaacaggcgcacgcacacacacacacacacacacacacacacacacacaccacacagagacagagagagagagagagaaagaagagggccaactttcccacttttataatgaacccattccccagataatggcattaatccctttactctgccctcatggcctatcacctctcattagtccctaccttccaacatttttacattggggattaagttcccacacatgcctctgatagctgtgatatttaaaattgccactgaacatttgacaaacatacttggtgagtttgaagtcagactaaataacaataagcctcatgagtgagattttccaaggaactatcaaacatgtcgaataataacagttgtctggctttggagtgggtcaaattctgttttgtcccctctaccagttgctaagtcactatttttcactgtgattactgtggttatctaggctgacacggggctgggagaaaagtataggactatggcaagttaaaatgccaaaaaccttgctgttgttacaaaaatccagctgtttttctttagtaaacactctacaaattgttgcaagcctttggttaatttccagagttctgaaaaagtcgatattgatgatttttgccactgttcttgttgattttatggaggagaggatttcaggcatagatcctatttcaccattctggctgatgtcatcccactaaatctttataaattatttattttactaatagctgcacacatctctgaacctctctccaacttagccttcccctaaaaatggagattaaaatttagcagtgaggctcaggtggaagcttttgagctagttgccacaaaacattatttaacaactattaggtaaatctaaaccaggtagtgcagaaatgcatatgcaggaaagtgaatgtgtgggactaattgtgcttttccaaaactggccatgttggtactgtttctttccttttacatggcaaaagtccgctgctaacctcataaaacctccactgcataaatatccactagtgaagaatgactggctgtcactctgcatctggtgcagggggcactattgctacagaagctcgggcaatgacatgaagatacttcaaattgccaaagttctagttgtcaccatgacaacattaattgctaatttacagacgtaagaaactgttgtagctagaattgatagagttctttagaagtctatttctattccaaaatcaaattgttataacaggtcacctgaattacagtactttatgtcacacgatttttttttaactctctaaaagcatttgacttagagagagaccttatatttactttagagaggaggaaatggagatatttccttcagagacttttagtaaagaccaatcagcaggtttgcagaagagccaagcctctaaagaggtgacttatatttccaagagatattccaattcaatcagtgaataacaaactttaagcgtgcgggaaatttaacaaaacccagactctcagagctgcaactgcgcagttttaggtcagctggggctgggggtgggggtctctgatttcctatcttttctccacccctatttctgtaaacattctcccacccacttccactccccgtttccctccttcacccattcacctgagggcaagacggcctaacttcacacagagcccaaagatgcttattgaggatgctttcgacctggtggagtccatttcaaaaggcaactgaagccctcattcggcatcctcgcctctcactccatgccgggggtccagaaacaatccctgtccctggataggtcagtttagctcacctgtactttccttcgcccgtccacagcgccgtccaaaccgtaccagcatctctgacgaggtgtccatgatgctcctagatctggaaaagtgactgtggcgccaagcgccgcggacgccagccggtggagttgttactcgtaccacgcggttgcttggcaacgccgccggaagtgacgccagccgtagccgaggaacaagggaggtgctgcagttggcggtcgggctagagaagagaggcgcctgcgcttgcgagctgggcttgtgagtggggctgccgagagggcaggcgtggggcgaggccaaaggactgaacccgcaggagcgtcacgggcgccggggcggctgccgacggcgggactgggtcagtgagaagcccgtgggcccccgccctgcctgctactcccatccccacctgcgcgctccccatgggggacgacccccgattgggtccgatgcctaccctcggggtggagccggcaggtgtgtgagcgcgcgaggcctaggcgtggtgtgtgcgtccgcagatctcctcgcgggtggagtgtgaggagcaaagccctcccttaactataaaaacccgcggattcgctgacataaacgctgtttttttaatcctttggtttctgaggcatggtcaggactagatggggccaagttttttaaaaataggaatgttaaaacgtaatgatatgcttagaatatttacgttaggacctttgagatattttaaatttcttggtaaatacatgaccacagaaatctgttaggagtagctgcgcgtttggtttcaaaagatgcttttctaacacattgatgtacagataacttcattactaacaagttggctctgacgtgtacacataatgcaccaaattggagtctctcaaaatgaaagaacaaaaagatttttaataacgaatgttctaacacatagtcgtgctatttttctttaggttttctatcagatgttccacgtaataatgctggtaagtatggaataattaagaaaatatttgaagacagaaattagtttgtgcacatacagcgctggtaggtttttggaactataccttaaaaagtgtcaagaactgggggccaggcgcggtggctcacgcctgtaatcccagcactttgggaggccgaggcgggcggatcacgaggtcaggagatcgagaccatcctggctaacacggtgaaaccctgtctctagcaaaaatacaaaaaaattagccaggcgtggtggcgggcgcctgtagttccaggtactctggaggctgaggcaggagaatggcgtgaacctgggaggcggagcttgcagtgagccgaccatcgtgccactgcactccagcctgggcgacagagcgagactccgtctcaaaaaaaaaaaaagtttcaagaactgggaaggaacagagatttttaccctgtttgcaggctaacttagcctggcagtttcatggaagacacaagactattcatttcaggaatgaattactcccagcagtagccagtaaatcagcaatttcgcctgagttccctaaagccccagttcccacaggataatgcaaagtgggcaagaagtcacctagatgtagtgtgtgtcgaattacaggaaaggagccctgagcttagggaacccagatctttatcatttggacaaataagcatgtttctcaaggctgtccagtgtacaaacatccttgagacaatagtctagaggaaagggcagtcagtaagacatgcagaaccaccagagacgcagggaaaattgtctcccaacaacaattttctggaattttaacaaaattggttacaaaagtattgaatctcatgatttgatgtcagttacttgccaatttgacatggtggtcagatataatttgacttcagactcgagattccagctccaacctgtggattgtcacaaccaagtcaatctagagttatttgtcctatacccaccactcttttatttctttgttgtgaatttaataaggtagcatatgcactctgatctgaaacagagtttaaattattctgagaagaaaaaaattttattacaaaattgatgtagaaaaagtgtgaactacggttgaaccaaccataaccatcccactgcacatgtaaacattttctaaaacaaaaacaggattatactgta

SEQ ID NO: 2713 - DNA, 4001 bp, Homo sapiens
ggcatctgtccaggtcccccagaacctgtacccactgggttggcatacaggggccagtgcagccaggtgggcaaggacagtctggaggggctcccctgggtggcaagagcatcccatcagtcactgaagggcccagttctcacctttcttctgtgatgtctgattcattatgagcttgtaatggagatctgaaagcaagcacacgctctcctcagcacttgtgaaaccacagctattctgagagaagaagcctggcctgtcctctcctggctgctgagcccaaaagtcctgcccccccactggctgattgggccctgccccatggatcccgctctccaccacgccttcgtcgtgggtgtcaggccaggaatggccctgcctgttccctaggcagagcccaccgggcatatcggcctcatccatctgagatgactggagggcatccacactgcccaggcagggcctgggctttaggggtacagaggtgaactccggaacccctggctatggcagtgtcatgatcccgtggggatcagggactgcgggggaggctcaagaagacattaggaactgggcgtcctgaggctcaagaagacatggggaagcggggtcctgacaaaacagacgcctggtgatgggatactcggcactcaggtaaggcagcaccagggaacggggcgggagaggaggccgcgggcactggtgcccttgctggagccctcctgaagcaagatcgaggagcggagccacatcccacatcctggcgggccctccttctgctcggggcaggaggggtgggggaggagggagggagaaaggggggcgtgggggtgaggagcagctaagggtgcagttgggaaggccccgccggaggacagcatgggcacaggcgaagcggggacggggtggggggcgggggaatgcctgctcctgatccgatgtgtttagctggaagaaattcattgagctgcgcactcgcacttgggcacgtttccctgtataaagtttttgtttttgtttttttgagacggagtctcgctctgtcaccgaggctggagtgcagtcgcaagatctcggctcactgcaagctccgcctcccgggttcacgccattctcctgcttcagcctcccgagtagctgggactacagacgcccaccaccacgcctagctaattgttttgtatttttagtagagacgagatttcaccgtgttagccaggatggtctcgatctcctgacctcgtgatccgcccgtctcggcctcccaaagtgctggaattacaggcgtgagccgccgcgcccgggcccctctataaagtttttaacagaggtgtgtctgaccctgcttggagaggagaggattggcggagtcagcatctgaaatgctgctgccctacgagacaggcagacagggtcggcactgcccgggggccacgcgggtctccctctgggaggaggggacagctcagcgtggcagggcgggcttaccgtcctgtgttccccctgagcccaggcgtgtgctggagttgatggctgtgtttctgtgctgcgggagcggcagtgttgagtgtgcctggggaggcagggccggcctagggccccgcgccggctcacccttgttttcccgcttcagatgctcgatctcctcatggagcttggccagcatctccgagtgctgctgctgcaggaactgcaggcttttctccaggtccaggttccgtttctgcgggtcgctctgcctgagctgcgggctctgcggcctcaaggactggacgcccacagaggggcgctggcgccggcgccgagagcccggggtcggcgagctggggggccgcgtcccagccgccacccccgcaccgctcatatcgccatcgccaggtactctcccgctgccactgcaccccggctcagtggccaggccgccctagcctggcgccccgtcaccatggaaaccgggcgacggaaggcgcgaggcggttggcgggggcggggcctgtcgctggctcttcctgggtgagtagtgatttacaaggcatccagggctgggcgccggggctcacgcctgtaatccccgaagtttgggaggccgaggcggacggatcatttgaggtcaggagttcgtgaccagcctgaccaacatggcgaaaccccaactctactaaaaatacaaaatgtagccgggtgtagtggcgggagccagtaatcccagctactctggaggctgaggcaggagaatagcttgaaccgggaggcagaggttgcagtgagtcgagatcgcaccgctgcactccaatctggacgacagagactctgtctaaaaaaataataataaaaggcatccaggcatcctttccagcctgaatggaaagtgagaccccgtctctaaaaaattaaaagaaaaaaaacccgggcatggtgtcttgcgcctgtagtcccaactgctcgggaggctaaggcgggaggattgctggaaccccagaggtcgaggctgcagtgagctatgatggcaccactgaactccagcctaagtgacagagtgagatgctgcctaaaaataagaggctgggcgcggtggctcacacctgtaatcccagctactccggaggctgaggcaggagaatcacttgaacccaggaggtggaggttgcagtgagccaagatcgcgccattgcactccagcctgggtgacagggtgagactgtgtctcaaaaaataaataaataaataaataaatttaaaaataataaaaataaaaagaagtcttattttttttacaaggcctgccctcaaaaaaaaaaaaaaaatcacagccaggccaatcataattttgccagataccagcaaacctggaggaagggaacatagctaaccccagcctgctctggctctcctttccccacatcttactgccacatcagcggggctcctgtataataacaggggatacaagtgaaagaactgctcatctcagagcttattcaagaaatctctaggaaaccgtaaaggcaacagggagacaaaaactaagacactagaggaggtttaagcctctgacacctccagttaacaaacagaacacatggcgcaacccctaaccagaccaacataaaacttcacacagaaagtccatttactggttgagcacgaccagccctcaacaaaaacttgcaaggcataataaaaaacaacacagtttgaagacacagcaaacatcagagccagacttaaatatggcagagatgttggaattatcagaccaagaaatggaatacaactatgattaatatgctaagggctctaatggaaaaagtggacaacatgagattacagactgataatgggaacagagaagtagacattctaagaaataatctaaagaaaatgtgaaggccaggcagggtggctcatgtctgtaatcccagcactttgggaggccaagttgggcagatcatttgaggtcaggagttcaagaccagcctggccaacatggtgatatcccatctctactaaaaaatacaaaaattagctagcgtggtggcatgcacctgtaattccagctacttgggaggctaaggtgggaggattgcttgaatccaggaggtggaggttgcagtgagctgagatcatgccactgccttcaagcctgggcaacagagtaagactccatctcagaaaaaaaaaaaaaaaaggaaaaaaaagaaaagaaaatgcgagaagttggccaagcacagtggctcacacctctaatcccaacattttgggaggctgaggtgggtgaatcacttgaggtcaggagttcaagaccagcctgggcaacatggtgaaaacccatctctactaaaaatacaaaaattatttggaggccgaggcgggcggatcacgaggtcaggagatcgagaccatcctggctaacacggtgaaaccccatctctactaaaaatacaaaaaattagccgggcatggtggtgggcgcctgtggtcccagctactcgggaagctga

SEQ ID NO: 2714 - DNA, 4001 bp, Homo sapiens
ccaggtcccccagaacctgtccccactgggttggcatacaggggccagtgcagccaggtgggcaaggacagtctggaggggctcccctgggtggcaagagcatcccatcaggaactgaagggcccagttctcacctttcttctgtgatgtctgattcattatgagcttgtaacggagatctgaaagcaagcacacgctctcctcagcacttgtgaaaccacagccattctgagagaagaagcctggcctgtcctctcctggctgctgagcccgaaagtcctgcccccccactggctgattgggccctgccccatggatcccgctctccaccatgcctttgtcgtgggtgtcaggccaggagtggcccctgcctgttccctaggcagagcccacctggcatatcagcctcatccatctgagatgactggagggcgtccacactgccaggcagaacctgggctttaggggtacagaggtgaactctggaatccctggctatggcggtgtcatgatcccgtgggcatcagggactggggggaggctcaagaagatatgaggaacggggcgtcctgaggctcaagaagacatggggaagcggggtcctgacaaaacagacgcctggtgatgggatactcggcactcaggtaaggcagcagcagggaacggggcgggagaggaggccgcgggcactggtgcccttgctggagccctcctgaagcaagagcgaggagcggagccacatcccacatcctggcgggccctcctcctgctcggggcaggaggggtgggggaggagggagggagaaaggggggcgtgggggtgaggagcagctaagggtgcagttgggaaggccccgccggaggacagcatgggcacaggcgaagcggggacggggtggggggcgggggaatgcctgctcctgatccgatgtgtttagctggaagaaattcactgagctgcgcactcgcacttgggcacgtttccctgcataaagtttttgtttgtttgtttttgttttttttgagacggagtctcgctctgtcaccgaggctggagtgcagtggcaagatctcggctcactgcaagctccgcctcccgggttcacgccattctcctgcctcagcctcccgagtagctgggactacagacgcccaccaccacacccagctaactttttgtatttttagtagagacggggtttcaccgtgttagccaggatggtctcgatctcctgacctcgcgatccgcccgtctcggtctcccaaagtgctggaattacaggcgtgagccgccgcgcccgggcccctctataaagtttttaacagaggtgtgtctgaccctgcttggagaggagaggactggcggagtcagcatctgaaatgctgctgccctaggagacaggcagacaggttcggcactgcccgggggccacgcgggtctccctctgggaggaggggacagctcagcgtggcagggcgggcttaccgtcctgtgttccccctgagcccaggcgtgtgctggagttgatggctgtgtttctgtgctgcgggagcggcagtgttgagtgtgcctggggaggcagggccggcctagggccccgcgccggctcacccttgttttcccgcttcagatgctcgatctcctcatggagcttggccagcatctccgagtgctgctgctgcaggaactgtaggctcttctccaggtccaggttccgtttctgcgggtcgctctgcctgagctgcgggctctgcggcctcaaggactggacgcccacagaggggcgctggcgccggcgccgagagcccggggtcggcgagctggggggccgcgtcccagccgccacccccgcaccgctcatatcgccatcgccaggtactctcccgctgccactgcaccccggctcagtggccaggccgccctagcctggcgccccgtcaccatggaaaccgggcgacggagggcgccaggcgtttggcgggggcggggcctgtcgctggctcttcctgggtgagtagtgatttacaaggcatccagggctgggcgccggggctcacgcctgtaatccccgaactttgggaggccgaggcggacggatcacttgaggtcaggagttcctgaccagcctgaccaacatggcgaaaccccgactctactaaaaatacaaaatttagccgggcgtagtggcgggagccagtaatcccagctactccggaggctaaggcaggagaatagcttgaaccgggaggcagaggttgcagtgagccgagatcgcaccgctgcactccaacctgggcgacagagactctatctaaaataataataataataataataataataataataataataaaaggcatcctttccagcctggatggaaagtgagcccctgtctctataaaaattaaaagaaaaaaaacccgggcatggtggcttgcgcctgtagtcccaactgctcgggaggctgaggtgggaggattgctggaaccccggaggtcgaggctgcagtgagctatgatggcaccactgaactccagcctaagtgacagagtgagatgctgcctaaaaataagaggccgggcgcagtggttcacacctgtaatcccagctactccggaggctgaggcaggagaatcacttgaacccaggaggtggaggttgcagtgagccaagatcgcgccattgcactccagcctgggcgacagggtgggattctgtctcaaaaaaaaaaaaaataataaataaataaataaatttaaaaataataaaaataaaaagtcttttttttttttacaaggcctgccctcaaaaaaaaaaaaaatcacagccaggccaatcataattttgccagacaccaacaaacctggaggaagggaacatagctaaccccagcctgctctggctctccttccccacatcttactgccacatcagcggggctcctgtataataacaggggatacaagtgaaagaactgctcatctcagagcttattcgagaaatctctaggaaaccgtaaagacaacagggagacaaaaactaagacactagaggaggtttaagcctctgacacctccagttaacaaacagcacacatggcacaacccctaaccagaccaacataaaacttcacacagaaagtccatttactggttgagcatgaccagccctcaacaaaaacttgcaaggcataataaaaaacaacacagttcgaagacacagcaagcatcagagccacacttaaatatggcagagatgttggaattatcagaccaagaaatggaatacgactatgattaatatgctaagggctctaatggaaaaagtggacaacatgagattacagactgataatgggaacagagaggtagacgttctaagaaataatctaaagaaaatgtgaaggccaggcagggtggctcatgtctgtaatcccagcactttgggaggctgagttgggcagatcatttgaggtcaggagctcaagaccagcctggccaacatggtgataccccatctctactaaaaaatacaaaaattagctagtgtggtggcatgcacctgtaattccagctacttgggaagctaaggtgggaggattgcttgaatccaggaggtggaggttgcagtgagccgagatcatgccactgccctcaagcctgggcaacagagtaagactccatctcaaaaaaaaaaaaaagaagaagaaaagaaaagaaaatgtgagaagttggccaggcacagtggcttacaccgctaatcccaacactttgggaggccgaggtgggtgaatcacttgaggtcaggagttcaagaccagcctgggcaacatggtgaaaacccatctctactaaaaatacaaaaattattgggaggccgaggcgggcggatcatgaggtcaggagatcgagaccatcctggctaacacggtaaaaccccatctctactaaaatacaaaaaattagccaggcatggtggtgggcgcctgtggtcccag

SEQ ID NO: 2715 - DNA, 4001 bp, Homo sapiens
gcctcgggagacggccatctccacctgaactgggcccagcacataggtgagccttgagcattccactcttcccactctttcttgccccagaatcccagagctggagcactgaggcaattccggaacagcatctactgtctgatatgtggggataggagtggaaaggggaaaagaacagcttgtgccttcgggaatttgctccctgaagtccctgcagtgatttcgtttgtgtctggcttcctacaaacaaagcagaacaatgagaggaaggaataccaggaggcaccagcgctagctggaaggagaggaagtttgtggtgctcgccagcagggcggttcccggccactagtgtactgcagctgggcaggcacactcctcgcagacccggcgctctccaaggagaaaagaaagttagtgggcttggggtacgtttcccttcttttcctagaagagggtggcaggggggctggctcagaaagaaaccatcactgaccaacacttggggtactctgtcaaaatgctgctccttccatactgagtctctttgctcctcctctttcccccagtcaacctggggttaagtgggaaggggagtaaggcaactccaggggatgccttccaaactccgggagagggaaagcacaggaattgggagaagacgtgaaggcagagcttgaactcctatgtacccggtgacacaagactgctctgagggtggcgcccgctgcttctcccgggcgccccgccagccgctctccctggcagtggcgccctttcctcgccctctgcccgcccaagagctgctggcccagagcagccgcattcccgaccctccaaggcgaagatcccctggattcaccccctcactggcctttccgcctaactgactgaaacccggctccccaggcacagattttccagcctccctaagaaatgaaaggttcgcgtgcccttcacctccctccctgctttccagcgtcctcagcgcctccccgaacagccagacagtggagcgccccgtgttggggagaggaggggagcagacgcctccgaagtttggaaaagttacacaggggctggggactgggggtagggggtgccgaccgggagaaggggagggtcacctgttgagggagggagggaaagtttgcctggccccgcctcctcctcggggcaccccgctcccagccgcgccgcgcctccccacctggcccgcgctcaccttgaggccgcggatctcgccgaggtgcagctgcaggcggcggttcacctcgcggatgaggttgctgtggtccagcatcgcgctcaccttctccgcctcggcgcgccgcaggctgcggatcagctcctccttgctccactgcagcagctcctcgtccgacactttggacaggtcctccaccggcgcgggcggggccgcggacgagccggccggggctggggaacaactttccgccgccgccgcagccgccgccgcgcctccggccgccttcgacatggtatccgcggggtggcaggtgcaagtgggtggaagaggcgaggcgactcccgaaggcgcgggcgcggcgaggccgcctccgcccacacccctgtgcgctccggcgagtcagcggcaccgcccaggggccgctgggttggggcggcgggggtcgcgctgggtggccatcctacctcgccatccccgcgcgcgcgcccgcgctcccccagggcccggcagccagccgcttgctgctgccgaggcccgtcccaactccgcgcaagtccatggtgaggggcactggggagcccggggctgccgcgggaaatcctcggggacagcgggggagctgcaccgccgttcccctgccctctcctccgccctaagccgagactgtcgccccccgcactctctgccctgcacacaggcgtgcacgcacacgcactttcctcccccttgcccagctgcagcccccggcttctcccctctcctagcttggagggcgcgccgggcaccgcggcgcctccccggctgctctagcgacgccgccgcggctgcccgaaggctgctgcgctcctcctgccgccttcgctgcgcccgcggccgctcctaggctgctccggaaagccttcgatttgcagagcggagtcgagaaggggtggagggtgggggaccggctggaggaggagcctggagctggggccacccgtaacccgcagcagctcccgcatgggctggacgcagctgccactcgaccgctgcccgggccctcgaggtgcgctcccggctgtcctgcccgggagggctgggggcgcggctctttctgcgcccgggcgggtggggctggaatggggagaaggtgaggagctgtggccgcccggtctttgggaggctcgcgcgcgccaccgtgtggcggaagaagctccctcctctgccctctgcacaccggccttgtcaccaggcaggggaaacagctgctgacccaaatgcgaggtgcttcgtatttggagggatcggggatcaggaaagatggggtagcaggacctgagggataaccagttatttgcactttggagaatgggaggagaggcaaatggcaaaaacgggggttggggaaaggggcagcttaagaaaatccaaatggtctgaaaagggcgaaaagaggcgtcagggcactgctcttatggggctacccatccccaccccccactctcgccccacccctaggcctttgtgttttctaaaaatccactactctatgaagaagcttcgggagaaggtactggatcttttaaatttttatttgaaaaatatcaaagcctttaggcgaaaataaaataccttcatctcctgcttcctgaaacctggattttaaggtcagcacagtcacctcccctcggagcaaagcaagccccctcaggcaagctgaaatgccagccaaggagatttccattttcttctatgccgcaggctgccaggcgtttactgggtcggcttttttatgatggttatttctggaaggaggaagtctgagtccctggcttctatctttgggctatcctcttgtaaagttgggtggaatcgtctctgggctgaaaacatgcttttgcctaaagaggtggatgcccttgaccaccgcatgttatttccagtggggtacagggccggaaaatggcaaggatctacccccaccgggtttcagttaacccgggtgcagagggaataatctctatctggtaggatgataatcaaaatcagtcccttcacccgccggtcagtgcgtgtcccctattggggacactgagacctggctcccgggagaggcaaggaaatgtggtactgcttacggtgaccaaatggccttaacattcccctcagcttaactaaactttagacaggtttcttcctaactgtaggccccagaccttccttttctcagagcatttactttagccaacttccattggtgaatgtttcctctgaccctttgacatgtaaatctctccgcctcttgctgggttttacagcctggggatctttctcagggatctgtgaggcatccctttgaaatgtaatcatcaaggaaaaaagggtccctatctcctagtgtttgtggagaggaggagcctaactttaataagttccaattaggaaacacaaatggcctcattacactgaccaacttcccatcctaatctcctccactagtcttctactagttcccctctccctccctctctctcttccctattgcaatagccttgaataattcccccttgtctgtttaactatatcggatgcaatttttctttgacacctccaagccgctctcacgcccacagaaggctctgctcaacacagttcctaagaccagttttgtcacagaaagggaaagtgaaggtcagaaaaagataagtcctatctctgttacttgttagttcttgtccttgaacaaaccatccgaccttactggccctcgggcagctaatgatatggtatacaagaagcgcttgatcgagccac

SEQ ID NO: 2716 - DNA, 4001 bp, Homo sapiens
aaataagactaagtatacattactttgagcacaactgaaaaattcagtttgataaactacattagcgtacttagaatacacgtatgctacaatagctgtaattagataaaagctgagttttaattttactgatccagctaccaatatactttcactattcaattcccatctcaaaagcatactttcctacttagtacaaacccaatattataaacacaaaagacaaagatttgcccaataagtcgttatctaattgttatcaagacttgttatttgcatttcaaaacctgtaagaataccttaaaatgatccctaaaatattaagcaacctaataattcacacaataaatcatctcatcaggctttagttattacaggcatttaaattatttactacagcaagagtcctcaccaatcagaactgtttgaaattttctcttctgaaatctgctattacttaacgagtttcaaattttgagccatttatttctagatataaaggttaataagaaacatttctgcatcaaatgcacataacttcacagtaaagtcttttttcctctcttaggaaaccagattctcattttctctcttattttaccaaattatcaaagaatacacaatgtggcttggatttcagtactgaagacaagtgacaatacatggttgacagaatgaaaaactaaagtttcacaattttaacaggtaaaatatctaggttgtgataatgggctgagcccataacattagcattcctttcaagatccaattcttaaaccacctgaatatttctggccaatgaaccaaattaggggcttaaaacatcgtgtctcaaagttcaccatatgctatttctcaaagaaaacgttacctaggaaagaaggaagaacttacatttggagcatgacctggttcaagaataccccatccaccaaagccacatattcatcaaggttggtcccatttcctgcggccagaggtccaaacgttttaacctagaacaaacagaaggatcaccacgacatgaacgcccacctccatctctgcagccacaaataactcagcaaaatatacaataaaggacaccccacttacccaagtgaccaaagggctggtcatgaactgctccagaaggggagtaaaaatttcgttctccattttacagagtatgtatttgaaaaaaggaactaccacaaaaatacgcctagggaattggtcactaaacgtggaagtaagtagaaatcaatgaaagtccatttcggcaagggagaaaaatcccatcgtggaggaggggggcactctccctcctcaaaaaacaccccagagtgaaacgagccgaaatcccaagaagtggcttcgacgacggacaccacgagcagcagcctgcgctggaaatgtctgtaccgggcgaggaggggcagagaaaaggcatctggaggaggaggaagggaaagggggctggaacccaagacaaaaagcccgtcaaggttgtccagctcctggaggatccagaccagcgaaactgctcccaatgaatcaatcccaacgggggctaaatgaaatacgttaaacagagaccacgttaaggataccgaggcgccaccagactcgacctcggcgttccgacctctacacgttccacccaccgatgggcatggagccgctttcgacccgcggagcctccactgcccgcagcccctcagtaccaacaggcagggctcgccccttccccccgagcagacaccattcctccgccgccctcaagcctcgcctccagcccccttcccctcccgggggtgggggcttgaatgtgtgtccctaaccccccagcttcctaagccctgccagcctttcagcgcgtctctgggaatccctggcacaaaatcaccgccgcgctccagccttctccgccctctatggagaagccggagtaacggcctcagaaccgcagtgccgcatcacaccccacccctcgccgcccgccagcgccgcccgccaatgccgggggccgccgtcaaagggagcgcgctgctccctccgcgccgatatccttccgccgactccccgcccctcccgtgcagctgcctctggattgtgggagaagaaaaccgctgcatgagcgcgctcccgagcgagcgcgcccccgggctagcctcgccgccgcccagatcctggcggcgggcgcgggctcgggcgtgggcgcgcgctcgctgcagctgctgcggagacaacccgctcctcggttgcgcccaggacggttgcctggtgggcggggacagggaaggcagagcaaggggtctgtctgctcgctcgctcatgcctaattatggtttatttcctccccgagtgacttctttgatacgtgaaggaaggggaaagaaatccttctcttataaacatgagggatgcagacagcctttttcggacagtttgatgtgttctgtaaagcatgccttctccccagcaaaatggaataggaaaactcactgcagcaaatggcagagggacttgagccacaacttggtgggggtttttttctcctttttgttttcttccaaatgcagtccactaacgcatgaatgttcttcaaagttgcaagtgacatacagtaagattttttaaaaaccagagctgtctgtcagcacgttggtattccctgactggagcaaacatgactcagacattgttttttggttttgttttgttttttactatttgggcatgggtcgggggaaacccaagcaaaatcaagagctacaaagaagaaacatttagaagtcatccaagttgggtgacaaataaacagattacatatttgtcataaatctccatgccacgtacgactgggaccttgaaataattttaagttccctggcaaaatcaaatgctactcctcatttcaaaggaaaataaagacctttttcccggggtaaaatgggcatatagaacgcaatctttttttgataaaagataatattatagttttataatgtgtgctatgtttacattacataaatatttacacggagtatatattttaaattagcagtaaaaatgtttttgtcataacacagttaagaaagagcagaatttcttaattgggtagttgagaacctggactctgaagtcttcctgcctggttccaatatgcaccagctgtgtgagcctacgcacgttattgagtctctttgtgcttcgattccgtcacgtgtaaagcagggctaataatagggttaaatgaaatggcagcttatagttaagtgttctataaatgtcattaatgttgtttttaacattattccttcaaaataaagaacctttatgaaaaacttgaaatataacctctctgcttcagttacaggagaaaggatcttgctttgaggagggaactaaatgccctttgaaaatcatcttaattaaaattaggatgcattcatgtggcactttgctaggtgatgtacaagtagaaccttgcatttccctagccagtacacaagccttcagacatccttgttgctagcaatcttttccatctgctcttgatgactttttaaaaagccttttagagatgggagtctcactgtgttgcccagcctggcctcaaactcctggcctcaagtgaccctctcacctcagcctccctagcagttgagacgagacgtgtgagccaccacgcctggcttggtgactccttctttttttgtttgttttgttttctgagacagagtctctattacccaggctggagtgcagtggcacgatctcagctcactgcaacctctacctccagggtccaagcgattatcctgcctcagcctcccaagtaactgggattacaggcacccgccaccacccactggctaatttttctatttttagtagggacggggtttcaccacgttggccaggctggtctcgaactcctgacctcaagtgatccaccgcctcggcctccctaagggctggaattacaggtgagagccaccgcgcttggcctgata

SEQ ID NO: 2717 - DNA, 4001 bp, Homo sapiens
ctgggaagcctgaggcataagaattgcttgaacctgggaggcagaggttgcaatgaaccgagctcacgccattgcactccagcctcggtgacagagtgagactctgtctcaaaaaaaaaaaaaagaatgaatttaatgaattaactggtctagtgacatcctaataacacagactatccatatttatatttactagcttctgaactaaatgatgataagttattgcttgacctggtgagtgtggcctcttagcagtcagtgaaagtttaaacgaaggacatacagcagcaggttgctcttcattaattaatttatttattttccccccagaaagacctccactgatagtactgtggaatattgggttggacggatttaaagtagaacgtgggagaccagacagaagtctacagcaaaaggccaggcaaaaacttgatgagagcctagaatacagaagtggcaaaaaagaaaacttcaaatgtcacagtacaaatcctattgttcactatcctgggtcccatcccaggcaacgtgcatgtaagattttacctaatacaggggttctgacaacattatgcttgtcaggttttcttaagacaacaaaatggacttgcattcggggagcacacactgacaaacaaatctgtcctttcagactatatatattcccagcttctggacacagaacacagtgatccctcaattagtggatacttgtgatatgaaagaactgaggatttgggaggaatgcagaggagtaacattggtcactggcaggtaagtgtgaagggacgactcaccacgtcaagcaagcagtcaccctgcccaatgcctgctccagaaccttaggaaaaaggcagaggtgcggcgtggcttccatttctctccagaatccagtaaactagactagcctttgagtaaaatcaactgaaagggacgacagatgcaaactacctatgagatgctaagtggtatttgcagccaaaagaaaatgaatacactttccctgtattcccagcaaacgtggaaatccgcaaaccactcatgaccccctccctagcactaagtgagtacttaacaaacacctttggaaaagaaccccgccctcttctggagaagccgcagcctttccgcccagagccgggtcccccgccacacagcacccctggagtgcgtcccaccccgaacgccccggcgcgctgacccagcgggacacctccctggtgcgcgcaagtctcccaaacttcctcccgccgccccggcccgggtccacgcaaggagggtggcattccctcccgacagcaaggcgggtggggcgggccgccgggactctgcggggtggcggtagacgtcccaaggtcaccacccgagcccgaaccgcctcggagagcggtctcgtgactccagcgcccagcagcctcggccctcggggctagccctgcggcgcggggtgggggagcccgtcccggacagggagaaaggtgggagcccaggaccccgcggcgcgtggggctgcgtcagagcaggtgtcgggctaggaaggccacctgcgccccaagagacccgggagcggcttaagtttgtcctcacccgcccgccgccccctgcccatgcaggggtacctgctccccgcctccaagaagagggtcggcgcttccctgaggtggatacgcctgaggaagggggcggggcgcccctaacgcacccagggcccgctcagcccgccgccccgcggctcggccctctcttcaggaaccccgacgtgtcagggaaggaggaggcgttcttacctccgggagaccctggccctccggccccctgggcaaccccatgatccgaccgggctgtcgtaaggcgagagcgaagcccgccaagcgtccggaggaagctgtccctgccgcggagctgctaccggggtggagtacaaagcggaaactccctctgccgccgccgccgccgccgccgccgcctgcccgaagcgccgcagccgggcagagcatgcgcgctggggccggagcgcggcgccactgcgcctgcgccacagcagcccggggagaggtgggctgggctgcaggtcctggcgttgtgctggatcatcgcgcccgtactctgaagttttctccgtggcgctctttgagaggggttcctcctgcatcttgagaatattttgcatttcggctcccttctcttctcgctgccatcggatgccccaaataggtcctgtcccctcggtgaatcagacttcggaaaccgcctcgcttcagggtcagagtccaagtacagatgagcttgaggattctgaatgcacgcccggctctagaccttacagacacacgcttggacagacttctccatatacgacccaggaacggaccccttgagaagggattcttcaagcccgctgccctctccagcgtcctggccagtggcatcgcgttcccaggaaacctcgcttcagatattgcccaccaccccgccctattcacggttcctgggtcttcctggaggaatgacatctcagagaatgcggactcctatgttcatgtcatttgagccgccgcgtcccttatttgatgtaccccttgttggtcccggaggatggcaactagacaaaaggtcacaggcccccacacccgctccataacggcttcttggctttttgtttcttttaagcaatgaggaaagagatgactttcgtgaaaacttttgctggagaagagatccttccctctgtatatgtgtgtgggatgggaagtgtcagactcagacctttagttccttgagatcaaaaaggtttcgtgtttgctttcgtctcttctttgcatccctagcgtctttaaaagagtaggcaggcgcggtggcacatgcctgtaatcccagcactttgggggtcgaggcgggagtatcacttgaacctaggagttggagaccaacctgggcaacatagtgagacctccatctctacaaaaaataagaaaattagcccggtgccagtggtcccagctagccggtaggctgaggtgggagaattgcttgagccaggaaggttgaggttgcagtgagctatgataacaccactgcactcctgcttgggtgacagagcaagaccctgtctaaaaactatatatatatacgtgtatatatatatatgtgtgtatatatatatacgtgtatatatgtgtgtatatatatacgtgtatatatatatgatgttttctattttattttatttttgcaccttttgtactcctcctggagttcatcctgacagacagaggtttgtctggagccagagctcacaaatagttggaactgccctaaggatgccattttgttcttaaatataactagcaaatattactcaaagctgtgcacgatccccaaaccctggtccccaataatttgaataatctgaatatgcaagttaaggtattgagatgggaaccctcctgtgtggtatatcttgctcttatcctttgtgaagccaataaacttcaatttctactctcataacttcccaaatgtgttgtttttgtagttttaaaactgtcattcactgaaatggtataggttgatggggaatggagagtgataataatttgtggccactgttgagtgaccagacaggtactgatgcctaggaacaggtagtaagatctcacatagcaggcaagcctaaacagctgtatataatagcagcctggagaataacaggactcaggccacaccctgagttccctgttataatgcttttgcaatgttttaaataagcatgagtagctaacttcctcagtaagaaactgtccttcccgagcgcggtggctcatgtctgtaatcccagcactttgagaggccgaggcgggtggatcacctgagattgggagttcgagaccagcctgaccaacatggagaaatgccgtctctactaaaaatacaaaattagccgggcgtggcagcgcatgcctgtaatcccagctacttggtaggctgaggcaggagaa

SEQ ID NO: 2718 - DNA, 4001 bp, Homo sapiens
aaagtgatttttgccctatactagttccgtttgaccaaaaaaaatttttaaaaaaggttttgccttattccagtcctgtttaaagtgaactttaaagtagatatgtactaagacaaagctatctttgccacatcatttctttctctttaaaataagatcttatgttcaaaacatcagtaatttctgaatgaaactctaaaaaggcaaacatttttaaaactgaagtttctaggtattcctgatacaactgaattaaaatcaattaataacttacatgatagcattgatgtcacagccttcattggccagctgccgtgtgaagcccacaataaatttaggatgaagaatacggtctgtgtatccaagacagcagtcaaagttgcttgctgctaaaaaaaaaaaaaagtgaaaggtattggatccacatgaataaacttatcctgtgattggtattataaaactaccttaagttgtgaaaaatctagtgaatctcatgtatatgacgaataaaccacttagaggaggagtttcaatgtcttggaaacctttgtaaggtcgttgagaaccaatctaacatagtttacagttctttgaaaaaacagtttgtgtgccgagaagttttggttcaataatagaattgagaaacacaggacttctcataagtgggatatcttcagtaagaaatacaaattgacaatatttcatttcagttcactataatcattcaagaatatgagcagccccttccctactgcttgaaggaacccttatgtagataaacttccaaaagcagaaaatgaataaattggcagattttaatctattatctggctactaagtattgagaaatagagctacaaagggaaatatgatttataggagtgaaaacactttgaaattgtcctattaattaataggaatgtttaattttgttcataaaagttcaacatgtggttgggcatggtggctcatgcctgtaatcccagcactttgggaggccaaggaggaaggattgcttgcctccaggagttcgagaccagcctgggcaacacagtgaaaccctgtctctacaaaaaaaaaaaaaatgtaaaaaaattagccaggtgagtggcacacggccgtggtccctgttattcaagaggctgagactggaggttcacttgactccaggaggttgaggctgtagtgagctgtaatcatgccactgcactctggcctgggtgatgaagttagaccctgcctcagaaaaaaaaaaaaattcaatgtgcatttttaggaatgcacctgttgctaaaagtgttgtgtgactattgagcaataaagcaatacttggacattcccgagtcagattacaacatgctgtaaggtaagggattaatgttattttaaagttggcaagcaatgtcccccatgccttgtggggatgttgatgtcaggtattataatctacttctaaaggatgagttttgaactttaccaaaactattaagttgggaggtacgaaagttggggacacaggaggattctctacatttcaaaatggccccatctactggtaacattacacactttatatcactcccagaaacatcactttggctttatcctgaagtttagggatctctaagagcccaccactccccaaatctgctgagattgacagcagagaggaaagcctgatccgcagcagtaactcttctctcctccactccaccatgggcagacaacttccatcactacctcttgtatacttcctaacagttttccatcccttagggacccccagttgagctcaaggctaaaaggaaaatgaaaatagtctttcttctgtgctagcggaaagagcgacacttaccttctgattcgccgcagaggtggagtagcagcactgacatcaaagcagccaggagcaaactcttggtacagcacatggtttttagctcaaagaacagatctgctcagtgttgagtacccagttctttgggagtgctgttatattctgacagcagcctgggatggccctatttatagcaaatattgggaatgtacacagaaggcgtgttgccacatggggttttccccattgatcaactggccccatcatgtcatcataaaaaaaacccgcaaggaaaacttcctgctttttcctcatattgggaaggtgcgaaggtcagggtgggggacaggaagttgagaaggggagaatcctgttaaattctttgtatttgcaaagagcaaaagcagctcagccctgtgacccagaaaagactttcatccagttttaacttaatcatttttgtgtctgaaaatagaggattaacagcgatacaaaggtcagccccacacaggaacattccagaactcctattgttacaccctatttgctttccagaaccagtcaaggaggagggggaggaggagcaggtgggatgccaggcatactctgctacacatttaccatcacatggttgaggttcagctgtcatgaagaagaccctgagttgctagactaacattcagagcaggtactataacagtgctacagtactgtccgcagttagagtggaaaatatcagcctttaagtaaggctcaaacctcagcttcaccttgatttaatgtcaactcttctaagaatcttatacattcacatggctttaatcaatattgcagttcagaaaataatccttacctacctttaactctccatgatgatgtactaatataactcaatatagagcctcagaattgttgaggaaagaaaacctatcagcagtagctagtcagcacagcaaatgtcaaataacagtactaatgatgataatgtaatatgaatccctaacctaaggcagtataagaactctccactagacccaaataggttgaaagtaaaaggatcaaaagaaaggtataccaaacagtaaacaaaagagaactggagttggtgatgcctatatcagacaaaatagatttttttttaatgttaccggaaataaaaagggactttcatggtaacacaaaattaacccattgggaagatgtaaaacctataaccatatatatacctaacagtagcaccccaaactacagaaagcaaaaactgacagaattgaagggaagaataggaaattttattttattttattattataatttcttttgagacagaattttgctcttgttgcccaggctggagtgcagtggcaccatctcggctcactacaacctccgcctcctgggttcaagcgattcgcctgcctcagcctcctgagtagctgggactacaggcacgtgccaccacgcccagcgaatttttgtatttttagtagagacgtggtttcaccatgttgcccaggctgaactcctgacctcattacaggcatgagccaccgtgcccagcagaataggaaatttaacaataaaagttgacagctttggtaccacattttcactaattaataaaatttaggcagaagatccacaagaaaatagaagacttgaacaacactataagccaaatagacttagcaggcatcgaaggactactctatccaacatcaacagaatagttgcacatggaatgttctctaggataaagcatatggtaggttatggaacaagtctcagtaaatgtaaaccgactgaaatcacataaagtatacattcaaaccacaatggaattaaatcagaaatcagtaacagacagaaaggaaaccacatattcctaaataaccaatgtgtctggccaggagtggtggctcatgcctgtaatcctagcattttgggaggccgaggtgggtggactgcctgaggtcaggagttcgagaccagactggccaacatagtgaaaccctgtctctactaaaaatacaaatattagccgggtgtggtagtccatgcctgtaatcccagctacttgggaggctgaggcaggagaatcgcatgagcccaggaagcagaagttacggcgagccgagatcacgctactgccctctaacctggc

SEQ ID NO: 2719 - DNA, 4001 bp, Homo sapiens
ggattgttttcttagcaaataagtcctaatgactatccacaaatagcagaaagtcttctttggtccatttttctacacatacctttcagaataatattctaaaaataactatgataaaaagtaacaaataaagacagaattaaagcagagttaaacatttctaaacaatatgcaattttctttaacacacacaacacagtatgcgtgttactcaacatacaccaaactcgtatctttcataaatgaaattaacatttcaacaaaatgccattactctatttgtcaaggtttacaggttatataccttaatattcaggtgtaaattttactaataatacataaacatactcctgacgtactatatctgaagcaagagtggacgtttgaatcacccaaaattttaggagacaactgatgctaacgtgataaacagaaacgttgacatcttaagaaattactaggttagcaaatgaagaaatgaattatttctactaaatagctctttcaaaagaatgtcataattaatttaatctcaattgacagtcttttaaacaatgagtccaacataattaagatgtatcacagaacgaccaggcttgcccaattccactgtacatcactactgaaattattcaaatgttaagtatagaatttaaatgaagaaaacctatgtaataactctgtaaagaaataaatgtttttcttttttagcttaaaaggcctggcagagcttaacagtgccttgcagtttaattcatcataaattttaaaaacacaaaaacaccgcatctgaagcaaaatatttatcacgtgatatacgtttaccgttaattcagaacactaaatccaacaacgcaatgaccaactttttttctgcgtatcgatttaccctcaaatttgcggacagtaaaaacagacaactagtacttacatttttgttgaatttggtgaaagaatggtgcatataaaacctgtgcatataaacaatcgcagtgtttattgtaagctgagagctggaacgtaatatttaggaaatatctgacaaaagcaagatctcattcccagaacaattttgatggaaaattcccaggttcttttccaatacctcccattcaaatccaaaccccaaactggaaataaagaaataaatgcccgcggggggtggggcggcaggaagagaataggcttgacgccaaataaatgggaataagaactgctgatcttttcactctaacagcgctgagggccctggaactatttatcaatggctacgactaactaaactcaaaatgaaacagttgaaacgcgcgcgcacacacccatacaaaaccacgccaagaacataaagaactccagtacgctcccaaggtagaagagagccgccatcaagccggcgacgagagccgggaaaggctgcggcaaacacttaggcctttcagcatcgctaaccctcctacctctcaaacccttcggggtcagggacaagtccagggagccgccccttttctgcaataatccctaaaattcctctttcgcctgagccacactcccaacccccgccgccaccaccacgcgctgccccaaacagattacacaacgcaggctcctggcccgcattcctggggtcctatctcctcctcccttcctctgctgacccctcgcgactgcccgagccggaacattacttccctgaccgcggcgccgaggcccagcgaaggccgaggccggcggcgccatgttcgcggggcaccaggcccggcgaccgggcaagggaaacagggcgtgagcggcggcgaacagaaaaggatacacattgagacgctgtcccatctcctggatgaggttggccgcctgctggcggcacgagagctctttatccgcctccactccgcagcggcggctcggcgtgttctccagctgttcccgagtaaagaaccagcgagaagaagctccacggcccgacgccatgacacttcctcctccgcccgctccttcattcaccccccgcccctcctggctcgcggactccccgccaaggcgcgcgaccccgccccactccgctcgccgtagaccacgcaccaccctttttcaccaccgcctccgcccttgcgcatgcgcggggcccgctctaccgactcgccctagtcttttgctttctttttctgccctcggcctcgctcttgcgcacgggaccacaatgctccgcgccgcttgtcattgggaggcgccgaaggtggagaggtcggctcggaaggaaaaggtcggcgcagcgcatgccgggtctagggttggcggggcgaaggggtggggagggaaggggcggggaggggaggggaggggaaagtgggagagggtggactctggccggtgtgaagagaggcggtcgggcggctgcgctgtgggggcctgggcgtgtacttcggaggcccgtcgggcgcttcctttagacgggaggtctagcggccctttaaaaagagaaaaataaccttcactgtcgcagcctcacgccactacttccattttccttttgggcgggtccgcgcagtctcgtaggcgtgcgactccggcctccgccaccaacagtctccgcctagcgcgcggctctggcgttgagctggcggggaaagagtgcacaggaagtcacgctccatggctgtccgcacctgagtgcttttttcaccctacattatcttgtttaaatcccagaccacttggtttatttttattttttcaaattacttggcaaacgctatccaactagcaacgagaaattgaatttctaaatgaggtgttgaatctagacggggcgtgttttcaggctgcgctgtggtttctgcgagacaaggttggggagaatcagatagtgcaggaggaactgagttaaaattttatctttaggatttgatgtgggaacatcccacatacctgttgattaactcctgtatttcttcctgtaagaaaatgccactgagcttcactcggagtttgtgttgtgaatagggtttctaagtttaaagtcttaactatttggaggccgggcacggtggctcacgcctgtaatctcagcacttggggaggtccagtgggccgatcacttgaggtcaggagttcgagggcaagggcaacatggcgataccccgtctctaccaaaaatacaaaaattagccaggtttggtggcgcgcctgtagtcccagctactcccgaggctgaagtgggaggatggcttgagcccaggaggtggaggctgcggtgagctagatctcgctgctgcaccccagcttgggcgatagtgcaagaccttgtctcgaaaataaaaaataaagtaatatctatttgccaaagaccatggaggcaagtgattgttatggggctcccacgctcagcatactgcattgcacaagaatattgattatagtaggcagtttttgtaacagttgctatttcatactcacttcccttgctttacgttttatgttgcttacaatttctggaatagattgatttaaagcaacattttaaaagtgcaaacccttggccaggtgcagtgtttcccggctgtaatcccagcactttgggaggccaaagtgttctagaccagcctgggcaacataatgagaccccacctctacaaaagttttttaaaaaattagctggatgtggtggcgtctgtagtcctagctccttgggagtatcgcttcaacctgagaggtgaggttgcaccccagcctgggtgacagagtgagatcctgtcacacacacacacaaataaaagaagtgcccatcctcaacatccattcatgataaaaactcagcaaactgggaataaaggagaacttcctcaacttgataaagagcatctacaaaaattctgcagctaacaatagattgtttctgttgtgagaaactacattctttccacctaaagtctgacacaaggcaagcatgtcccctctcaccagtcttttcaacgtggtactgggtgttctagctaacaagaaaa

SEQ ID NO: 2720 - DNA, 4001 bp, Homo sapiens
ctgctacccagaattatttttacctagacttatctctttccaaaattctaaaggcaaaaaactaaacgtttcctctcccctcacccctacctcaacggtttagagtctgacgaaccccaacattctcatctttgaccaggattctattggcaggattgggaggaaggaaggggaaccacggaaacaaatactcttgagcaggcagggtctagcattttaacttccaaaccattacattataaattaagtctaaatttatactttgtctcttttgaaacttctaaccatgaaccaccccacctctcttttagaacaaggaggtattgaagtctgttaagtcaccggagaatggctggagatgtatttgccaccgtgggaattttaaagtaatcagaactccgtggctaaactcctttgagttaacaacctctgggcgcggtggctcacgcctgtaatcccagcactttgggaggccgaggcgggcggatcaagaactctggagttagagaccagcctgaccaacatggtgaaaccccgtctctactaaaaattcaaaaattagctgggcgtggtggcgcacgcctgtaatcccagctactcgggaggctgaggcagaggaatcgcttgaaaccgagaggcggaggttgcagcgagccgagatcgcgccactgcactccagcctgggcgggcgacaaaacgagattccgtctcaaaaaaacaacttgtctgcacccctggtaataacctctcacacccttcacagtcattttacgcccctccccccattttctttctttctgtgttcaaattatagttggaaggaataaagcagcttctttcacgccgacttaacctattaggaataccatatagtgtctcctatggcaacctctattttgagtctagataagaaatcctcaaacatctgggtctaaactgtcgcgggcatcagctatcttcacggatgggaggaaggaacaatcagacccttacctggttccttcacttaggtaccatctggatgggttaagggagggaatgggatgagtactccgaagttgaggtatttgagtttccattgagaaaaggaaaacaatataccccaaaagtcttagcaaagtcccaccagacaatgaacagagctacaaacaagaagggcggcggactagagggtcccacgccggcttgggagaatgggaagcgggagcaagaactgggcgttacggtaaggaggaggaaaagaaactggccagacgcagcagggcaagaataaggggtggggacgcgaggcagaaccagccttcgtcccggggccggctaccggcaggaaggagcccgaggcggcggatgcctcccgggggactctgggggaggaggcgggcagaggtgagcccgagggcggatggcatccgccgcctccttaccttcgggcatctcgcggtcgctgatgtgctgcaggtggtggccctcgccctctccgaaatccaactcggcaggctccaccacagcgggcgctaccgccaccgcgtccccggacaccgcctcgtagatgtcggacgcgcagtacagctccgccgaccccgcgcgccggcccagcttggggctggcattgggggacacgcaacaggtcagcgtgttccccatgggaagcctccgctcctctctgccaccgccttcgctcgccccctactccgccgccctcaacagccgccccctcccccaacaatggcgcggccggcaccggcagccccgggctacgctggggctgcaccgcgcaagcagacgccgcctcgcccgcggttcgcccgcccgccccgcggcccggccccgggcagggctcgggcctcggccgcacccccaccgccgcgctgccgccgcctcccttaagctgactcgtctgcgagggcggtgaccagcccggcttatttaaaaggggtggggaacccaacaagcgctgtgaagcacagccactgccgggagagagcgcggctggagctcctcctccttccgccgccgcctaccgactgaaggccgctggccctggccggtgcctgccaaccggaacgcgacctgcggtcacctggttaggaggaaccaatcatggtcagagttccccctccggcgcccgcctcgaagccaggcacgtgacctgctgccccgcccccgcctggcagctgcccagcccctcacgccgctatcccagactcgggttttcattcatcgctggctgctgggagctttccggtcctactggaagcgcacgggcatttgtaactggaagctgtgtcaatgatctctgtagaaagccgttattagtaaagagttcgctccattagcaactcttcttccgagtctgacagctttcgtttgctcactaaacttggttacacccaaattgttaactgtttttgtaactcagtgctccgctcctgtcttccaatgagcgttagttttcacctgcaacgtgatcatagcaaccctggggccctggtcctactctccataaagagttgtggctgtgggtcttgaatgagactcgaggacacgtcacccttccacttcctcatccataaaatagggacctaactcgtccctgccaactctgaaatgctgggactcgccaactcccttttcttgcctgtttctctcctctaggcagggacttccaggtttctcttcttgtactaaaaacagcacagaaagcacgattttctcacgcaaaactgagaaccatgcagtggggcaccacagtcttgattccatgaagatgaatagttaccatttggcaagcactatgtgccagacagtgttccaactgtggtatatttatttaacccttaaaaacaatcccggccgggcgcggtggctcatgcctgtaatcccaacactttgggaggccgaggcgggcggatcaccaggtcaggagatccagaccatcctggctaacacggtgaaatcccgtctctactaaaaatacaaaaaattagccgggcatggtggcacgcgcccgtattcccagctactcgggaggctgaggcaggagaatcacttgaacccgggaggcagaggttgccgtaagccgagatcgcgccattgcactccagcctgggcgacctaggctccgtttcaaaaaaataaaacataaaaataaaaataaataaacaaatatatatatatacacacaatgtcacttcctccctaagcttgatttctacctttattttctgatcatcatgatcagggaccctcaccctgagcagtcatgtaagcttgcggaagtaacttaacttctgcgtcccaatttcttctataaaacctgcaaaatgggattgttttttttttgtttttttttttttgagacggagttttgctcttgttgggcgcggtggctcacgtctgtaatcccagcacttagagaggcagaggcgggtgaattgcttgaggtcaggagttcaagaccagcctgaccaacatggagaaaccccgtctctactaaaaacacaaaaattagccaggcatggtggcgtccacccatagtcccagctactagggaggctgaggcaggagaatctcctgaacctgggaggcagagattgcagtgagccaagatcagtccactgcactccagcctgggcgacagagcaagactccgtctcaaagaaaaaaaaaattgtctgaaaccctaggaatgtcattagataccattttggatgattcttgtagacttgagacgatgcctattttaaggtacaaaataatgcctgcatttaacaacagacatacacaaaaatagatatctacgaccttgaaaactgaagaatttaaaacttgctaaccaggaagatattgggaagcattgttacggaaatagattttaaaacattttgaatgaagggaatattagagagaattaagaaaaaaaaattctgtaacagtggcaagcctgggagagcaaagggaagcaagtaggaggaatgtgctttgaattaagcaagagtttg

SEQ ID NO: 2721 - DNA, 4001 bp, Homo sapiens
gtctgcttttgtttcaaaggttgctaaatttcccacttattttgtttgttgaatatcaaccatattataaactctcttggcccccaaatttatctttttttttttttgagacggagtttcgctcgtcaccctggctggagtgcaatggcgcgacgtcagttcacggcaacctccgcctcccaggttcaagctattcccctgcctcagcctcccgagtagctgggactacaggcctacgccaacacacccacctaattttgtatttttagtagagacggggtttctccatgttggtcaggctggtcttgaactcctgacctcatgtgatccgccagcctcagcctcccaaattgctgggattacagacgtgagccaccctgcccgacccaaaatttatctttcaacattctgttcctaatctaataaatgtaagcttcaactatggtccctagacaattatcctacaaaccttcgtttccaggtgtattatctcctaaacttacaaatgactcctaaatctggccattctgacctttccaactcattaggacaagttagaaactattactttttcttacatccagcgttacctatcttagcgccatcacattcccagttacttgggctgatgactgcaaacacatgtaaggtgtactttatatacgtgggtctttatatgctttctcactgaatcctcacagcaagcctacacgatggctaaaaagaaatgatcccatagctgggggagattaagccaaatactttccaggacaccaggcctttaacatctgccccaacctagctttctaatctcacctcttctgtaaacatactactattctccaacccaaaagaactactatactcaatatacactcgggcaagatctctaaacctctgtcctgacttttccttccagatttttctatttcaactcgatttctcttaatcttaactctaaaaagcaaacattttcctccaattttataagtgaatctttggcacagaggttacaggtcactaagacatgaagtaacggaagcagagaatgaaactctggtcttcctgatttccaacgtgtgccacacacttccacaaaaaaaacaaataattgtttcttgatttgcctatgtttcactgcacatgcggagacgacatcaacgtaacttttccgcaactatttcaaacacgacacgtaagtcggttcccacatccatcccagtacaatgggccccgccccaatttagactcggagagttcacccaattcgtctcaacagttgtgccaagtgaagtttatttaatagttctttaaataagaataacaaagctgaaagatactgtgcattctaccagttccaataagcaataagcgacagccctcaagcgtcagatccctagtgaagactgcatgcaatcctcggcattttgaactgctttcggctccaatatgaatgatgcacagtgcaggatgaaaaactaagggagattaagatgcaaaatggggcaagtccaaaggcctccatactccgggttggcgatcatcggcagaaaaacagaaataaggatccctccactgggctgcttctatagggaggacaagagaggatcacccgaagaaatgggaaatgagccaaacccgctcaagcccacgatgagagcgcagagcacaaccccgcggcgccgcgggtcaggccatgagagtgatacctttggcggcggaaatgttgctgaagcggatctgggctggcttgtcgcggtcctgataggcgcctttcccgcggccgccggcagccccggcagtcgccccgctccggggtgccacattctcgggcatggcaaactccgctgtgtctgggttggctcgggaaggacggatggacccggattctggccggccgcagtgtaataacggtaagccctcactgccttcacgaaccttccagaaagcggcgccggcgtcgggaggaggcggaggcggagaagggggccttccttgccgcgcggcgctggcgtgacgtaggaggctgtccgctgcgcgccgggcgaggaggatgcgtgcggtgggctccgggctggcgagattgtacgcccggggcgctgtgggtgaagagcgccgggggaacctttacgcgaggcagcaatgacaacgcgcgattttaaaggcgagtggtgaggacatccgcatttcctcactccaccttgcacggctatgaggtcccctcctttttttttttttttttttctttttttggatacagtctcactctgttgcccaggctggagtgcagtggcgcaaaatctcggctcactgcagcctccgcctcccaggttcaagcgatcctcctcagcctcccgagtagctgggattacaggcgtccgccaccatgcccagctaatttttgtatttttagtagagacagggtttcaccatgttggccaggccggtctcgaactcccgacctcaggtgatccacccgcctcgggctcccaaagtgttgggattacaggcgtcagccacgaagcccggccttttttttttttttttttttttttgacagagtctcgctctgtcgtccaggcgggagtgcagtggggcgatcttggctcactgcagcctcgacctccggggcccaagcgatcctcccgccacagcctcccaactagccaggacgacaggtgcccgccaccatgcctagcgaatttttgtattcgaaacatagcgagactgggtttcgctgtgttgcccaggctggtctgacctccccggctcaaagcggtccaccctcctcagcgtttcaaagtactgggattacaggcgtgagccaccgcgcccacccggaggtgccctcctttaactccggctggatctatccgcgaggtggggtgggcgccggaataactctctaagggatatgactgagtctgtttttgcccggccacatagacctgcattttatgcagttttgttcattttgaaagggagtcagaaaagggagatttggaatgaggcgaggttagttatctcgtattggttgatactgggtggtggaggtttgacagactgccaaatcaggtctgtctagttaccaccgcccgcttgttctacactagtgtctcctgcatgacgtagccactgactcttagggaacgtaaacattataataaagatcatttatttccgttatctgctaagcacagtgctaaacctttacacgttttatatctcgtttagtcctcacaataatcctttacttaaaaggtgagagaactggagcccaaagaaggaactgaagcccagggtaaacgagtcagtagatagaagcagtattccaatacaaagcaaggaccagaagccatgagctaaactgctggtctcctatgaccactatatttcagtagggaagtttatgaaatgaggtttgttgaatgttcgctcacaattattaagcacctgcaaagtgacagttgcgtgtggtaggttcagaaacaaatgttcaaaggtacttaatcttgtaattatgaggtggtggtggtgttgtttgtttgtttgtttttgtttgtttttgagacggagtttcactcttgttgcccaggctggagcagtggcaccatctcggctcaccgcaacctccgcctcccgggttcaagcgattctcctgcctcagcctccccagtagctgggattacgggcatgcaccaccatgcccggctaattttgtatttttagtagagacggggtttctccatgttggacagggtggtttcgaactcccgagctcaggtgataggcccgcctcggcttcccaaagtgctaggattgcaggcttggcgagagccacctcgccaagttgttctttaacacacatttagcatattagcactaggggcctggctcagtagctcacgcctgtaatcccagcactttgggaggccgaggtgggtggatcgctttaggtcaggagtttaagaccagcctagccaacgtggcgaaaccccgtc

SEQ ID NO: 2722 - DNA, 4001 bp, Homo sapiens
agcatcattaagcttaatggcttacaaaacaagtgtgtctatgccaaggcacacagcgctcaacgccacaaaggcaaggacatacattttatgcaagctgtaccaacatcacaggactgaggtttcaggggaccttttcacctctctttcgattacagaagtattctagaatatcaggggccaatttgaagacaggaagactcttggagatagaagtttcacattccaaaaatggggaggagatatcaagagccaatacagcagggaaacgtcaatctgacagaggaggggtcagttcagggaaaatccaagtgtgatgatctagagcccactggtgaagttttatcacggcagagaatggcggttctgatccctagctgtgtgaatgtgaaccaaagctcttacggaagccctggcagcgggatggactgatttcagagatgaaaggaagcaaacaaccacctcgccgagtaagagctaacattgctgagtgcttactatctgctaggcacactgacaaactgagaaccagaaattaaataacatgctcaaagtcacacagctagtaagtggcagagctaagttacaaacctaggcattcagtgtagctccagaggccttactctcaactgctgtactatgctgcctctgcacagaagatgaagacgacttcaagaatgagcaatgctagagacataaaggggagaggaagtactgttaaatgctaatttccttctaccttgggtacaagcgggattcatagggcatttggtagaacacctaaaaggtgtctgcgtccctaacaggacagagaaaagctgcaggaagcaggaaaagagcagaagatagagtcggacaggccaaaatgaataagtgaactgccaagtgcacagaaagcagtatctcagtcagggtcaaacaccacctcggaagctggccctactcaataacaacccaggagataccatcgaggcttgggacccacggaaagtatctaaagctccgagagacagagaaaagaagtgtgggaagtagggctacaaggagcactttaggtggctccaggactcacagcaactccctcgccccaaatttcaagaaaacgagacccagagttaggtagccaactagaaaagcctttcttatgtcaccagagtccgagcctgggtcttcccacctccgatacagtgtctccatctacctttcccgttctcctggctgagaggctgcaacccccagcaaccaccagggcctggtacattcagtaggcactaaagacgcgtttatttaatgactgagcgaatgagtgaatgaattaaaagtactagggaaggcgtctgcttctctgcacgctgcggtgagggtcagcgagtgaacatagtgagtccctaggcgggcacaatatgaggtccccaatgtgcctgtgccggttccaagaagcacacgtctttacagcccgcaaatctcagagcagccccagcttccaagtctagctgccgaccgcgtaaccacggccgacctgcactcgtttcacgcaagtcccgatcatgcggggctaaaaaagaggtccccgacgtgggttcgcgggcccgaagcaccctgggacttgtagtccccaaccggccagcccagagactcctctaaagccccacgcagccctcgccaacggctccagcgccgtgctcgggccgagccaggccgcggctggctggggtcgcccctaagctggggatctgggcgaggacagaggcggcaagcaaaagagggtcctacagagcaagcccaggccgagcggcgccggccaccggccagatggcagctgatggcgacggatgcgcgagacgccactcaccatcattttggaagcttattcagcggcccgccactctcccctcttctccgagaccgggccgcccagcaacccacaatgcctcgcgcaatagaaatacccagaagcttgggccgggagaggaagagaacggaccacttccgctactctatggttcgttaccaccgactcggtgcggctagaaggacctgaggctgggcttcggggactctctagtgaggggcgttcattaaagaggggtcgccgcatttcggtcgtgcttcttagagcacggagggtctttgctcggcccgcatcacctactaacttaattccaccctcctccatccccggacgccagaccaaggaatgcaataaaggcaaaagtgtgggacgcaaagtgtgggataggctggtgccaaagcactttacgtgagcgatctcatttaatcctcacaaccctattgcgttggtcctattaaggccattttactgatgacagaaaggaggctgagaggtcaaggtgtccagtgtcacagttacatagtcagtgtcaacgggacgagcgtgggaagctgcccccaatgcccgttttctggctttgcactggccagaggctcctcgtggatggcgtgcgccaggccgcggccccagcgcctatccacggtgagcgcgcaagcgttggtggcactgggcggaagaccccctggcgcaagacgagtgccttcccgtgaaggcgtggggaggagggaagcgcagctgggaggagggaagcgcagctgggagaaggctaatcgtcgtcaatcgaggcggccttggagtggacaggaccgagaccgcaagggttaacggcctcgactatcgacagctgaagcaagtccggctacgggcacacctccagtgcttgtcctccctggcccgcccaccgccagcgaggacccggagagtatgctggggcggggctgaggcgaaggccggttgtagctgttaagagtttaagccaatcagcccccggctccacttctctcgaccaataggaagtaggctaaggcgcagaggcggaaagtgtggctacatgagcaggcgtcagagccaatcagccttgagcctcgttcccgtcgtccagcccgcggcgagagcgggtatgtgggcgggaggccggagcagctgtcaggctgaagtcctgcgagcgacgcgcggcggggcggcgagaggaaacgcggcgccgggccgggcccggccctggagatggtccccggcgccgcgggctggtgttgtctcgtgctctggctccccgcgtgcgtcgcggcccacggtgagcggcaacgggtgggactgcgttgcagggcggggctggccgtccagcttgcgcgcgtctcgggttgggggccaagggtcaccttggggaccctgcgagttcagagcaggacaggtctgggagcgggcggccggaataagtgggtggtggtccaaggacataaagtgggcgcagcctgaggctgaagctctgactcctcaccttcccacgacaaagcagatctccccactcgcccctccccgcccactagcgccgacccaggtgacttagggtgcgaccagaagggacagctaaggaaggatactacaggctggagatatgtatgtgagcattcacatgtacacaggagcacacattcctacacgtgggcacacacgcacaaaccgtttacacctacacaagcacataaatgtatacatctatgcacataagtgagcacatacgtatacccacaacttacacaaataagcacacacaaaggcaagcaagggttggggaggagggagtgagtttgacgctagtccaggaaggctttctgggggtgtatttgtatccgagagggagtccccactcccaggactgtatagcccagtgccaagccatgggagctctaactgatggctgtgatttgggcagtaaacaaagacagctaaagccttaatgccatccttggtacacagtagtgacttggtagtttgttgatagactaacagacttgtgacagcagttttctttttttcttttttttttttttgagacggagtcttgctctgtcgcccaggttgcagtgcagtggcccgatctcggctcactgcaagctccgcctcccgggttcacgccattctcctgcctcag

SEQ ID NO: 2723 - DNA, 4001 bp, Homo sapiens
actggtttttaacttcaggaactgagaacgcacataacccaggctctcattcaccatctggatctgaacgccagctgcctccatgccgtcactattctttttaatttcagaatccagggtgctgatgttgtccacacgacctttcagcaactggacattggtctttacatctgatatggtgcccataaaccggggatctgggattgagaaagtcaggaggtcagctgaggggagtcccagggacaggagtgggggtgttgtcaggttgatcaaaggaagggaaggaataggctgaagcttcccaaagaaccaagacagtccaatgggccaccccaaccctccaatcattcattaacgtacaacaaacgtgcaatgggcacctaccatgtgccaggaacacaggtggatacagataatggggagattgataaaacacaggctctctgtgaaaagatttcacaggcaagcagaagcaggagttagaaaccattcctgaattttctgagtgttcagggaacatttgataaagggtgccctccatgagccccaccactgtccccagaacttgattccccctagaccccaccccttggttgccatccctctgttttcagaaacccctgcagtggccatctgctaggacagcaccactcccccacatctgtccatgggcccctctgtgaccatgggaagaaccagccactaatctggaagtggcttctccagagaacatggaagaggagattacaaaactgtttctccccttcccttgccccacccactttcacattctgctcaggtcccaggcctgggtaccagagagaggatcaaagataaaccaagaggctcaaaggcgagccctgaggaaaatgcgatgttagaggccaggggtctaggatggggcaagggggactctgctcagagcctacaagtctaagcccaaatatgtcccgaggccacagagggagaaaaaaaaacccaacagcttcttgggtccctttgctctgcttcctggagccctggcaggaggaagaaggctctgccagcagcaaaggccatgaagcctgacagagccagaaaaggaagaaagataaaccatgcaacatcaaatgagcaggaagcctccctagatgtgatcttcacagggacaggagaatgaagacagcaccaacgagtcctggggagaggggactgagtcatggagatctgttggctcgttggccaggctctccatctggtgagctggggccaatgatacatgaggctcggtccttcacagggtcaggagacattgcactgtcaaggactgtccacaaggctctagatccaaggagcagagctcagattggtggggggtggacggggagaaaatagcacaggatgtaaaactagatcaatgtttcctgaggacaaaagaatgtatccttgagcaccaatgtgcaaatgctaatcccaataatctcccagaaattgggagggaaagagcatcagctcaccgtactgggggcagcacagcctgttactgcacatggaaagaggaggaaggagacaaatgaaaaagccacaggcaggagaaacccggagagcagggaagtggtctcgatctgaagggagccggctggccacagagaggggctaagcccagacgatgaaacatgaggacttacaaaggacggcctgcagcaggacggaggcgaccaggaccagcgtcaggcagattaatgcagcacggactgtgggtgttttccccgggaccagagatggaccggacttgggaggaggctctgttggaagaagaagaaaatgtgtgttgaaggagcagcaaagggcaggtttgcacacagaacacggagcaggttctcagcagcgatgtggcttgcctcggggccagagggagatgttctgtttgtccacagtgaagtgcgcatcaggggcctccttctccacagtcatcctgagtgctcacccttatcctgggagcacaggtgcttctggctgcctgtctctccaagggctcttatctagaggaaacaggaagtcagtcccacagcaggtcaccatatcatcccaacttccctattcctgactagataccttgtctggcttactcccatcctcagaagtctgagctttcaggaagaggccatttgttgtcttctctgggggtctgttacatggatacattaaccatcttgtcccaaacctatcccatttctcttgtaagactctcgtcatccatccacccatccattcaccccacaaatacaggctgagtgccttctaggtactgatgctctaccaggcatagggccacagtgatgaataactcgcagtccttgcaccaagcagctcatagtctggtaggaaagacagacatgagcaaataaattgcaaggtgatgagcacaagagacaaatatgcccagttcaaagaagcatatgaaatggagtaatgggaaaaaaaaaaatccagtagaaagataagcatatgccaaaggatggagcataagatagcatggagtgcttggcaaattgtaaatagttgcaatattgctggaatgtaaaatatacattccaacaggaaggggatgcacacggggttgaagaggcacctggggtctgatgatgaagatccttctgatcatgtcaaggagctggacctctggcttgtgggtgacatggggccaattaaggacttcaggcaggagagagacaaggacagggacactgtagaaacatcactctgatcctggtgaggagcagactggtggggagaagcctggaagcagagataccaaataggcaaccattgcaatagaatatcctgcttcctgttattaatgcatcttggctgatacaatatccctttataatatgcaacttggagattcaaagtgtaaacctaagacttgggttctcctccctgcttcctgcaccatgtgagattttcaaaaaaagtaggggcgctcagcaacctcagactaggaatcgttctgtttctctctcctctctctctgtccgcacctcctctctccttctttgtagtcctaaatagagagttccatatgtgcaagaagctcagggcacagaagagctgatttgggctcaatgaaggactaaattttctcctgggcggcttctcatgctttgaagaagtctgccaaatctgagaaatttggcacatggcagactctagacaaatatttcttggaatataggaaagaggagaggaaagagggagggaaggaaagaaaaaagaaggaaattggtccagataattggaggatgggtgaatggatgaatggatggatagaggatgcatggatggatgtgtgaatggtaagtgacttggagacttgatagctgatcatgccactcagacatttacacagtctggggcctgggatctgccttctagaagctgctgcttttttccactgtctccagaagttctcattcatcttcaatgcaaaagcataaggggaagtgtgatttactccttacccaggaatgaacaaaagctctggccgcaggaaaagaaagctgtcctgggcctgctgaggctgagccagtggagctggatgacagcctgtatcagggaccaggattagaggttaagttaacagggccaaggaaatatctacctatgctttcaggggctactgccacctttggtacttgggaggatagtggctgcacgctcagcccatgcctatgtgcagctcattgtagttacaggcccttgatgctctctctccagctaaccgggcctcaggctggagtggcttctcggactggatgagggaacccagagaggaccccacactgggaagctctgggaaggaaactgggtagcaaagatggtgtctcatttgttctgtcccatcgcttccctacccagcctgtctgtaacttccaggcctgctgtctgctctaaattttaacatttgatagtcccgaatatgagggcctggctccacatcactgcctgcctctgggtgt

SEQ ID NO: 2724 - DNA, 4001 bp, Homo sapiens
accaattttaaatagttttcagtcagggtaggcttcccttgactgtctaacaaattaagtaattttaaatattctttaagtttgagagatctcttaaaaataaggtttgacctttttaaaataaatgttaaagattcttgtagaatatatttggtagctgtaaacgcttggtaccagatctcattgccaactcatgtctttcattatatcaacacgttttataaatatacacaatttgtgctcactggtacgtcagaccataaaataaacgggtatatatgcaactactgtacctctgcagattgggaaattatactctttgggctatgtacacttaatgtttaagaataacaacaaataatgcagtctctgtactgccaaaataagaaagaaaattgaggatactggcttttcaatgtatctttcagggaaaaataactgtccttatttaagcatgactgttgacccctatcagtccagtttttgaaccaagcgggggcctttttctaactctgagaacacgttgaatgagcatcttactccagcccacccaagtaacaaattctttctgttaggaattgtgcttgtgattttccgaagttaatttaaccctggatttacctgagtccatgaaattacaaatcacaccatgttagatggaatagcataataatcaacaacaccggcactggagtcagactaaggtggttcagaccctgcctcctatagctgccacctgtacatccttgggcaaatcccttaatgtgcctacccctcagtctcttcatctgaaatgaagttaactgtaatacctaccttctagttacgagaactgtgtgctgctcaaagtgctagatgtattatcctcctcatcatcgtcattgggaacttaaagaattttaatctaagaaaatacattttggccgattgtaaaagaaaactaatttattaatattggtgttgtagcagcttctgtggtgactccagaattcatgttggaactcattcaattcaggtagatagagtaattacagttcacatttatcttgaagcctgactgagctaagcccttcgcatggattatttcattttacctcacaatgaccttgaggtgaggtttattattattcccactttacagttaaggaaactgaggtttggagagtttaaataatagctaagcctaagcttacctagtgagaattggacctgtgttaggaacataggcaacctaaattcagagcttccagagccaatctacttacagcagctttcttaaattaaaaaaaaaaagaaagaaagaaagaaacgatacataaattaaaaattattggccgggcatggtagctcatgcctgtaaccctagcactttgggaggcagaggcaggtggattgcttgagctcagaagtttgagaccagcctgggcaacatagtgaaaccccatctcaatttaaaataataataataataataaattcttgggacactatcaactaatagctagagaaactaatagcttagaaaatttatttccaagggacttttgttaagatactatattgtagtctgagaatcaatgattttcaaaataacacattgccctattacagcaaaactacacttcaaatgttcaaatttcacacattgttagaaatttaaaataaactaagccaattggaagacctcaaaaaatatttacagaaagaaagacattaacattgtttacctgttacttgaattgaagggaataagttgagagccaagagcagcctgagcatctttgtcctgacgatgggctagggttccagcccctcctccccgaggaacccgaagtgtgaggggaactgaaagacgcacctgccaaggcctgagagtctccgtcatccacggccaccaccaccgccaccatccccttagggcacatgatcaaggcactcaaaccacaaggcatcctgactgcagcatttcacacaggatataacgttgttttgatgactttagacttttacttctatttttaaagactttttttttgtcactgaaaaatagtcggtcactacatgatgggcttatgggaattattctttattgatggatatcaagagttgtgtaaaaggggtgcttgaaatccagcagagattaaaggggagacaaagtgttcttaagaaggaacaggccgggtgcagtggctcacgcctgtaatgccagcaatttgggaggccaaagtgggtggatcatttgaggccaggaggtcaagacgagcctggccaacatggtgaaaccccgtctccattgaaaatacaaaaaattagccaggcatcatggtgggtacctgtaatcccagctactagggaggctaaggcaggagaatcgcttgaacccaggaggtggaggctgctatgagccgagatcatgccactgcactccagccagggcaacagaatgagaaaagaaagacagaaagaaagagagaaagaaaagaaaagaaaagaaaagaaaagaaggaaagaaggaaggaaggggagagagaaaaaagaaaggaagaaagaaagagagagaaagagaaagaaagaaagaaagaaaagaaagaaagaaagagaaagaaagaaagaaagaaagaaagaaagaaagaaagaaagaaagaaagaaagaaagatggaaagaaagaaagagggagggagggaaggaaggaagggggagagagagaaagaaagaataaagtctctagcagaggagagattttcataggatggggacaggttgtgtcaaaaagataatggtaagaattctactgaggaattgggaaacatctgcataaacgtttaaaggagttacaaatattagaaatgtaacatttgtgtaggacataaggtagccctctggagcatttagcacacagtgcttgatttatgtcaagcctcctccaactcacttctaggaactttgcaaaacccattctacgtgcaagcagccagccagctgagtatctgggggaggttccctaagcaaagggaaagtcaaaacaacattctatgttcttagtgggacagtaaggcaaccaaaagccccttggtgtctcatgctctctatgtccctcaaggttaagtaatagggcacaaaaggaggctccgtggcaggatttctgagattcataaccaccacccgactgcacccttcttcaactcccaggccctttgcagagagggttattccaccagcacggccaactgctctcttcttccggcacctacgtcagtatcttgtactcaatgacttcttcaaaacttttccagtaatttttttcttctttttgataatctaagctttgtgcaattactctagttgggggttttgtgtatgtgggttgttttaaaagataacttgtattgctttttattctgactataaaagtaaggcatatttcattgagaatgtttagaaaaattataagcattaaaacaagattcatccacattcttaccaccctaatataaacactgctaatattctggtccactgccttccacctgttggtctgttaagatttttacatgtttaatatcatgttttacttatagttttcatcagatatgtactattatttgttatatcttgaacattttcccatgtcatttaagtatctttataaacattatttgtaattgatgcataatattccattctctaattatatcataaattgtttaacaaacccctagtgttgttacctttttttcttcgctattttaaaatgctacagtcaaactctttgatgacctagctgtaagaggaggcaggcttcatgtccctccctcctgatctgataaatgacagatcaaaagtatttcctgtcctggtagaccttctttgttcacacttcaattttcccacaaacacagtctttgtgaacccctcttactaacacatcttttggtcctttggagaaatttgtccttggaaatgattcactcacacttctgaactataggtaagtgacaaa

SEQ ID NO: 2725 - DNA, 4001 bp, Homo sapiens
gcttggatgggagatttgtaaagtattatgaaaaacacacttagtttttcagccctataacattagcatacatatgaatgtgttcagtaaccataaacatccaatatacataaggtggtattcatacgttttctggttgcaacaattacccttcattttgtatgaagagaataaagggaaggaaaccaagatgaaccacgcctgtaatagggactagacgtggagttcccacttaatgctcccaatagccccatgagtaagtattatctctgttttactgaagtgcagataagttggttaactagctaggtcaaagctcacactcatttccaaattaatccttaaagcttcctgactgggaggagctgattaattaacattaatttattcatcatgcacttttctaaagctcttgaaaagcctattgatccacactggacttatcaaaggaaatgcacaaaaatttccaaagggaaatttgccctctattgctggtcaaaacagcttcactgaagaagagacataccaaaatctagaaactgattttctttaaaagtctgacaagaaagaaaaatctgacaagaaaattcgactagcctaaagtacaaatgcacagcctcgcagagggtggtttacatgagagttgagatgttactggctcgcaaaatgagggtgtgcagaaggagggttcagagacagcccagctttgtcttagacaaaattaatgttcccagtctgaacaatgtgaacatgggcacatcttgtttctgcccctttgataggcagcagatgtcacaaccagtcataaatgcaggtccacagaagttttcaagaaaggaaccttgggtttgtatccaagttctgagctgctgctgcctccaacactgaggtccactgaaatattcctgtcagtagacttcgagcaggcagttattataaaaacgcagtgaaatctggggcaaggggtggggggggggaatctcttgcattttatttaaatctcttgcactttatttaagcccacacaagtactcatttagttcttgtttattttgctctttaattcctggaattattcagtcagtggtgtttttggaagtctgtgttctccagagtctccccatccacatatttttgacatgcttgtatggaaattttttaaaaataaagaccacggtcaatagaattgtgcattttcctcacgagtcgttttgtaaatgaatgatcacgtgtgtgatttttcagatgtcacttgcacaacagcagactagaactttaaaactccttgatttcagtgaaatccaagctttgcctattcccgttcctcttccatccaggggttatttggctgaactgttttcctgtttaaacaacttgaacaccaaccaactagacaaacagcgctgcttgcaaaagagggcctacttcctccggcccccacccccatcccagcaaccccactccggccgcgcaccagcaggggaaatcgccaccaacgtccccgcttctcatttcagcccgaaattgccctgaaacggcgcccgtcgtgcgactccaagtccctcagttctccggccaactggcctaatttgggggttccctccccgcggagtggggtctgcggtgaggatgtggactccgaggaagacagagccctcccttattctcggccacctcccctccccgagggcaggcgggtgagaggtgacccggagccaggacccacgggggacgggcgtgcagggaagggcgggatggccggccgggtgttgcgtctgcgggccgccctcgggtgcgcggggacgaagagcgtgcgttgggaagggggcgaaggcggtcgcgcacggtcccggcgagggactacgtaagggcttacccgcgacggcagcagcggcgaggcccagcaacggcagcaggagcgcgggcagcgcggcccggagcatgacggcgggtgcgggtgggcggcagcggctgcgcggccggagaggagcggggcggggcgggagcgggggcggtgcttctcgcgtgcgagtttaatcccccccccgggcggaacgtgaacggcactgggggctcccaccaggagaacccgggtgtcccgtcccgcaggagcggctggcgcgcggccttctggaacttctaatttttgttttttaaacttttcatttgaattgaaataatttaggactttcgaaaatgttgcaaaaacagcacaagagatttccgtaacccttcagccagcttctctaaatattgacattgtatataacgccagtgcagtgatcaaacacagggcactcgcactgggataatgcgattagctaatctacagcacttaccacatttcattaattgcccctctaagggtccttttctgttccaagattcaatccaggatcatacattgcatgtcgtgtctccttagtctccctttaatctaggacggttctctgtcattctttttctttcacgatcaaaccacatttaaaaagtactggccagtcgttttgtagaatgtccctcagtttcattttgtctgacatttccttctaattggattcaggttgcgcttttttgggaaagagttccccagaagtgatgtacgtgctcgagaaggacaagatgtcgatgtctcatcactgatgttaacttggatcagttggttaaggtggcgtttgccagccttcttctttggatctactggccagaatcctccttttcaaagacccctttcagtggactatgtctcttagacaacttttctctgttaccagctcctggatgaagagtctttaagctatgtttgctacaatgtatgcataaactgtgcaattatacttcacccatgagggcctctggacaacactagccagggtcaagcaagggtgcttgtttaagcctcatgtcattggcaaaagagttctataaaatcaagtctaaactcaacaacgtgaaaacaaatgacccagttaaaaaaaatggtcagatgatctgaatacacacgtcatcaaagaagttatataatggcaaatagatgaaaagatgctcaacatcatatgtcattgctgaattgtatatgaaaacaaaaatgaaataccactacatacctattagataccagaatccaaaaacactgacaagaccacatgctggcaaagatgtggagcaaaaagaactctcattcaatgctggtgcaaatgcaaaatggtacagccactttggaagacaatttggaagcttcttccaaaactaaacgtactcttaccataccatctagcaatcacaactccttggtatttatccaaatgagttaaaaacttacatacacacaaaaacctgcacatgaatgttgatagcagctttattcataattgccagaacctagaggcaaacaagatgtccttcaataagtgaatggataaacaatggcacatccaaacaatgaaatgttactcagtaccaaaattaaatgagctatcaagccacaaaaagacatggaagaactttaaatatgtattgctaagagaaagaagccaatctgaaaagactgcatactatatgattccaactatatgacattttagacaaggcaaaactatggagacagtaaaaagataaatggttgccaggggttggggtgggaagaaggaggggatgaatagatggaacacagaggatttttagagccatgaaattattctgtaggatactgtaatggtagatgtgtatcactatacatgtgtcaaaacccatagaatgcacaaaacgaagatgaaccctagtgtggacaatggactttagttaataatgtgtcaatattggctcatccactgtaacaaatgtacctgctaatgcaagatgttaataattggggaaactggggtatgtgtaaggaggtacatgggagctctgtaccttctgctacattttttgtatacatctaaaactgctcaaaaattagtctatttttaaaaaaataaaatctgaccctttccaactct

SEQ ID NO: 2726 - DNA, 4001 bp, Homo sapiens
ggaaagtcaagaagtgggagaagtcaagggctctctcctcccttcctccttgtccttggcctgcagcaactcctctttctctttttgtggggacagactgaagaggatttcttagtatggtttgtaccttcccagtagagcaggaaaaagaggaacgagctgctccctccacacctcagacgctgaggtcaactgccctttgggcggggcacgttggctcacgcatctaatcccagcactttgggaggccgtgaggggagcatcacttgagcccaggagttggagaccggcctgggccacatagtgaggccccatcctccggcttgcaccactcaaattccctcgtaaagtcacacggggagcttgcccccagcaaggtcgtcagtttgcaaaacatgggagtgaaaagctttatggtggagtgtaggttatttcatggatcccaggccagcacccaaaagaattaaccatcttgtgcaaaaagaaaattttccactacttttttaaagtttctattttgggtaaatcgtttcaagataacaaattggagagagacctagagagaaatgagcctttttaagatgcagtttattttgccccatgatgtttttgtttttgtttttgccagagcctttactgtgagtaggacaggactcaggaggcctctgaacaaaaagaagcgttgaagcttcatttggttgttggaattgggagagcacaattggttggaaggaaatcaggttctctcaaaaaataaaataaaataaaataaaaaaaaaagccagcgtgctggcgcgggtccatggtccaagctacttgggaggctgaggtggggggatcgcttgagcccggaagtcgaggctgtagtgagccgtgattgcaccactgcactccagcctgggcgatagaacaagaccctgtctcttaaaacaaacaagaaacaaaacaaaacaaacaacaaaaaaattcatttgggaatgtttctgcgcgtgcccataagcagagccatgctataggatctcccctgtgccccaacaatcagcttcttacttggagggtagagaacggtgcttccccacgctgctgtgcaatggataggagctatgtgaagctggcgtatgggtggggtttgcaggcttcgtccggcttcatcgccggctgctgacccggcaccaattcctgttctgcaggtctcaccgcagaggggcacgccagccatgaggacagatgagggaacacgtgatgccacgatgggggtgccaggatgaggtgggtgcggtcgcggacaggcgcacgaggagcccagcggagcgccacccggagcaggcgcggaggagggctggggagggccaccaaggcgacgagagccggtgtgcctgaatcagcctaaaggagacggaggaggagtgtggtgggcgcaggggcagggagctgggggaagggcggggggctagcccaggctgaaggcaggcaggagcagggccgcgatgtcagacaagaaacggcagcagtgtgtttgggaacctagcaccaaccgcaccggtggagacagggtctgctgtagaggaggtggggccgggtcccagctaagtaaggcggtggatcttgcagcccttccatcctcagccgctcattctgcgcaaatctcggggccagccttggtggagccgtaaagcgtccaccagaacctggatccctccgccacctttcccatgaattcacctttctgtacacagcaagcgcctgagcggagacggccgacacgtttcccactgttaccccaggaaaccgcggctcctgagggggtcagggcctgggcagggggcagagctcagcgcgccgtactgaggcagaaacggggtccagagagggtggggtgggggtacagggaagggtcgcccgaaggtccctggcgcagggaggacagaggagggatctagaattcgtaggggagaagagaactcagaaaagatccggcccagcgcatttattttacagaggaagaaaaactgaggcccagggagggtaagtactgcaggtaactaggcactagcagcaggggcactagcagcagggacactccctatctcgcctgtcacccgcgtccagcaaaatctgatgccctgtcggcccagcagggggcggtgctgctttagttttggcctggtcggggttgagcggaggagggagcgacttcgaattcagtctgcacctgactgacctcgagcaaaaacgaagcgggcgcacgttaccgtcttccatctgggggcccagcagcctccatcttcgccctagcccctacagcctcgtccctggctggggctccagctccccaatttctcaccctcaccaccaggagctacttatcttatcacaggctcacttagattaccactaggagattaccactcgggtggggtggaggtgcggtgggattcgcattttgcaagggatcaaaagagcggctaattatggcatttctagcccaaggcattggccagagatattgcgggtaggccccttaacctcccagcatctcgcagtatctaccgattagtgctgagcctcctgtgcaatgcatccgtctatagatatggccagaatgggccgggcttggtgcgcggtggctcactgctgtaattccaacactttgggaggccgaggcggtcggatcaactgaggtcaggagttcgagaccagcctggccaatatggcgaaatcctgtttctactttaaaaacaaacaaacaaacaaacaaaaaacaaaaaaaaaactagccgggcgtgatggcgcaagcctgtagtcctagctactggggaggctgaggcagaagaatcgtttgaaccctggaggcggaagttgcagcgagcggagatcgagtcactgcactccaggctgggggatagagcgagactcccatctcaaaataaaaaataataataataattttttaaaaagaaagaaatggccagaatgccaaagctttaatggtgggtagaagtccccagacttgagagtctcgttctcccaactctccttccccgtcagaaagtgcgaagggactggaatggagatcctgagcggtcctgggtgccggggccccgaccggggctgagctggtcccctggtcgggacggctgggcagaggtgccgaggggccgcgggcggcccttcgctggctcattcgcatccgcagcccctcaagaaggccctgggcccgcagggaggaagaggtgagcacccgacaggaaggagatgggcttgggggctcggggcgtgccctggggcaggtggagcgtccggcctctgatgtcccgcgcaggacactgaggtcgcggtgcagagaagggtcggcttgaggatctgacagccttgcccgcgttggagacggggaaaggctcgcagaactaaggtgcggggcgggggtgcgggtgccaaggtccctctgaggttcgtttggcttattcaccgatttcattccgctcttggttttagtttacctggaaggtcctctcctgcgctggctctgggggtgcttggaaccagagccccttagtcgaagcgcgtcctgctgccagctactaccaagtccttaggccgagcccgtttctctcctggtgatgtgaatcctcgttttttgttgttgttgttgtcgtttactgaagtcccgggctgattagacacagcaatggaagctgggggtggcctgggccgtgcattgaatttgtgactttagcaagtccctaaattcctctctgcctcacttttgctgtcttttttaggttaaaaatattttggagaatagaaaacagaacaaaacaaaaataatggcttatagtgccaatatggaattatagtcactcctaacattttggtatattgttttgcatttgctttgtttctattctatgcttatatatttttaatttttttccatcactgtcatcatatttcctattcaggtctccagcctgctttaaaaattttttaatcataaagtt

SEQ ID NO: 2727 - DNA, 4001 bp, Homo sapiens
ttggtggtcgcggcgctggcgtcgtggtgggcttcgctgcaagagcaacagagcgtggttgggggccaggctggggttatggaggcgccccagccccggcctcgcgcacctttccccacggggacgcctccccccggttttcctgggagaagggatagcagaggagacaggatggggaccccgggatgcgcgcggacccctgtgctcgggcctcggctcagcccagcgcacccggcgcccagagccggagcgcaggagccagctcccctgcacctggcctctctcccgggctgaaccagcaaccctggagcgcgggttgattgctgtccgcattttacccacgagcaaacggaggcgcagataatttaagtcatttgcccagaatcacacaagaatccgaactcgagtccagatcggccggacgtaaaaagccatccccagtccctactcagcctcgcgttagcctcagtttgctgtgtctgtgaaatgggaacagtatctaagtcgcttccaggtgcgctaagaggcttgaaagcagggcccaggtgtggaaaacaggttgaggtgaaccccaagccccacgcggagaggtgccgcaacccggcgcgcggacctggcaggaagaccggcacgaagtggctgaagtacatgatggagttgctcagggccgagcagaaatagtagccctcgttctctcggcggaagtcgctcagggtgaggacgaaggtgtcccccaacctcttgcccgagaaccgctgggtgtccagcccctcggccgccttgggcttgttttgggagaggtataggaggaaggtgggactggcggcggcgccgcgcggctggaagagccacgagcagcccgacgtcgggttggacagcagcacctggcacttcagctccactgtctcgcccaggttccaggtccgatccagcggcgacacccggaactggctcggcctggcggcgtctgcaggcggcaagcagcgaggctgagcccgcagtcccgcgccccccgccccccgcccgccccatcccctgccttcccgggcgtctcaaactcacggagcagcaaggccagcggcaggagcaaggcggtcactggtaaggccatgacgcgctccccaggacgctgcttggctcgaagctcgggcgcgaggggaggcgcgcgggagccggtggggcgccgaggggggaaagttgcgcccttcggccggcccggagcctgatttcgcatttggaggatgtgatgtcacccgaagcccccgccgaggagagtcaccctccttttcgcggttgtcgccttccagcccggcgaggaggctggggcccgtgaatagggccgtcgaggcagcctggccaggcaactgggggcagctgaaaactgcgggtttggggatgaggaaaagggcttggaaatagtccttggaaatggttgtcttgtgagagtgacagagtgggtgaagggagaccaaagatttcaagaagtgagggcgagagtaggcagcaaaggaggggagtgtcccttcctttgccttcactaaaggcgtctcttgtactgtcaccttgggactttttattggcaaaatgggcactgagggctgaaaaggaagaggaactagcgacctgcccgcttctgaggaactcgctagagcagccccagttttcaccgaggaaggaccctctcccttcccccaggagatttccatgagagcggcagcagccgaagctttgggtgtcggtgtcagtgcgctgctgacctcattcttccggcctttcatccagcggctaaactcaccacacagcctcatctcttcttggagccattgcaacagccttcaattcacaccagtctctctcctgatcagtcctccagccacgttgttataaaaattattattctcacaaaggggatctgacagcgtcactgctgcagcctcccatggcctgcattgctggatggaaattcaacccccagcttggttgaccagcccttgggtgctggctcctcccagcctccgcacagccccctgccctgcctttcccatacacctgcagctgcagcttcacaggcttgaagtcattcaacccctgcgctctgtgctttcacgcccttgcacttgcggtccctcggcctggaatgctggtctgtttaagccctggaggcagctcctgtgctgtctcatttggacctcatttctttcacccccagctctgggtgctctgcagggaggtgtgggtgatgtgggtgaatgcttgggtagaggcggttttctcttttctgtccctaacacatgtgtgtccccttcctttttgtttctttaaaaaataaaataaaataaaaaagactggagtctcgctgttttgctcaggctggccttgggactcctgagctccagtgatcctcccaccccagccccctgagtagctgggactacaggctcatctttcctttttgactgttgctgtcctgaaaccttccagctccagtggcatgccctcttcccatttcttcagggtttctgagtctttccactttgaatcccatagtggctgcacctcacattgctactgcttgatcctagagacaagacacctggcattctgtgttccatgtgtctgccccacccattagttctgctgggcgaggaccatgccgagacttcatgatgtgtcctccatccccagaaacacagcatgggctgagctgtgcttgttgaactgcattctccttgtccttgtgaagtacaaacttaagtgttggatgggttctttgtcgttgttgctatttttttttttgagatggggtctggctgtgttgcccaggctggagtgcagtgtggcaccacctcggctcactgcagcctctacctcccaggctcaagtgatccttccacctcagcctcccaagtagctgggaccacaggagcacaccaccatgcccagctaattttttgtatttttggtagagatggggtttcaccatgttgcccaggctggtctccaatgcccgaggtcaggcgctttgccccgccttggcctccaaagtgttgagattacaggtgtgagccaccatatcagggcctggatgggcttttttttttttttttaattattttgatttcagtacctccttccagctccctcaaagcatccaagatgcttattctagcatggaacatgtaacattttatattcagaaatttttaaaaatgtcttttaagtgacaacagtgcaatatattcttgtacgaaaacaaacacaaagttccctgtctcaactctcctcactgtcacctgctccccacagaaaaccactgttacagttgaatgtgtcccttagatattatctgtacataaacagatgtttatacatcatcttagacacatgggattgtatgagataaatatttttttgcaacctatcttgtttcacagtagaaggagagcgttcagcagatgaagatccaccccattcttataaatgggtgcattatatatgggtgttccataatttaattctgctgttagtggacatttaggcgatttctcattattgcaacactagcaaggctgtggtagatataatgtatctgtatcactgagggcttgcaccagtacctgcagctttttcaaatgggagatgagggagttggggaagaaaacacctttacaatgatggttataactggcctatcgatgtatgcatgtgtgtgtgtgtgtgcatggtatgagggtccctcgctgtgtagacacagtgctgtccctcaactcacatgaatgagggagacaaggaagcaatcaagtccagacaggccaccaacacatcaattcttgctgtagatggtagtttgccattttgctcagcaccaccagcactgtatcaggagtgtcaaatggccctgctggccaaaggctacaatcaacagggtggtaaggaagatggctagacacgaaactgcacttgcccagtggtggaagcactgagggggccagagtcaacct

SEQ ID NO: 2728 - DNA, 4001 bp, Homo sapiens
gactttttgacttcgctcctggaccactcttagctttcgctcgcatcaagaatgaaatgatggggccgggtgtggtggctcatgtttgtaatcacagcactttgggagatcgaggcaggaggatcacttgggctcaggatatcgagaccagcctgggcaacatagtgagaccttgtctctactaagaatacaaaaattatccaggcatgatggcgcgtgcctctaatcccagctactagggaggctgaggcaggagaatcgcttgaacccgggaggcggagattgcagtgagccaagattgcgccactgcactccagcctgggcgacagagcaagactccatcttggaaaagaaaaaattattaaaaaataaaaataaaaataaaaacaagaaggaaatgatgcctggggcacaagtggctgctggacttcctcttgtttccccaaacaccacactgcggttccagcagagcagaggtttttccttgctttgggtcactcacttcttgggggagttaataagaaccaataatgccagtttattgagctgtgcctggcatggcgcatacattatctcatttgatcctcaccaaatcctgtgggggagatactgttttgcacctactttacccatgaggaaagagagactcaggagggttaaagatgtgctcaaggtcacacagtgatccagattaaaacccagcttgtgggaccccaaaacctgactttgaaccactgaattgaagaaacctgcaatcctctccctgatggtggttatgtgctcacgagcacacagtggggctgcaagtacacaggtgcccgaagcccttccgggaaaacccagaagcgactcctgtaagagcaaggcctgggctgtgagtgtgcatttcctctcctggctgagacacaccccggctcttcccggggcccacttgctttttgtcccctaggaactgaatactccgggctgtggccaaggccctgctgtgtgctggacatggagccaggcctcactgcatgttcccctcggtaacccaggaattccattctcagagggacctgatgtttctagatccatcagtaatgactttagtgctctgaacggcctgggctgtttctatttatgatgttgcactcactgggccagaacccccggcgggcaggccttgtcaccccctggcaagatgaccagctttgggctttttgggcacgagagcaaatcgaccagtttgggtagttttccgggtgtgtggaggcttcttccaaaaggcagtctggctgggcttattcagaaggacaatccagatgccccatccaactccaacaacccaacctccaggctgcttcctagggagccacgctacccatgacacccaacaccagcgacatcagggagaacgggagccagagggatcaccctgccctagccctccgagaactgagaacgcccgatgtttgtctgattgtactacaaacacttccccggaagtaataaaaatgtgtccacaggacccatggcctggccaaccttcctccgagcacatcctgcggggaccctgggcagggacctgtttccttcccctggtgacctccagcgaccctctctttccttccctcactcgctccccttttcactgcctccccttctcctgcgtccaggcttttgaggggaggtggcctcagtccaggggctctccggtcccccggggtaatgcgatatgggggtattttatttccacccttagggaccgtgcctgccaagctgcctcccgggcgccccgccaccgcgggctcgacgctgcaccctgccaggaccagggccaggacagccacttatcacctccccgctcaggccccgggagcgcagacccttgggtagcccgcgcgccgccgccttacctgtcagctgcgcggccaagaggagccacagccgcggccgcatcgtggcgcgcccgggacacctggccccgggggctcggcggagacagtcgcggctggggtgggtgaggagctggccgggcggggcgcctgggtcggggagctgggggggcagtggggagggcgggaccgggcgcggtggcggcgggagtctggtgttggggaccgcgaggtctccgccctcatcctcctagcattgcaaaggtctgggctgcgtttccagagcccaccaggaccctccgctttccagaaaggaggggacaccgccggcctcccccaggcagctgcatgtgtgtcatcgccccctgccccgggaggtgctcaggaaagggttgtgaccccgagtgacagtagaggctcagagaggtcaggatgtgtagtgcatggtggagctggccactaactcgggccgcttcttgtcttgtttgagtagcaattgaggggctcctgggtgccccgggctgggctgggcctggagtcagcaagccccaagtcttgccctcccttgccagggaggaaggaaaggtaaccggctgtgacactgagggaggtgagctgggaactggaggtgcagagaaggccccgacgctgtttgtaggttgtgggggtgcagcaagacctagatcttaagaatttcgaaggactgtgacgatcaccggctgcgccctgccggcgagtgccctggggctggctctatttgttgcgcgatccagccctggtggggagatttgtgaggggagacctggctcaggctgtgtcttcctgttcaaacgggggttagtagagagggggttggggaggtccagggagaactgggcatgcagcctgcaggggagagggaccccttggagggctgcgggagaggctccttgtaaatgtcaacaaagacccagccaggcaggtccatgggttaccctaagagcttagagtttatcggagaggaaatggcgtgtcccctgagatctaaagcaggcagccgggcaaggacactgtcacatttggtctccacatccagtattctttccatcccactcttgccccagcccctctgcccattgctggtgacagcattgctcatggctgagttgggtgcagagagttcaaaggcactgggggaaaagaagtcactcagcccagccagaggccagagtctcgctggatactgccttggctcccatacaatgtgtggtctttagcgaatggcttctttgactcagcgcaatgtttttcaggttcatccccattatagcaccatttcttcttattgttgagtaatattttgtgtatgtacctgtatataccacattttctttatctgttcatctaatgatggacatttgagtgggctactatatctactttttgacttttgtgagtaatgctactgtgaacattcttgtacaaatatatgtttgggtgcctgttttcaattctttcaggtatgtactcaggcagtgcaattgctgggtcatacaataattctatgtttaactttttgagggactaaccaactgatttccatagcagctgtgaccatttacatttctgccaacaatgaaagggttccaatttccccacatcatcgccaacacttgttattttctgtttttgttttgttccatcctagtgggtgtgaagtgatatctcattgtggtttggatttgtacttcctgaatgagaaatgatgttaagcatcaattcatgtgcttgttggccatttgtatttcttctttgtatgtgtattcaaagtatttgttgtttagaaaacacaagctacctctttctatccactctctcatgggcgccacagcattgcaaaaggaacaactttctcagtaaatgattaaaagttactcactgctttgtcaggtattgtctaaaatcatagacagggaacccctggatgcattagttatggaaactcttgcgtctgtgataaattaacctctaaatattagtggtttaactcaatacaaatcccctgcattgttctgtgacattcaagtgcagttgtgccagggagtaaggagtatttgctccactcagtcctgcaggggaccaggg

SEQ ID NO: 2729 - DNA, 4001 bp, Homo sapiens
ctgcactctggggcttttactcctttcaacacagctgcgctcccggctttgatgctgctgtccacgcagcttgtcccagccacagcctggctctcagtaatgtaacattcaagtgcatatttatttttaaactgacctctcctagactgcacagtataaaggagatcctgcccaaaaatatgctactttctatttataagatgaaacacatgcctcccaaagtcgagagagggatagagtataataattcataacgaaaaaatggccagatccattcatcctcacatgtctgatacttgtctgtgtcaagccacttagtttcaaggagaaagggaagaaaacaaaaaacaaaaaaccttgtaaacgtctcagctgttcaccgtcaaaaaacaaaaaagtcaatatccagatctgcaggttggcgccccactaacaatgtcctccattaagaaagaggagggcaccgggcaggcgatgccacggcagagctgtgcgatgcacccatgtgcggccctggtaccaatccatgatgcgaggggcgcggtagccaagcgcggcttgttctcagatggaaaaatgctatacgcgcccagaatggctctgccaatagctcggagggtgcaatgtggccgcgcagccccaccctgaaaagtagtgggcacaaatggtggagctctgagtcctggtcgtgccgccggaccccctcctggcttgctttatgtccccttcgttccgttggacactagatgggaaagcgatgccctgggtatcccgactccctgctggtttcccagcctaacaccagcgcacgccggaagcggccacggccgcgggcgggacagactcacagacaggtagagaggaaggagccctgggctgccccgactcaccggccgccgctgaggatcccagccgctgccccgggcctcccgcgggcgcacgcaatccctgccgctgtgcgcagatccagccgagtctgccggcgtggtgcctgctcaccgcattatccgctccgagacggcgtgaaggcgccccaggccggtggccgggtctccgggctagccccgcgctgcggtcccccggccgcgagagaaggtgcgcgcgactgagcgcggggcggccggacgcgaggactgaacctgcggagggcggggcggcgcggggcggggccggcggcgcggggactcactggggcggggcggagggcgcgggcagcggggccgaccctcccagccgcggtacctgtgccctggcccggggccaaccggtggccgggcgcgcgcgcgggggggggtcaccgttggaccctcggaggacaatgggcgcccattgttacctccccagcgccaccccccagtaggcgacttctctcggagaagatgccgctttcgactccctaagcacaaagaaaggtcgccggacgctcggtttaaagagggacccggaggtgctgccgcccgggtgcacggggacaataggactccgcccgcaccccggactcccgcactaaaactcgtgcgcccacctctcccgatcccaacaggccgacctagctgtgcgagtggcgggcggtgacccgcagggaagcgaggccacctgagtgcgccgccccggccaggccgcagctccccaggtccctctcagcccgggctccggtgggcgcggagggggagggtcgcgttctgtcagtttctagctcgctcccctcagagctgcagccaaaacccggagagtggaataagcgccctgaagatgccggagctcccggctgagcaactggacacgcgacgaacagcagacgctacaggttctcctacccagagggaggcgtttcttctccctcagggtctttcaaaaggatttgcctaaagctggggcaagccggtggcggctgccccagacgcgcgacgaggcgcaagtggcgcagctgccggcccgagagagtaaaattcaggccgcggtggcacctgcgcccgccggtcacccggccaccgccagcgccgccgcccggcgcgcccctcccctccgccggggccggagcgtgaaccgggttaatgaatgctaattttcttaatcggcctccgtctcttcctcctccgcgagtcgtcggcctggggaaggagtaggcgacaggaaagggcggtgttttccggctgggaggtcccagcccgcatggtcagccaggggagggggctgggacccctgggagtcggacgctgggggcctggcctctgccctgagactctcgggttggatggaaatcctggcacaacgcggagaacctcccggataccttggctttgccgagagatatcagcttcaggtcatcaccgcggtgccctgggtctgtctgaaaccttagagggtgcgccttaagccgatgttgtaaacccaggctgactttaaggtgaagtgaaaaggaaacgcacacaatctggaaagcaaaatacttgggtggggtgttaaaagcctcaaagaaaaatagtagttggcaggtcaaatggccatgaggttggaagtcaaatacgaaactcggctgaagtgatgttagaagtttgacaagcaaaaacagtccgtgaagataagagacccagcattgtttcccttcttcaaaagacaactcgtccaaagtttcctttggcagatacctggattctactccagattcctgagcattttacttgggtttcatatttcaaaatatatgttccatttggcactaatgtatatattttatatattaatttattgaaaaatattaaatgttcctggcctacttagaaaaaggtatttttataaatatttatgcatagttttcattacatagggtattttataagtccaaataatatgtgtatatatataaaataccacatgcaaaattccttttgaacacataaagacattcccgacacacatgtcttgtatgtaatttttttcacgtgatctattgttagctgctgttaaaagcactttatttctacatggccaaataaataacttcttttacagtttttgcaaatatagagtggcagtttgtctgaaacggcatttttattctaaaacctatttttacttttctacattatcccttgccttttagaggctttctctccctctgccgtttttaaatgagacttcactgctggactctaaacagttatccaggacctgctcattcaagggcctggtggtttgatttatcttggctcctttggcctcgcctccccacccctcccctgccctcccctccccacccctccgcttccctcccctccccttcccttcctttccttttttttttttttcccccagggtctcaaactcctggcctcaagtgatccttctgcctcagcctccgaaagtgctgggattacaggcatgagccaccatgccctgtgcctcacgttatttctttgtactgaacatcttcagtgagtaactgatccctcatatagtgaattattcttccaaatgagtgcatttcctgtgctaactatgatagcttgtagagttgatggatttaggtttcaacatgttatgggagtctactaccggaagagaggaaaaagctttgcttcaggaagattttaggagttttgagattctgctgtgaattttggaaaggtttagccttaaaaacatttggtggtaaccttagaagcctggtatctgtagaccacctgtcaggcccaacagtgggctgtttttctattagtccctacttgggagaaaagccaagtagtattgtcagtgcccttgctgtccagaaacctgtgatctacctaagtgcagagagcaccttgccagtgtacacaagcaaatgctgaccacattctagtctcttgctaccaagtatggtcccaggaccagcagcaccaagcctcactccagggctaccaagttggaatcttcagtctaatgaaatgtggatagtttgcgtgcagatttaatgtttgagaagcaccgtccatgagtgcttggtggttctccacctttca

SEQ ID NO: 2730 - DNA, 4001 bp, Homo sapiens
tccctaaaactggctttgctattaaaatacagacatctgctgctctcctaatttttgttccttttaaaaggcagtactcccaagaaactcttggatattgtgagaattaagagctgggagatggggatggaatctttgtctccctaacacattcatcagttccctccctagagcccccctacaacctcagcacacagcagcagcccactcctccaaatacgccagggctggaaagattcatgttgcaataccctcctgacattcctcattttaattcgctcactttttttttttttttttttaaacaaaatgtaattacttgactgtcagcctaggctgcactctggggcttttactcctttcaacacagctgcgctcccggctttgatgctgctgtccacgcagcttgtcccagccacagcctggctctcagtaatgtaacattcaagtgcatatttatttttaaactgacctctcctagactgcacagtataaaggagatcctgcccaaaaatatgctactttctatttataagatgaaacacatgcctcccaaagtcgagagagggatagagtataataattcataacgaaaaaatggccagatccattcatcctcacatgtctgatacttgtctgtgtcaagccacttagtttcaaggagaaagggaagaaaacaaaaaacaaaaaaccttgtaaacgtctcagctgttcaccgtcaaaaaacaaaaaagtcaatatccagatctgcaggttggcgccccactaacaatgtcctccattaagaaagaggagggcaccgggcaggcgatgccacggcagagctgtgcgatgcacccatgtgcggccctggtaccaatccatgatgcgaggggcgcggtagccaagcgcggcttgttctcagatggaaaaatgctatacgcgcccagaatggctctgccaatagctcggagggtgcaatgtggccgcgcagccccaccctgaaaagtagtgggcacaaatggtggagctctgagtcctggtcgtgccgccggaccccctcctggcttgctttatgtccccttcgttccgttggacactagatgggaaagcgatgccctgggtatcccgactccctgctggtttcccagcctaacaccagcgcacgccggaagcggccacggccgcgggcgggacagactcacagacaggtagagaggaaggagccctgggctgccccgactcaccggccgccgctgaggatcccagccgctgccccgggcctcccgcgggcgcacgcaatccctgccgctgtgcgcagatccagccgagtctgccggcgtggtgcctgctcaccgcattatccgctccgagacggcgtgaaggcgccccaggccggtggccgggtctccgggctagccccgcgctgcggtcccccggccgcgagagaaggtgcgcgcgactgagcgcggggcggccggacgcgaggactgaacctgcggagggcggggcggcgcggggcggggccggcggcgcggggactcactggggcggggcggagggcgcgggcagcggggccgaccctcccagccgcggtacctgtgccctggcccggggccaaccggtggccgggcgcgcgcgcgggggggggtcaccgttggaccctcggaggacaatgggcgcccattgttacctccccagcgccaccccccagtaggcgacttctctcggagaagatgccgctttcgactccctaagcacaaagaaaggtcgccggacgctcggtttaaagagggacccggaggtgctgccgcccgggtgcacggggacaataggactccgcccgcaccccggactcccgcactaaaactcgtgcgcccacctctcccgatcccaacaggccgacctagctgtgcgagtggcgggcggtgacccgcagggaagcgaggccacctgagtgcgccgccccggccaggccgcagctccccaggtccctctcagcccgggctccggtgggcgcggagggggagggtcgcgttctgtcagtttctagctcgctcccctcagagctgcagccaaaacccggagagtggaataagcgccctgaagatgccggagctcccggctgagcaactggacacgcgacgaacagcagacgctacaggttctcctacccagagggaggcgtttcttctccctcagggtctttcaaaaggatttgcctaaagctggggcaagccggtggcggctgccccagacgcgcgacgaggcgcaagtggcgcagctgccggcccgagagagtaaaattcaggccgcggtggcacctgcgcccgccggtcacccggccaccgccagcgccgccgcccggcgcgcccctcccctccgccggggccggagcgtgaaccgggttaatgaatgctaattttcttaatcggcctccgtctcttcctcctccgcgagtcgtcggcctggggaaggagtaggcgacaggaaagggcggtgttttccggctgggaggtcccagcccgcatggtcagccaggggagggggctgggacccctgggagtcggacgctgggggcctggcctctgccctgagactctcgggttggatggaaatcctggcacaacgcggagaacctcccggataccttggctttgccgagagatatcagcttcaggtcatcaccgcggtgccctgggtctgtctgaaaccttagagggtgcgccttaagccgatgttgtaaacccaggctgactttaaggtgaagtgaaaaggaaacgcacacaatctggaaagcaaaatacttgggtggggtgttaaaagcctcaaagaaaaatagtagttggcaggtcaaatggccatgaggttggaagtcaaatacgaaactcggctgaagtgatgttagaagtttgacaagcaaaaacagtccgtgaagataagagacccagcattgtttcccttcttcaaaagacaactcgtccaaagtttcctttggcagatacctggattctactccagattcctgagcattttacttgggtttcatatttcaaaatatatgttccatttggcactaatgtatatattttatatattaatttattgaaaaatattaaatgttcctggcctacttagaaaaaggtatttttataaatatttatgcatagttttcattacatagggtattttataagtccaaataatatgtgtatatatataaaataccacatgcaaaattccttttgaacacataaagacattcccgacacacatgtcttgtatgtaatttttttcacgtgatctattgttagctgctgttaaaagcactttatttctacatggccaaataaataacttcttttacagtttttgcaaatatagagtggcagtttgtctgaaacggcatttttattctaaaacctatttttacttttctacattatcccttgccttttagaggctttctctccctctgccgtttttaaatgagacttcactgctggactctaaacagttatccaggacctgctcattcaagggcctggtggtttgatttatcttggctcctttggcctcgcctccccacccctcccctgccctcccctccccacccctccgcttccctcccctccccttcccttcctttccttttttttttttttcccccagggtctcaaactcctggcctcaagtgatccttctgcctcagcctccgaaagtgctgggattacaggcatgagccaccatgccctgtgcctcacgttatttctttgtactgaacatcttcagtgagtaactgatccctcatatagtgaattattcttccaaatgagtgcatttcctgtgctaactatgatagcttgtagagttgatggatttaggtttcaacatgttatgggagtctactaccggaagagaggaaaaagctttgcttcaggaagattttaggagttttgagattctgctgtgaattttggaaaggtttagccttaaaaacatttggtggtaaccttagaagc

SEQ ID NO: 2731 - DNA, 4001 bp, Homo sapiens
agagctactaaatataaaggttaggtgtatgtgtaggggggtggctcacacctgtaatctcagcgctttgggaagccaaggtgggaggatcacttgagcccacgagttcgagaccagcgtggggaatatggtgaaaccccgtctctactaaaaacacaaaaatcagccggatgtggcggtgcgtacatgtaatcccagttacttgggaggctgaggtgggaagactgcttgagcccggtaggctgcagtgagccgtgactgtgccactgcactccagcctgggacacaatgaatgttgggagctgaaaaggatctcagatcccattttccagatgaggatattcaaggccccaggaaggtgtaatagactgcaagatcacaggggcaggaaggagaactcaagtctgccatcttcttaagcagcagtgttcatcgcattactgcaggaattaccaccctttactcatcaatctacctgcaagcagtcagaggccccagacagcctcaaaggcggcattctattggaagctgtccgagaaatacaggctgagctttaacaagtcagcacaagccaagagttatttaccaggcaaacgtatctttggaggaaaagccacaaaaaagcagcaaggcaaatagtcaagacggagatgaacttctttggcaggtaagtaataactaataccatttatagtaggcgtttttcgtgccaggcactatgttaagtacactttcacgtcaggtttaattctttgcaacaaaggtgctatcgttattctcacttagccaatgaggaaactgaggctcaggaaagcgaaatggattactcaagtcccatggtggctcagatttgaactcaggcatgtcaggttccaagaccagctacacatggttttcttcatccggaaagccaatgcccagctccaccggggcggcgactcagctctgaaaccacgccccatcgcacccacccccgcgagggtccctaacccctgatatttattttaaacatgtcattgtcttccgtttcacccaacccccactcttctaccctctccaggagcccgaccctacgttctggcttccgttagagcaaaaagtaacgttccactcagagcaacgtcctgcagctaagagtaaggctggggggtggggggtggggggttgggggttggggtggaggaagtaggaaacgagcaaatggtcggcgaacgctttgacccaccaagccctttaaatgcacttaaccaccgcccgggactacggtcgcttcacactgcgtgcgcagcccaagttctaggagaccggttcgcaagaccttaaacctcagacgcgctggccctcagcggttagaagcggacgcgtctcttgccgggcggggtgcgcgcccaagggccacccactgagcgcgggtatagacgcggcgagccacgcactggctccgagttgtgtgcgggaaagggctgggccgctgcgggacaacctcccagggggcaggcaggctggctctgcctggcaggcaaaatcgggaccggccagcgctcccggccgctgtccggcctttggcggacgcacgtgcctagggctttccagcgctgctagccatcctgcaaacgactcaagtctccacgccgcccgcacttcgggtgcgcacgccacgcaggaacgtccccatggccctcagttatcccaggtgcacaaaatcaggggcttgcccaagcgggcaacgcctaggcaggccaccagttaaggcagcgctaggctgcggagttggagagggtcggcccgcgcccgcctgcgtccagcacccaccgcgcccgcccctcgggttcgcccgcccagccctcaccggcacgcggcgagcgtccatgctggtggcgggtgcccagatcggcgcttggagcggggagagcggagcagccgcgcggtcagcggtcccacagcaggaggagcagcagcagcgcggctggcaggctgggcgcgccgacccgggcccggaggggcggggctcgggctgtctttcccgcgttgggacacaggtcctgcaagctgtggtaacggccagacatggcgcaagactaggtggccccctggaaaaaacacgacccccctatatattctgacctcaaaggatagccttgggcactcctaaaatcccctttgagaaaggggggctttaggggctacggggaccactctccttgtgcagctgcgcggtcctgagcgagtggcgcgaaaatggttcgtattgccccggggttagctgtctgatttgcaagaattttcgtggtggcggaggaaaagtggagtctggggggtaaaggagagcagcgtgagggtggcgcgggtcacgcaccatggcgtttagcactttcattgctgcgtgcggtttacaagatttaaaaaatcatagaatccagcacgaactccacccttcataatcgagttcaccgcccctggatgtagcacctcttatctgggaaccacaccattatctgaagcaataaaatgagttaaatcctgatctttctttccaaaaagcacaggaagccgacttgtttacttgtggttttcaaagtagaagaaaagccgcagcagcttgatgaagacgtctatagtatagttaacctttaacgattatctgttggggattgaaactaaagattgaacaattgtggcttgatgatcttctctgtcttcagaattgagaactaccctgagtcagtgcgaacgagaaaacttttcattgcccttttaaccaaacttggcattacaacgaaaaaatgaaataaagcgaggctttttgtgtgcgtgaagagcaaaacttgcttctacaagaaaaagtaaatttagtttctttagaagacactaattatactcttaacatttaaaacaagcgcttgaaatgaaaacattcgcatttccccctcatttcaaaacttttctctggggaataattaattcctttgcagtaagagagtgcatggacatactgtgttcctctcttggtgtactgaatacaaaaactgtgagcaagtaaataatgcccgaggacaatggattggaaggagtcttccagcctttcttaaatatacctacccagtaatcactctgccactgtgcaagggacaaagagctcaaggtctagaaggtgagtgccaggaggagaggctatcggtgggtggtgaaattacggaattacagggccctcagtaagtatttgttgaatgaataaacatttgggaatataattttgtgccactaaagctaaatatatgaaaatttggaattactagatccatgaagcaggggaagattaagtcactttgcctgtgaaaggttctgatagggaaatttttagtcttcctgggagcacaagaaaataatttggtgtatgtgttttttaaggataagatctctggtctattcgtctttttagtaatcaggaaaatgcaaattaaaacaagtgtcactggaaaggggtcccgatctagaccccaagagagggttcttggatcttgcacaagaaagaattcagggcaagtccgtaaagtgaaaaagcaagtttattaagaaagtaaaggaataaaagaatggctacaccgtagatagagcagcccgagggctgctggttgcccatttttatggttatttcttgattgtatgctaaacaaggggtggattattcatggctcccctttttaggccatatagggtagcttcctgatgttgccatggcatttgtaaactgtcatggcgctggtgggagtgtagcagtgaagacaaccagaggtcactctcctcgccatcttggttttggctggcttctttactgcagcctgttttatcagcaaggtctttatgacctgtgtcgtgtgctgacctcctacctcttcctgtaacatagaatgccttaacctcctgggaatgcagcccagcaggtctcaaggcttattttgcccagctcctattcaagatggagttgctgtagttcaaatgcc

SEQ ID NO: 2732 - DNA, 4001 bp, Homo sapiens
taaaaggggaattcatggatcttttacatatatttaacaaagttggttgtttaccaaaattagtacttagcttttggataagcagtatttttattctccagacattttgtgtattttgcaaatataaaaaatctaggatttatcatcttttgcatgtaccataatttgcagaaaccaacttcagtttcttctataaaggccaggtggaggaatgaagcagcaaattccaggttgccattacaaacctctgtcattgtgatttagggagggatataaaaaacctgttagagacgctttaccaactgtgcctcccacaggcctgaagagtgataattgttctttgggtcagtagtagagaatgtctattttctttgaattctctgaattgaatgcaagaagggaaaggctgataaacatttaagtgggctgattttaattagggcagggcaggtttgtttttctttcaaggctgtttaagttatcatgtctctctccctgtcggccatggtgtcttgcacaggtcctgagtgctatgaacttctatgatgtctcacctggctttataatatgaaattgggggggcgggactctcatctctaaagtctctcccagctatgtgtcactcacctgctaatccccttgtaaactgtcgcataagagccttcacccagcttctccaagttcaagtaagatgaggctgccccaaaagggaggctcttcctctgctctaggggaatggggaaaaggagcgggtgaaagggaagagagaaagaacacttttttttagtgttgactttttttccccagggaaattagacagcattgccagagcagacttgggaaggctcgctcagtaattgccctggaagcaagggccggcctccgtagacaagctcacattaaattcttcttgatcaacatcagctgctcactcacccactgaaaaccctgcctcagatcctcttcctgaaaacaatcactgttactccgtggccttttactcttgaacttctgggcacgggcagcttgaagtcccctggggtgaaatgaagtcatggaacatgatgcttcttttaggtctgttagctagagaaaaaagaaagagcagaaataaaatttatgcaaagtaaagattcagtgcctggtaaaaccattttttctttatttgcctcattttcactcttcaaatgttttctaagcttcctgtacccccaaaaggcacttttcttgaaagatccctgaaaaagaccataatggtatcaactcctgaaatactacattctttcttcacctaaaaatgtgtctttaacattcaggttaacctaaatctctttgatggatgttttgcaacttttttctgtttaagtctggcttttttttttcatgtccacttaatttattgctgtaggggaataatctatggcattgctaataatcatgaactaattactaaagtttcaaatccatagcataccaactaatactgcagcttgccttttaagtttcagctctgtaatttaggaccttagagattttgagagaactactttctcgacttcaagccaagtgagtttcgtgcagcccaaagccaaggattatttttcccttttggtttacaagaaattccccaaatttgataactacagccataaattttctgtgactttaatagaattttcattttattggtttagacctaccgcagaagaatcagatcccgctacaaaaagggagtgtctgaactccttggtttatcaatagagaaagatgctctctcctgggatacaaataccttgaacgcagcctccgtggtctcaggctgactcctccgacagctgtgtgcctcgcctccctctgaacaatggtagcagctgcatccaggctgtacagtctttgcacacagctcttgacccataatcttgtaggttcaaggagaaaacccgcacttgaacctttcccccactgcctctcctatccttgttctctccctttttgccagaggtcagcagcgtggagctttcatatgactcacatgatggctctgcctggagcagcctcacaacttcagcagtttttccttatcagtgcaagaaactccacatcagacagggattgcttgcattcagatgtgcacaactgaaaacgaggcagctgttattgaatagaataaaatttggcacagttaaggttcttgttctggccacaagttagtgctattggtatacatagtttttagggattgacattgcttatctatgcaatgatatttatatgatatcattgatggtgatattgatattaggttttcctggtgctaaagtggacatgttgaggagtatttttctccctaccttttatctgaaagcattttggttttcagactttaaaacaaatttgctacctagctaacttttagtagtcaaagaaaccacagaatcataaaacaggaaaaaagttgaaaatatctactgcatctctttgccttcaaacaatagtgtatccaatagtcttagaagggttgccattcattcatttattcaaaaactatgtggtgagcacctatgttgttcttaactgtacaaatgatgatattagccaatggtgatggagagagaggagtttgaatgaaatactttcttcctttcttgcttgcttccttccacatatatgtaattaatgtttactatatgtaaagtactatattaacagcacaacatgtcaaggaatctggcttaaattggtttgcagtctgtagtcttcaaatgcaacacttttctctgttagattcctaagattattgccactataatatactaatcataaagtgagacagaatggaggatatataaacaatcattattaagggaaaaaataagagttatgtctattatcacaacaatatttatgaatatttgatatttgaacctcatgatggttttttaaaatgttcaggtaatttaattatgagcatgtattttttcatttcaaaattgccacaagagaagagacttaagccaattccaagattcaatctagagatattttttgaaaaaaaaaaaaaaagaagaagaagaaaaggaagactacttggctcaaagaccattcaactttttttttttttttttttttgagacagagtctcgcactgtcgcccaggctggagtgcagtggcgcaatctcggctcactgcaagctccgcctcccgggttcacaccattctcctgcctcagcctcctgagcagctgggactacaggcgtctggcaccgcacccggctaattttttgtatttttagtagagacgaggtttcaccgtgttagccaggatggtctcgatctcctaaccttgtgatccacccgcctcggcctcccaaagtgctgggattacaggcgtgagccaccgcacccggccaaagaccattaaagttttgactgacaactgagagagtgagaagctagtttctcagaatatttaattccatttgaatttataataatataattataatacattttatcagaaatgctaatttcttcctaaaagattgtgaatttcatcacataaaagttatgtcccaggtcaagtttatgatgtcttttcttgcatttttttttttttttttttttggaaacagggtctccctctgtcttccaggctggaatccagctgggtgatcactgttcactgcagcctcagcctcctgggctcagtgatcctcccacctcagtcttccgagtagctagctgcaggcctgtgccaagacaaccagctaattattttttatagacacagggtctcactatgttgcctaggcttgtcttcaactcctggcttcaagcattcctcctacctcagcctcccaaatagctggcactgggggtgcacgccaccatgcctggaaaattcttttattatttgtacagacagaggtttcactatgttacgtaggcttgtctccaattcctgagctcaagcgatcctcctgcctcccaaagtgctggg

SEQ ID NO: 2733 - DNA, 4001 bp, Homo sapiens
tgcatgtaccataatttgcagaaaccaacttcagtttcttctataaaggccaggtggaggaatgaagcagcaaattccaggttgccattacaaacctctgtcattgtgatttagggagggatataaaaaacctgttagagacgctttaccaactgtgcctcccacaggcctgaagagtgataattgttctttgggtcagtagtagagaatgtctattttctttgaattctctgaattgaatgcaagaagggaaaggctgataaacatttaagtgggctgattttaattagggcagggcaggtttgtttttctttcaaggctgtttaagttatcatgtctctctccctgtcggccatggtgtcttgcacaggtcctgagtgctatgaacttctatgatgtctcacctggctttataatatgaaattgggggggcgggactctcatctctaaagtctctcccagctatgtgtcactcacctgctaatccccttgtaaactgtcgcataagagccttcacccagcttctccaagttcaagtaagatgaggctgccccaaaagggaggctcttcctctgctctaggggaatggggaaaaggagcgggtgaaagggaagagagaaagaacacttttttttagtgttgactttttttccccagggaaattagacagcattgccagagcagacttgggaaggctcgctcagtaattgccctggaagcaagggccggcctccgtagacaagctcacattaaattcttcttgatcaacatcagctgctcactcacccactgaaaaccctgcctcagatcctcttcctgaaaacaatcactgttactccgtggccttttactcttgaacttctgggcacgggcagcttgaagtcccctggggtgaaatgaagtcatggaacatgatgcttcttttaggtctgttagctagagaaaaaagaaagagcagaaataaaatttatgcaaagtaaagattcagtgcctggtaaaaccattttttctttatttgcctcattttcactcttcaaatgttttctaagcttcctgtacccccaaaaggcacttttcttgaaagatccctgaaaaagaccataatggtatcaactcctgaaatactacattctttcttcacctaaaaatgtgtctttaacattcaggttaacctaaatctctttgatggatgttttgcaacttttttctgtttaagtctggcttttttttttcatgtccacttaatttattgctgtaggggaataatctatggcattgctaataatcatgaactaattactaaagtttcaaatccatagcataccaactaatactgcagcttgccttttaagtttcagctctgtaatttaggaccttagagattttgagagaactactttctcgacttcaagccaagtgagtttcgtgcagcccaaagccaaggattatttttcccttttggtttacaagaaattccccaaatttgataactacagccataaattttctgtgactttaatagaattttcattttattggtttagacctaccgcagaagaatcagatcccgctacaaaaagggagtgtctgaactccttggtttatcaatagagaaagatgctctctcctgggatacaaataccttgaacgcagcctccgtggtctcaggctgactcctccgacagctgtgtgcctcgcctccctctgaacaatggtagcagctgcatccaggctgtacagtctttgcacacagctcttgacccataatcttgtaggttcaaggagaaaacccgcacttgaacctttcccccactgcctctcctatccttgttctctccctttttgccagaggtcagcagcgtggagctttcatatgactcacatgatggctctgcctggagcagcctcacaacttcagcagtttttccttatcagtgcaagaaactccacatcagacagggattgcttgcattcagatgtgcacaactgaaaacgaggcagctgttattgaatagaataaaatttggcacagttaaggttcttgttctggccacaagttagtgctattggtatacatagtttttagggattgacattgcttatctatgcaatgatatttatatgatatcattgatggtgatattgatattaggttttcctggtgctaaagtggacatgttgaggagtatttttctccctaccttttatctgaaagcattttggttttcagactttaaaacaaatttgctacctagctaacttttagtagtcaaagaaaccacagaatcataaaacaggaaaaaagttgaaaatatctactgcatctctttgccttcaaacaatagtgtatccaatagtcttagaagggttgccattcattcatttattcaaaaactatgtggtgagcacctatgttgttcttaactgtacaaatgatgatattagccaatggtgatggagagagaggagtttgaatgaaatactttcttcctttcttgcttgcttccttccacatatatgtaattaatgtttactatatgtaaagtactatattaacagcacaacatgtcaaggaatctggcttaaattggtttgcagtctgtagtcttcaaatgcaacacttttctctgttagattcctaagattattgccactataatatactaatcataaagtgagacagaatggaggatatataaacaatcattattaagggaaaaaataagagttatgtctattatcacaacaatatttatgaatatttgatatttgaacctcatgatggttttttaaaatgttcaggtaatttaattatgagcatgtattttttcatttcaaaattgccacaagagaagagacttaagccaattccaagattcaatctagagatattttttgaaaaaaaaaaaaaaagaagaagaagaaaaggaagactacttggctcaaagaccattcaactttttttttttttttttttttgagacagagtctcgcactgtcgcccaggctggagtgcagtggcgcaatctcggctcactgcaagctccgcctcccgggttcacaccattctcctgcctcagcctcctgagcagctgggactacaggcgtctggcaccgcacccggctaattttttgtatttttagtagagacgaggtttcaccgtgttagccaggatggtctcgatctcctaaccttgtgatccacccgcctcggcctcccaaagtgctgggattacaggcgtgagccaccgcacccggccaaagaccattaaagttttgactgacaactgagagagtgagaagctagtttctcagaatatttaattccatttgaatttataataatataattataatacattttatcagaaatgctaatttcttcctaaaagattgtgaatttcatcacataaaagttatgtcccaggtcaagtttatgatgtcttttcttgcatttttttttttttttttttttggaaacagggtctccctctgtcttccaggctggaatccagctgggtgatcactgttcactgcagcctcagcctcctgggctcagtgatcctcccacctcagtcttccgagtagctagctgcaggcctgtgccaagacaaccagctaattattttttatagacacagggtctcactatgttgcctaggcttgtcttcaactcctggcttcaagcattcctcctacctcagcctcccaaatagctggcactgggggtgcacgccaccatgcctggaaaattcttttattatttgtacagacagaggtttcactatgttacgtaggcttgtctccaattcctgagctcaagcgatcctcctgcctcccaaagtgctgggaatacacgcgtgagccacagcattggcctatagcctgattattaaaggtgtaaattgctatgtttagatactagaattaactacttttttttttttttcttccggagacagggtcttgctttcttgctcaggctggagtgcagaagctat

SEQ ID NO: 2734 - DNA, 4001 bp, Homo sapiens
cctggcacctcagtcgatccaaattaaaaactaatattccctttgatcaggggagaggggtgtggtgactcagtcaggaataaaaaaatgcaagctgacacaagtggaggaagaaggcagacaggagggaagatggtgacacatgacaggagcaacaagaagggcagatggggacacaggtgcaggaggagaaacaggggtctacggggtacagtcaggcaaggggtaagatggagatgcagacacacaaacccaaggaacggaaaatggaaaggcagggagagggaggaagaaagagaggaacaggagagagagggagagagagagagaggaatgcagacaggaggaaaaatgaagacacaaaaaggaggcaaggaaatggataaaaccgagggggaatgggctgaagggaagggggagaccccggcagaaatggagaaatgggggcgcagacagacgggaagagtgaggttggagtgcctttcccgcgctcatcttccgtccccactccacgcccagcaaatccaaacaccgcggcctctggtgtcccggtctccactttcccctgaggggcatgggcgtctcctcctccgcccagccggggcgctgagcggcggtaacagcggcggtggctttgtggtcccggggggtccgagtgtgtgtcaggggctggggcgggggatgggcgcggcccctgggtatccctagcggtccaggttcatagtccagtgcttggttccggccgcgcagctgtccctggcggccgaggaggcggcgggcgcgcccccgctcggtgggcccccgccgctggcggcggcctcgccctcgttcttgaggtcttgaaagacctgcgtgaagaagtgggggtcggcgttgagccgcagcatctgcgggctgagccgctggatgaggcgcaggcagcgctgccagaagcgctccttgtcgggctccacgaggaagggcttgagtgggtaggagatctcgttgcccatgtaggagtaggcgaggtagaggcaggtgaggaaggcggcctgcagctcggcggccgacgccagctcgtccccacgcagcgactcgcggcacagcaggtacacgaacaccaggtttgcaggcgtaatgaaggcctggtcttgccagccctgcagcagcagcgagcggtccacaccgcggaaccagcccaccagctcgcccgggctcagctccttgaggcgatagcagcgtcggcacacgaagtcgcccagacagcgcagcagctcgccggtggacgcctgcacgatgacccgccgcggcgagccgccaggcaccggcggcgccacctgcggggctgggggaggcggcggcggaggctttcccccgcccgagcccggcggctgagcggccgcgctgccccccgacggtggctcgcaggtggcggcagccgcgggcacggtgggcactggcaccgccaggggcttggcggtgccgccgccgtcggggggatcccggcccttgcggagaaggttctcgcggttgcgttgctggaccagggggtcggggcccgtggatgccggcttgggtgtcaccttcttgctgcctttcttcttcttggcggacgcggccaccaggcgcttccaggtgagcgccgagatgagcacggacggccgcttgagtcggctctcgcctttgccgcccttgcccactggcggcgccccgtagccccccagcgcctcgtcccccgcgggcggcgccttcttcttctcctcgggcagcccgccgggcctccggcccttggccgaggaggcaggcgaaagagacagcactgtgcccatcctgcagagcggggccggcgcccaggccccagcgggagccgcgggcggcgccgctgctactgcagccccgggggacccggcggtggggggcctagccccggcccgggcgcgcggactggcgggggaaggtggctgctaggcggctccgctgctctaatcctgagctgcgccagctgcagcgtcagccccaccccttgggccccttttttcgtcgcgccgtgccccgcctcacgcggccaatccgctcccgagttgcactcctgatgggcagctccaatgaccaatagactctcgcacttcaatttcaagtcccgccccaatccccaccctccgccctgagtcttttcccttcccccgagcggaggaaggggaaggcggtggtcgtcgttcgagtggcctcctcagggtcagagttgagaaggggtggtggctgctcctgcctcctccggatcctagggcctggaccagcttgttctgatgcactgggtcgcggtagcagataaaccatgggaacagctctccttccctctgcctttgaatttgtgtggggggccagtgtgagcagtgagtgccctcaccggatgcccaggtcccagatgggtcgcgttgcactggctcctccaatgtgactgtcaggtctgtttcctcttcgcgaccccacctcgccccccaccccccaggtcgctaggggggctgcagcaggcacatttctgccctgcctgtttgggagtcctggcagagccttcttgcaggtcacaacccgccttcttgggggttccagcttgagggggagagggggagcagcaaggtctcaaatatgcccctgaggcttctgcttgccgtcctgattctctgcaactgagcctgtggggcagacccttggctctggtccctgggcagctcctctcggttggttgtccccactaacacacacagatctcatacttgggtggatgatggataaggttggtccctggggaaacgctagaaattggatcacttggtctacccagtcttggatagtgaacggagcctcctgtgtggacggaagcccaagagggttggaccaacctccagcccagccctgggtccaggttgaggtgggtttcatcattaaatgcttcctgcaggtaaggttccagctgtccccactcccaggagcaagctgttaggctgggtcctgtccacttctctctgggtctgtctgttacctcctgagtacccatcagccctttgccctggattttggactccccaggccttacctgcaggtcttgagcacagctagttctggacctattctatctgccttgttagatcatgtccacccttcttggagcctgctctctgtggctcccccagcacaagagccttcaggcttcttaagtaagtggaccttgtaggtgcatatgggttccatgtggagccaaacccctgcctatgtatttcagtaaattctaaggattgcccttggagtcacctccatgctcctcacagaccgcaaacatagctccaaggatccactgctgtcagggttggtttgtgcatatatgtgtgtgtgtgtgtcactgcagataggctgttctagaatccacttgggctgcagttccagctaccagaggtacagaatttcccagccattccacagcccctggtcactcacaccctcctggaggcctgtggtctgcctgtctccattcccctcctctttaccactgtgcacatgcagccttgtaccttctccctaactcagcacccaatatgcactttttcaacagggtatctctgctccctaggatctgatctttattttcttgcagcccaagctgaccttcccaaactcattctcctcatagttcttgaaagtgttccctcttttcagctcctgtaattggccccacttcctcctacaaggtgttctgagtcactctttatctgccaaccaaggaatagtcagttcaccggtagttaaggacaagccctgtagagactgagttgcactggcggaaacactgggcatgtggatctaaatggcacatgagtccttccagcgctgctcccaggagtccctcactggcataaggcctattgttaaggtcatttaggaccacgtcttctaagcagcacccacagagtgtcaccactgtggtaccctattcccggcccagctctgacctcctattgtcctcttgg

SEQ ID NO: 2735 - DNA, 4001 bp, Homo sapiens
gcctaagcaacatactgagaccccatctctctaagggaaaaaaaagagagaagcccaaagcaccaaaccaatttgttttctatgtgctccactgcctaaaagagcagaaaggcaaagagtggaagagactaggtcatctaaaaagccagtggctttgtgccgctgcaaaaccacagtatggaagcaaagcaggatctctactaggggagtaaaagatttacagatactacagtttgatgcaatgtcaaggttaaacctggtccaatctcctgtctttgggtaggtcagcaatttataccgcctttgcaaatgaagttaacctagcccaggaaaacagtaacttgcctaaagaaaaacaggtggtaaggacagagaggcaagcaatttaaataacaagactatgtgaggaaaggaaggtcgactgatcacagaaggagctgttcaggacctacatggacacaacataccaaaagcagaaagatggacgttctgacattctgagggccttcatcagagaccaagctgagtcataatcaggctagtttttaccttacagcctcattctccagttgggcacttgtaatgcagaaggtactacctgagcattaactttatctgaagacttgggacggagaggctgacaggtaaaagcattatttttattagaaagccacactgcttggttcagacccgccctgcagcttagctcagtgagggtgccagagctggctagctgaccggcgcgccctctgctggctgagaggtaagagtgaacttttttttatcatgatggatgtgttcctgaagactgtatcaagttatatttcaaacaaaaccctagtgtgtattagttgaggaaacctgtgggaaataatatttgaaaatgagagaaaacatgataattattagtgataattattatcctcccttacaaactgaatttctggggattttctaaaaacagacgacgtgtcaaaaatgaaggttgcctgtgtgtccttgaaatcacagggtcttgtcacataatgtgtagcccacaaaccagcagcttccgcacttcctgcgtactcagaaatgcagaatctcgggcccaccccagacctcccaactcagaatctgcatttcaacaaggtccccggggattccaatgcatattaacatttgagaagtgctgccccagacctccgtttcctctgcggaaaatatggttgttagataagaagcatctctacggtcgcttatagatctaaaactgtaagatatttagcgtaagaaaaaatttacattgagaacttaggaatcttacatgtcaaatcttatcagagtgaaaacaattataacaaaaacctttatgtaaaaaatgtgtacgttaccgggggtgctattcagtatgtctaagaacctggggtgcagtgcaggcaggaaccaacgcatgtcgatgcctaccagggcattggtgcggtcctgtgggactgactctctgtgccaggaggtgctcttttagttgctggttggtaggggaagtatttggagggatatccagaggagggccagggttgggggcgagcgtaaacactggggtgagtggacttaggatatttactaacaagaataaaagttcttttcagtataacaatctatagctgtattcatacacagacaaaatcagagtggccgaagtccaaagtgataatcaacttattacccaaaggtgctgatacaaaggaatttaagtccaatggggggaaaataactttaaaattctttgcaattttaacatgcatatttcactcaattccatgatattttacatatatataaagttaacttaccttcaacatacgtatttctcttagtgctattttcttaacaacaggatcatcttcagattccacaaattttttaacagctactacttgtccagaggttttgtttctgcatttgaatacaaccccataagacccttctccagtcttagctaatttttcatacttttccattatagctgaagtgacttaaattattgtatcgattgacttgcagtacaatgctgcacctggaaaataaggtagacttgccttaatcaagctataaaagacaatgttctcacaggttatatacaaccaatttgtccacatgccaaaggtttatattcatcaattaattggaaatccacttaaaaatatttggatattattttgttagtttagtttagtcctctgcagctcttccagctatcaaaagatttcatatgctatttctgacaatggttctatgttgacctcagttgaactaaaagaatttgtggaaaggaaacttatcccatctattgttttcattatgctcaagcaaacaactgaaatatgatgctgtaaaatccagctgaaggaacatttcatactctggaatatgctgtttatcttttctcttctaacccaagtgcatacacaatgactaggaggagttgtgtaagaagacatggtacaaaaagtgctatacttccacctggtggagagaagaaagagcgtgggccattgaacaaagcagtctttaaaaacaataacaggccaggcacagtggctcaagcctgtaatcccagaactttggaaggccaaggtgggtggatcacctgaggttgggagttcaagaccagcctaaccaatatggagaaatcccatctctactaaaaatacaaaattagccaggtgtggtggcacatgcctgtaatcccagctactcaggaggcccttgaacccagctgagattgtgccattgcactccagcttgggcaacaagagtgaaactctgtctgaaaaacacaaaacaataacagaatccttttagggtatttattgctcctagcttttattttcatggaagaacagattcttaagttcttagccccaaaagaaaataataaacacaaagaaagcattcattcttatgaattctttcacatctctagtgatttctatggaaatactgggtttttctgttttgtgtcatccattcttgaatgaatgttttggtgaccgaattaaatattacatgatgactaaggccaacatatttaaataaatcagtctaagaattaaaaatagaaaaattctaattagtctcaaaaaccccaccccactttatccagcagaatcttgttaatataacctaataacaattacaataataatggcacttaacattgttctatacaaattacatagaatgtgcacaaatattctatgaagtaggtgttatttttatccaattatacagatgagaaaagacacagtgaaggtaatacagaattagaacccacggagtgagatttcaaagaacacaattttaatcactacattacacagcctctcagttaagtgcaaaagaatgcataattcagccaggcatagtggctcacacttgtaatcccagaactctgggaggtcgaggcaggtggatcacctgaggtcaggagttcgagaccagcctggccaacatggtgaaaccctgtctctactaaaaacaccaaaaaattacccgggtgtggtggcacaggcctgtaatcccagctacttaggaggctgaggcaggagaatctcttgaaccctggaggtggaggttgcagtgagctgagatcgcaccactgcactccagcctgggagacagagcaaggctccatctcaaaaacaaaaacaaacaaacaaacaaacaaacaaaaagaatgtataattcgaagaaccactttatccaggtcttggtattaacaaaatgtcaagtgaaaaagttgactacttgtaaatttctcttgtttcaaatgagtacacattttttaaaacttctctaataatattgtcttttccaactacagattatctcaatggtgaaagaaataatctacttccacttgccaccataaaaatatacaatggagaaaaatgtttacctggatataatgactactgacatactattttttacagtgctgcttttttgagggggaatga

SEQ ID NO: 2736 - DNA, 4001 bp, Homo sapiens
gttgatgtgagtgtaaactgacacaacctccatggaggacaatttgtcaactccaatcacaactatttaatacaaggcacacatctgttggcccagcagcttcatttctaaaaattaactaactgattgagacatggtctcgctctgttgtccaggcttgagtacagtggcatgaccatggctgaactgcagcctcaacctcccaggctgaagtgatcctccaacctcagcctgtagctggcactacacgcccagctatttaaaaaaaaaatttttttttgagatgaggtctccttatgttgcccaggctggtctcaaactcctggactcaaggtatcctcccacctctgactcccaaagtgctgggattatgggtgtgagccactgtgcctggctcatttctacaaatttatactacatatacacttacaaaagtgggggaaaaacacgattaaggttattaactgtagtattatttaaaatagtgaaagactggcaataatttaaatattcacaataaatggctggttagataaattaagacagacaaaatgatttatgcagccatagcaatgacacagaacgttatgcactgatatagaaggatttctaagacagaaaagaaagcaaaatgtagagataggtgtatatatatggtaccatttatgtaaaaaagatacacccgtatttcatacacataaatgagtatgtatatgcttgaaaaggtatatagtatccctgaaagatataaaatgcagttgtaaaaataattgcttcctatcagggcaatggttatggctgagataaaagtggaaacaatttgacttcactatgtatcttttaaagtttgcaccacgtgtttcatgtgtatatattacctattcaaaacttaaatatacacaagcacagagcaaactgtgaatctgcctatctctaactaactcctccaccttgaaagtccagtctccaaacaaaataatattaaaaacaaagttaatttctgttccttatctgcttaaaatcttccagtggttttgcatcaaactcagagcaaaagcctgccctctgacccctcggccctcctttcttactattctccccttaactcactctgcctctgctacactggcattttggctgctcatggaataggttaggcactcttctgcctgtctttgcatttgctgttccaactgactggaatggcagctcactccttcctgtcctttaggattctgctcaaacatttccgtgatgtgtttgtcgatcatctcatttaatactaacgcgctcccactccttatcgtccttccttgttttattttcttttatagcactaccccgcgtctgctgtactatgtgtttaaaagtttgtttactgtttctctcccttaattaggatgctccaaaaaagagggcttctggggcatacagtgacacgtgcatgtactctatgagaacagaaatgaaaattccaataccactggtgttcaaaacactcataccacaaggtcaggaccaagaaaagccactctccgacctgatggtgtgatggttataccacgtcaataaaatcagaagatcgcctacatcctaagaatagccagagaatacaacgttcaattcgaaacttttcttttgtaaacagcagtggaaaccggcgtgggaagcgcaccgaacacatgcttcagaggctgggatctcggtcctggacgcccgcgctctacgcagcgcggaagcggcggggcagtcagcctagccaccttcggaactctccacgcctgatcccgttccccggagcccgcggccgttaccttggtgcctccgagccgtaacacttcctccagggagaacccattctcggcttcactagtattatcctcatcctcctcgtccggatcttctactgcctcctcggggcgccaaggccgcttggcatggaactccaaaggctccttgactgcggccatggcgggcaaagcatacgcgcgtgaaactcagcctatttccgctctgccagtggcgtaattcctgtcggggcgtgtcttctcccggaaatggtctaagccccagctcctggcggagcgagctagcctgcgaatttcagcatgagtgtactgctgaggtcaggtttggggccgttgtgtgccgtggcgcgcgcaggtaagcgtcagtcccctcgaagcccggttgccgtggaagccgcgtggggcgccttcctcagctcttcagttgagggtaccgggggatcaagggctcgggggctcacttccaccttgaaggtaccctgggctggaaacgggtccggtacaaacgcaatagggctgcgtagtcgtgggcaagtgggtgctgtctctgcgccccgtgggcgtgctaagcacagtagcccgcggtctgcggtggggcgaggttaagggttcacgaagctgttttgaaaacgctcaggcggcttgcgctcgtgaatggtcagatttatcatggggtctgtttaatttgtgtttttcgcagccattccttttatttggagagggaaatacttcagctccgggaatgagcctgcagaaaacccggtgacgccgatgctgcggcatcttatgtacaaaataaagtctactggtcccatcactgtggccgagtacatgaaggaggtgttgactaatccagccaaggtatgggtcgggtagcccgaggactaggccctctctagccgatttgcgaggtgcaagccaggagggagaagcccgaaggttctcagcccaggcagtgggggtgcctgccaggggaagagccatttctgaggacctggggacagataatttgtcagttggtcagggctggctcacgtcagaggcagtgccagtaaagaggagaggacacggtccaagggtgtttaggagacagaatgtagctgattggatttatgatgcgggaaggatgactttcctacttggctgatggtgggtggtgtggattcattgctttgggagaaggaatacgggaggaaggatggagagttcaggctggtatatgaatttgaagtgtgtgggactcttaggtagaaatctccaacaggcagctggaaataggaattactgcctggaaagtcgtctgtgttggaatggcttcagctggcattggagacatgtgctgggttttctcacatgtgcagttgagaatgcagtctgggtcgtcttcactgttctaggattaggcacagtcacagctttctgacccacgtttccttgtctgttctacagagccatttggtgaaagcctatagtcctttattttagaatatttcatcttttgctgggttgaaatatgacctctgtggaattctggggttagattggccattgttgttggatatggtagtgtgactctagtgtcgaggtttacccaaggccggtatctttctttcgatgccggttaggcagggctgcaagataggtggcttagactagtgtggtggtactagaaatagaagagggtgatttagaaagggactgacaggatttgccgatggattgagtgatggaacggaggaatcaaggctgattcgtacttttagcttgagcagttgggtgatgatggtaccttttattgagattaagacagacaggaccaggtttggaggagtactagggagagggcctacaccaggagctgcattttatacatattttgttagcagtgacatgcaggtggagatagaaagtaggcaattcgctgtaagagtctggcgttcagggccggacgtggcggctcacgcctgtaatcccagcactttgggaggccaaggcgggtggatcacgaggtcaggagtttgagaccagcctgaccaacttggtgaaaccccgtctctattaaaaatacaaaaattagccgggcgtggtggcttgtgcctgtaatcccagctagtcaggaggcaggagaatcgcttgaacccgggacgcagaggttgcagtgagcctagatttcgccattgcactccagcctgg

SEQ ID NO: 2737 - DNA, 4001 bp, Homo sapiens
attacaaacaagacaaagatgaccaaaacaccactcttagtgagtctcagggccttactagtaccatacaataataaataaaatgtgtagaaatgaaaacggaagattcaaaagttatttgcagatgacataatagtctacttaaaaattccaactggagcaactaaaaacgactagggtgaacgagaattcagcaagttggctggaagcaaaggttaaatcctcgtgttttgggaaagaaaaaaaatcccattcgcaacagcaacatctagaaacaacctactccagcctaggcaacatggcaaaatcccacctctactaaaaatacaaaaaattagccggcatggtggcatatgcctgtagtcccagctactcgggaggctgagctgggagaagcacctgagcctgggaagttgaggctgcagtgaaccctcgtggcatcactgcactccaacctgggcgatgggtctcaaaaaaaaaacaacaaaaaaccaaaaagccggccgggcgcggtggctcacgcctgtaatcccagcactttgggagaccgaggtgggcggatcacgaggtcaggagatcaagaccatcctggctaacacggtgaaaccctgtctctaccaaaaatacaaaaaattagccgggcgtggtggtaggcgcctgtagtcccagctactcgggaggctgaggcaggagaagggcgtgaacccaggaggcggagcttgccgtgagcggagatcgcgccactgcactccagcctgggcgacaaagcctgactccgtctccaaaacaaaacaaaaaacccaaaaaagcctgtaggcacagtggctcatgcctgcaatcccagcactttgggaggcccaggcaggaggatcacttgaggccaggagtttgagaccagcctgggtaacacagggagacccagtctctacaaaaagcaatgaaacaaataaactacaatacacttcccatcttcctcatagctacgtagcaagagttaagagataagtaaagcagctgttgccaccatgtaccatacaggcatctgcctcctcctgccgttgggtctcccatccaccagcccaccatagacaattaagacacagacttcggccccttttcccggacacaagctctggaaggcaacagagtgagcagcgcagagggcctcggttcaaggcctaacagcctctcccggaagggaaaaaaaacccctgaaagacacctcctaagaggactcctgtttgaaatcgtcaccgaaagcagtcaatacttttgcaatttaaaaatgcacaaacacagaggattggaaatcccgtgtccgccagaacaccaagttgtgtgactctgctcaagctctctggcctgtgcctcggctttctcattagctgtaaaatgggcacaatatgaagctgagataacgcacgaacagtgggaggcaatgcctggttggcggtgggcggtgggcgctgggtaaccactagtcctaacaagaagacggcgttaggagccaagtggctaagccggtcccttcccgctttcggaaccgcctgctccagcccctcgcagggctggcaccgcccgtgcccggagcggatgccggacggcggaaccgcgttgtcccccaacagggaagtgccacgggatcgggactcgggagatccgggctccgcctgcgagcctcggttttctcctcttcgagatggggccgcggccggttacctaaggaggggccccgccgggaggggccgggggtcggggtcgggctcgggctgcgcctcctcggggcctcgggctttcggctccggcggcgcgggcccatgacacgccgcagagggtgctggcgcccggtcccacggctcctgctcgggctgccgggtccgggagcgaaaggctggcttctggggagcccagagaacgctgtgccgcgagcctcacatgagccggtgcttggcagaagtccgcgccgctcgcgttcaaatcgctcgctccgcccacttcacggccggcgttttttaaaacccgaatccagcgactcccagtggctgactctggaacgccccttacgtagagcgactgcaggtagggccaatgagagtatgcaccgagacacaaatatagcggcgatgataggaggacaggggagactgatggtaaaatcaaccaatagacaactaaagagatggggcgggaaattctcctgccccctgcttgccaatctggttgctggtctttgcgggaccgtactgacgtcctcaggtgccctccagtcaaaacaccgaagctcagtttggaacgtggatggtgtgtttgtagaacgtgctttctagaaaagtcgctttcctcaaacattttatgctttgccttagcaacgcagagatggcttttaaagatgaggaaacagacccatagagaatgtgacaaccccgtgtcgtatctgcgactctcccaggaactatccacagatatactcagaatccagttcaactgcataaactttgctgacgcttggggtcgcggggacggcgggatcggcggggctttgagaataaggtccgggcagggcaggcctcggcactatagcaacgcaatcgtcccaaaaaaatgctctcttccctttgttggggataataaaaattcaagtcatgtcccggtatgtagaataaggggaattttaattttctaaattttatttcttgcattttctaaatgttctacagtgaacatgtaatcaggaaaaatgttataaaattagtgatttcatggaacccttgtgcattgctggtgggagtgtaaaatgctgcggctgctgtgaaaaatagtattggtggttcctcaaaaaatcaaaaatagaattaccagatgatccagtaattccacttctggctaaatatccaaaagaatttaaatatagccagggacttgaacagatattctcacacccatgttgatagcggcattcttcacaacagcccgaaggcagaaacagcctgaatacacaccaacagatgaacggataaacaaaatggggtgtataccacaatgttattcagcctttaaaaggaagggaattctgacacctgctgcaacatagatgaaccttgaggacgttatgctaagtgaaataaagcagtccaccaagggacaaatgctgggctggggtgcggtggttcatgcctgtaatcccagcgctttgggaggccaagttgttcggaaccactgagttcgagttcgagtccaacctggccaacatggcgaaactccatcttgccgagcgtggtggctcacgcctgtaaacccagcactctgggaggccgaggcaggcagatcacccgaggtcaggagttcaagaccagcatggccaacatggcgataccccgtctctactaaaaatataaaaatttgccaggtgctgtggctcacgcctgtaatcccagctactcaggaggctgaggcagagttgcttgaacctgaaaggcggaggttgcagtgagccgaaatcatgccacggcactccagcctaggcgacaagagtgagactctgtctcaaaaaaaaaaaaaaaaaaaaaagagaaggggaaggagaaggaggagaaggaagaaagaaaccccacctctaccaaagatacacacacacacaaattagcccgggcgtgcagatgtatgcctgtcgccccagctactcaggaggctgaggtgggagaatcgctcgagtccaggaggttgaggctgaactgagccatgattgtggcactgcactccagcctgggcgacagagtggcacctctctcaaaaaaaaagaaaaaaaaaaaggacaaggccgggtgtggtggctcatgcctgtataatcccagcactttgggaggctgaggccagtggatcatgaggtcaggagatcgagaccatcccggctaacctggtgaaaacccgcttctactaaaaatacaaaaaattagccgggcgtggtggcacgggcctgtagtcccagctactcgggaggctga

SEQ ID NO: 2738 - DNA, 4001 bp, Homo sapiens
ttacaaacaagacaaagatgaccaaaacaccactcttagtgagtctcagggccttactagtaccatacaataataaataaaatgtgtagaaatgaaaacggaagattcaaaagttatttgcagatgacataatagtctacttaaaaattccaactggagcaactaaaaacgactagggtgaacgagaattcagcaagttggctggaagcaaaggttaaatcctcgtgttttgggaaagaaaaaaaatcccattcgcaacagcaacatctagaaacaacctactccagcctaggcaacatggcaaaatcccacctctactaaaaatacaaaaaattagccggcatggtggcatatgcctgtagtcccagctactcgggaggctgagctgggagaagcacctgagcctgggaagttgaggctgcagtgaaccctcgtggcatcactgcactccaacctgggcgatgggtctcaaaaaaaaaacaacaaaaaaccaaaaagccggccgggcgcggtggctcacgcctgtaatcccagcactttgggagaccgaggtgggcggatcacgaggtcaggagatcaagaccatcctggctaacacggtgaaaccctgtctctaccaaaaatacaaaaaattagccgggcgtggtggtaggcgcctgtagtcccagctactcgggaggctgaggcaggagaagggcgtgaacccaggaggcggagcttgccgtgagcggagatcgcgccactgcactccagcctgggcgacaaagcctgactccgtctccaaaacaaaacaaaaaacccaaaaaagcctgtaggcacagtggctcatgcctgcaatcccagcactttgggaggcccaggcaggaggatcacttgaggccaggagtttgagaccagcctgggtaacacagggagacccagtctctacaaaaagcaatgaaacaaataaactacaatacacttcccatcttcctcatagctacgtagcaagagttaagagataagtaaagcagctgttgccaccatgtaccatacaggcatctgcctcctcctgccgttgggtctcccatccaccagcccaccatagacaattaagacacagacttcggccccttttcccggacacaagctctggaaggcaacagagtgagcagcgcagagggcctcggttcaaggcctaacagcctctcccggaagggaaaaaaaacccctgaaagacacctcctaagaggactcctgtttgaaatcgtcaccgaaagcagtcaatacttttgcaatttaaaaatgcacaaacacagaggattggaaatcccgtgtccgccagaacaccaagttgtgtgactctgctcaagctctctggcctgtgcctcggctttctcattagctgtaaaatgggcacaatatgaagctgagataacgcacgaacagtgggaggcaatgcctggttggcggtgggcggtgggcgctgggtaaccactagtcctaacaagaagacggcgttaggagccaagtggctaagccggtcccttcccgctttcggaaccgcctgctccagcccctcgcagggctggcaccgcccgtgcccggagcggatgccggacggcggaaccgcgttgtcccccaacagggaagtgccacgggatcgggactcgggagatccgggctccgcctgcgagcctcggttttctcctcttcgagatggggccgcggccggttacctaaggaggggccccgccgggaggggccgggggtcggggtcgggctcgggctgcgcctcctcggggcctcgggctttcggctccggcggcgcgggcccatgacacgccgcagagggtgctggcgcccggtcccacggctcctgctcgggctgccgggtccgggagcgaaaggctggcttctggggagcccagagaacgctgtgccgcgagcctcacatgagccggtgcttggcagaagtccgcgccgctcgcgttcaaatcgctcgctccgcccacttcacggccggcgttttttaaaacccgaatccagcgactcccagtggctgactctggaacgccccttacgtagagcgactgcaggtagggccaatgagagtatgcaccgagacacaaatatagcggcgatgataggaggacaggggagactgatggtaaaatcaaccaatagacaactaaagagatggggcgggaaattctcctgccccctgcttgccaatctggttgctggtctttgcgggaccgtactgacgtcctcaggtgccctccagtcaaaacaccgaagctcagtttggaacgtggatggtgtgtttgtagaacgtgctttctagaaaagtcgctttcctcaaacattttatgctttgccttagcaacgcagagatggcttttaaagatgaggaaacagacccatagagaatgtgacaaccccgtgtcgtatctgcgactctcccaggaactatccacagatatactcagaatccagttcaactgcataaactttgctgacgcttggggtcgcggggacggcgggatcggcggggctttgagaataaggtccgggcagggcaggcctcggcactatagcaacgcaatcgtcccaaaaaaatgctctcttccctttgttggggataataaaaattcaagtcatgtcccggtatgtagaataaggggaattttaattttctaaattttatttcttgcattttctaaatgttctacagtgaacatgtaatcaggaaaaatgttataaaattagtgatttcatggaacccttgtgcattgctggtgggagtgtaaaatgctgcggctgctgtgaaaaatagtattggtggttcctcaaaaaatcaaaaatagaattaccagatgatccagtaattccacttctggctaaatatccaaaagaatttaaatatagccagggacttgaacagatattctcacacccatgttgatagcggcattcttcacaacagcccgaaggcagaaacagcctgaatacacaccaacagatgaacggataaacaaaatggggtgtataccacaatgttattcagcctttaaaaggaagggaattctgacacctgctgcaacatagatgaaccttgaggacgttatgctaagtgaaataaagcagtccaccaagggacaaatgctgggctggggtgcggtggttcatgcctgtaatcccagcgctttgggaggccaagttgttcggaaccactgagttcgagttcgagtccaacctggccaacatggcgaaactccatcttgccgagcgtggtggctcacgcctgtaaacccagcactctgggaggccgaggcaggcagatcacccgaggtcaggagttcaagaccagcatggccaacatggcgataccccgtctctactaaaaatataaaaatttgccaggtgctgtggctcacgcctgtaatcccagctactcaggaggctgaggcagagttgcttgaacctgaaaggcggaggttgcagtgagccgaaatcatgccacggcactccagcctaggcgacaagagtgagactctgtctcaaaaaaaaaaaaaaaaaaaaaagagaaggggaaggagaaggaggagaaggaagaaagaaaccccacctctaccaaagatacacacacacacaaattagcccgggcgtgcagatgtatgcctgtcgccccagctactcaggaggctgaggtgggagaatcgctcgagtccaggaggttgaggctgaactgagccatgattgtggcactgcactccagcctgggcgacagagtggcacctctctcaaaaaaaaagaaaaaaaaaaaggacaaggccgggtgtggtggctcatgcctgtataatcccagcactttgggaggctgaggccagtggatcatgaggtcaggagatcgagaccatcccggctaacctggtgaaaacccgcttctactaaaaatacaaaaaattagccgggcgtggtggcacgggcctgtagtcccagctactcgggaggctgag

SEQ ID NO: 2739 - DNA, 4001 bp, Homo sapiens
aattcaaataataagcaaaaaactgaaatcaaacaagcagagggataaaaccagtatgggtaacagctaagtgtttaaatattgttttgggtagagaataaggagactggtctaagtctcttgataatccaaaacttccacctcatcacttactttaacagaaatgaaataaggcctggactagagaacaggttactcctgagtgtagcatgtttccactacataaagtcaccaaacttatttttagtcttaaagtaacaataaatcttaccccatatacttttattatctaaagtctcagcttaagtcatcttaggctgaatatagttacttctctgttatcaatgataatgatgacccagagaaaaataggataaccaaattcactgacgcgctcagaaattctttttaaaactgtaatttaagttaggttttatggcaagctttcccaaagtactaacgtagaaccctttggatttaggcatcaggcttgagtaagtatttcaaagttctaaaaagtattagtagcaaagaacataaagtcacacaaaaccagaactgtccacaaatattactaggcactaaagaagaaagcaacttactcctggacagaaattcaaacgcaaatctcagtttccaaaggattgactaaggactaagtaaaagtaatagtttcgtaattctaagcaactctaacaagcattctttaaacaccttctacattttaagacacaaagtatgtaaagaattaagcctttcattgaatatttcctatatattagacatgtgctaaatgcttcacttgaaaagtctgagttcaatacttttccaccacaaaagaaatactttttccacaaccacaactacagtgctattttcacctccattttccagatgaagaaacagaggcagagaataaagtgacttgcctaaggtcacaatatttatcatggcagagccaacactcaaaaccagttctagccaacactaaagtcactgccctacactggccctccctcaagagtaatgcatacatggcccaaaaaatccggggagaggaaagggacctccctggctagaaccgcagttcagaatataaacactgagcatatgatggatgcaacttatccgtttcaaaaggggtgggagcctagaaacgaagccatttttcctcctcgaataatcttggctgcctgtccctttgtcttcaatgttagttcctttcactattctgctcccaaacaggccaggtcccacgtcagttccaggaggaaagggctctctcagcctgcgggtcatctttgggcagcagcaggaaggaggcggcgaccctctgaatacctcctttggactcgccatctggacgtaaagggttcgcctgctccatctcagattcccaagggccttcccatgaagttgtctaggcaaccggtgatagggactccaatgtccttgctaataaaagaaaaatggcaacagtcacatcacatctagtcccattcaaacccagacggcagggcacacaccactcaggcacaacccctgggccgcggatgacacaaatgtcacggctaggatcccctttcctgagccgcccgccctctcccatcgtccgagccagcagagtccatgcccacccccgcgcccatcccgcggccccggcgcgctcccgaggccacggctactctggtccagcgggcttcccggccacggaaggagttttaagaaggccgttcagcccgccaccctggccacggtccggtccgacaatgggtctttcccctaccttctcccttctagctcacccaggccagaagcgagaattcccgccatccacgtcttcaaaaccaaaccaaccggtcccggcgtgctttgcgatcctgccgtacaaaagcatggcggcgctcagggccccgccctgatcccaagatgcaccggggagtaggtccggcctttcgggtggtcaggaagatggcggcctctggggcggagccgcaggtcctggtacaatacttggtgttacgaaaggatctatcacaagctccgttctcctggccggcgggcgcactggtagcgcaggcttgtcacgcggccaccgcggccttgcacactcaccgcgaccacccgcacacagccgcttacctccaagagctggggcgcatgcgcaaagtggtcctcgaggtgaggcactcgggcggagggggaggtgctgagacatcgagggcggaagtgggtgtggtcttcggtccgaaggcctggctgcggggagtgggtgcggcgggagttggggtgatcgttaacatttagactggagctgtttccctggaggtgcgcccttgggaagggcctgactgtgtgaagagtggacagcagtcctccgccccctgctgggctcgcggtaaagtggtggctcctgtgtccccgctgttccgcctgtgcactggccgactttttaaagccatgccccaaagtgctgtcctcctgcaaaaccgagcccgaagggacagtgcaaagtgaagtcaaactgagtatttacctgggtaggacgccaaattatttgaaaataaatactaaaaacgttagtataaattgaacctagcttcagctagaccaggcaccaggtgtgtaaatcggtacaccttttaaaatagcagtcaggttctgtttgcagatgaccaaacaaatctcacccttaccctttgactctctatcctgctgctagagatgtagcctaagaaaataatcagatgcacccaaagagctttgcacaaggatattcatgggagcccttatggttttgaagcatatttagtggtcgggaagagtgctcatgatgcgaagctaactgaactatatatacagaatgatccagactttgaaaggaaaaactaaagaaatacatctacatattaagtagtgcatggtgagattttggttatttcctaatgcttaatctgtatttttaaaattttctaccttaagcacatattttataataaggaaaaacggctttaataataaacggctttttataataaggaaaaacggctttaagccagaactcaggtggaggggtggagtaatcccttcatgggtaactgacaaagatagattatctttcaagagaaaaattgctgctggatagtgaaacatcaagcggtaacctgtaggaaaaatgccttgagaatctgtgtaggcagaacagaagctgctggcttttcacttagattttcttcctagtaagaggtctcaagaaatcaggttagactcctcttgtcgcaggtgaaactctctgaagcctacagggattaagtgactcccctgagtttaaaagagggtctcatgattcttagttgttagtcatgactcaagaaagggacttaggagtcgctactgattacattgaggtgccgctgtagtcagaagggccaataaaatataagaaaataccaggattaactacatttattgagtgcttagtgtgtgccaggcacaggtccaagcctgatttcattgatccccattaggaagcattattcctgttttataaagggacgaagaggccagcgaagtcacctaacttatccacgatcacacagtcagcaagagtttggagtccagtagtctgattccagagcctcactgtatctcactatgctctgctgctgcccgaggctgaagaagctgatgagtcctccagcagagctctgccagaaggactcagcaggttaagagtcgcaatactggcattctctaatttattaaaacaagcctctgagtagcttagtggcttctgccttcataggtaagagataaactttatgcaaaataacacaaaaataataattttctgagtgatcgttttaatacttcctggaatgggattcagcatgggtgaattggcagtaaggatgacccagaaacaatttcagaaggatgttagagaatattgtactctccctttaataaacaagtgggagccatcccagcagaaggaaaac

SEQ ID NO: 2740 - DNA, 4001 bp, Homo sapiens
gtatctgctgggcctgctttaccttggaagttatgattgcatctcatcctagccagtcagctttgtcccaaaaaaagtcaaaatccctgcctatttgaataaatcatctggttgcaactacaactccatgtccttccttctcaaatgagtggggagaattcaaataataagcaaaaaactgaaatcaaacaagcagagggataaaaccagtatgggtaacagctaagtgtttaaatattgttttgggtagagaataaggagactggtctaagtctcttgataatccaaaacttccacctcatcacttactttaacagaaatgaaataaggcctggactagagaacaggttactcctgagtgtagcatgtttccactacataaagtcaccaaacttatttttagtcttaaagtaacaataaatcttaccccatatacttttattatctaaagtctcagcttaagtcatcttaggctgaatatagttacttctctgttatcaatgataatgatgacccagagaaaaataggataaccaaattcactgacgcgctcagaaattctttttaaaactgtaatttaagttaggttttatggcaagctttcccaaagtactaacgtagaaccctttggatttaggcatcaggcttgagtaagtatttcaaagttctaaaaagtattagtagcaaagaacataaagtcacacaaaaccagaactgtccacaaatattactaggcactaaagaagaaagcaacttactcctggacagaaattcaaacgcaaatctcagtttccaaaggattgactaaggactaagtaaaagtaatagtttcgtaattctaagcaactctaacaagcattctttaaacaccttctacattttaagacacaaagtatgtaaagaattaagcctttcattgaatatttcctatatattagacatgtgctaaatgcttcacttgaaaagtctgagttcaatacttttccaccacaaaagaaatactttttccacaaccacaactacagtgctattttcacctccattttccagatgaagaaacagaggcagagaataaagtgacttgcctaaggtcacaatatttatcatggcagagccaacactcaaaaccagttctagccaacactaaagtcactgccctacactggccctccctcaagagtaatgcatacatggcccaaaaaatccggggagaggaaagggacctccctggctagaaccgcagttcagaatataaacactgagcatatgatggatgcaacttatccgtttcaaaaggggtgggagcctagaaacgaagccatttttcctcctcgaataatcttggctgcctgtccctttgtcttcaatgttagttcctttcactattctgctcccaaacaggccaggtcccacgtcagttccaggaggaaagggctctctcagcctgcgggtcatctttgggcagcagcaggaaggaggcggcgaccctctgaatacctcctttggactcgccatctggacgtaaagggttcgcctgctccatctcagattcccaagggccttcccatgaagttgtctaggcaaccggtgatagggactccaatgtccttgctaataaaagaaaaatggcaacagtcacatcacatctagtcccattcaaacccagacggcagggcacacaccactcaggcacaacccctgggccgcggatgacacaaatgtcacggctaggatcccctttcctgagccgcccgccctctcccatcgtccgagccagcagagtccatgcccacccccgcgcccatcccgcggccccggcgcgctcccgaggccacggctactctggtccagcgggcttcccggccacggaaggagttttaagaaggccgttcagcccgccaccctggccacggtccggtccgacaatgggtctttcccctaccttctcccttctagctcacccaggccagaagcgagaattcccgccatccacgtcttcaaaaccaaaccaaccggtcccggcgtgctttgcgatcctgccgtacaaaagcatggcggcgctcagggccccgccctgatcccaagatgcaccggggagtaggtccggcctttcgggtggtcaggaagatggcggcctctggggcggagccgcaggtcctggtacaatacttggtgttacgaaaggatctatcacaagctccgttctcctggccggcgggcgcactggtagcgcaggcttgtcacgcggccaccgcggccttgcacactcaccgcgaccacccgcacacagccgcttacctccaagagctggggcgcatgcgcaaagtggtcctcgaggtgaggcactcgggcggagggggaggtgctgagacatcgagggcggaagtgggtgtggtcttcggtccgaaggcctggctgcggggagtgggtgcggcgggagttggggtgatcgttaacatttagactggagctgtttccctggaggtgcgcccttgggaagggcctgactgtgtgaagagtggacagcagtcctccgccccctgctgggctcgcggtaaagtggtggctcctgtgtccccgctgttccgcctgtgcactggccgactttttaaagccatgccccaaagtgctgtcctcctgcaaaaccgagcccgaagggacagtgcaaagtgaagtcaaactgagtatttacctgggtaggacgccaaattatttgaaaataaatactaaaaacgttagtataaattgaacctagcttcagctagaccaggcaccaggtgtgtaaatcggtacaccttttaaaatagcagtcaggttctgtttgcagatgaccaaacaaatctcacccttaccctttgactctctatcctgctgctagagatgtagcctaagaaaataatcagatgcacccaaagagctttgcacaaggatattcatgggagcccttatggttttgaagcatatttagtggtcgggaagagtgctcatgatgcgaagctaactgaactatatatacagaatgatccagactttgaaaggaaaaactaaagaaatacatctacatattaagtagtgcatggtgagattttggttatttcctaatgcttaatctgtatttttaaaattttctaccttaagcacatattttataataaggaaaaacggctttaataataaacggctttttataataaggaaaaacggctttaagccagaactcaggtggaggggtggagtaatcccttcatgggtaactgacaaagatagattatctttcaagagaaaaattgctgctggatagtgaaacatcaagcggtaacctgtaggaaaaatgccttgagaatctgtgtaggcagaacagaagctgctggcttttcacttagattttcttcctagtaagaggtctcaagaaatcaggttagactcctcttgtcgcaggtgaaactctctgaagcctacagggattaagtgactcccctgagtttaaaagagggtctcatgattcttagttgttagtcatgactcaagaaagggacttaggagtcgctactgattacattgaggtgccgctgtagtcagaagggccaataaaatataagaaaataccaggattaactacatttattgagtgcttagtgtgtgccaggcacaggtccaagcctgatttcattgatccccattaggaagcattattcctgttttataaagggacgaagaggccagcgaagtcacctaacttatccacgatcacacagtcagcaagagtttggagtccagtagtctgattccagagcctcactgtatctcactatgctctgctgctgcccgaggctgaagaagctgatgagtcctccagcagagctctgccagaaggactcagcaggttaagagtcgcaatactggcattctctaatttattaaaacaagcctctgagtagcttagtggcttctgccttcataggtaagagataaactttatgcaaaataacacaaaaataata

SEQ ID NO: 2741 - DNA, 4001 bp, Homo sapiens
cctggtgatgtgcacctgtgatcccagctacttgggaggctgaggtgagagggactcgaccccaggaggttgaggccacagtgagttgagatcatgccactgtactccagcctgggtgatggagtgagaccctgtctcaaaaaaagggatcggataaggaccaaaaaacagagagatcctgaagggtcaagtactatacagatatttcatattggtgagtgtattcaagtatccatttatttttctcctaacgactgctaacagctaacagctactgatcattttctttgtgccaggaactatattaggcactatacatcaatatcttatttaatcctaataactcaccacacaggtactactattattcccatttttaaggatgaggaaaccaaggcacggagaagttaaataacttaatgacacgcctgtaatcccagcactctgggaggcagaggcaggaggattgcttgagcccaggagttcaagaccagcctggacaacatggcaagacccccatcaccattaaaaaaaaaattaatcagagttagtaacatggcagagctaaagcctgtttgacttagagagcctgagcttagctgccttcctaacctgtaagaataactcgctcaagaagttaaataaatgtttctgttgtgtcacctttagactaccacgctgattttgtttccttttggcttccttccatcattgagtgccttttatgttccaagcattgtgctaggggctggggaaaccacaatacagtgtgatgagtaaaaacagaggctgcagaaggtagcccaaaaaagggaggagttatcagtcgcagggtggggaagtgctttaaaaagctttgcgcaaaagaggttaaactgaattccttgggttttttgttgttgttgttttctaagtgggccagaattgactcaacagagggtgggaaaggggaatggagggaacaaagtaaaaagtggtgacttctagatctttcaactaaacccaaggcaaactgacccaacaacctttgttacacactttaacacaacactcttcataccctagatctgagaactgttagattatttacaaacgctacctcccttcgtggtcctgatgaattcccagtgaggtccaatctgccctggcaggcttccgctcatttttgttacaaacaatacactaaacccaacctactaatcatcaagggcctggaacaggttttggacattcgtccccaggctgctgagaactgttctagtgatgacagttagaaagggtagccctccgaggcaaaaaaaatgagacatcttgattttttctctccgcatctgggcgcggcgataagaagacatcactggtctccatctttccagggggaaaggcccgagctgcattagccccgactggggagctgggtaaacagcccacgcccgggagaggcctgagggaaagtgacctcccccggggcccaggccgaccagcggcgcagctgctcggccgccagatgcgcggactcgcgcactccctcgccgcgcccgggcattcccaagcccagccgcccgcctcggccccgacccctcggccgccacagcacacgccgttccgctcgcaagatggaggcgaaggcacgaggcgcccccgccccccagggagcctttgtgcccttgccggcggggacgcgaggccagacggcccgcaccgcaagggccccgcaggcaccgaagagacgcgggggagggggccgggcgcgcgcgcggatctagcccgggccaccgcccccagcgccgcggcacccccgacaccagcacccgcacgcgggacactgcctacctaccgcaccgcgaacgcttcgcacgtccggagcggtctcagcagccccatgcgctggccccgagctggcggaccctgactgcaactgcggccctccaaccgcagcccaaaacgcgcagggcaggaccgagcgccaaccacgcccttcggccgcgctgaccacgcccttcttcccgccccttctccctccgcgggagggctttcggcaatttcgcgcagcgaatcgcagctctaagtccgcggctccaccaatacgtggacgctcctgcaagatgagcccgccccctacttcgtcctggcctatgggaagccgggacttcttcagcggctgtcctccctcgcttttggagctccgacctcagcttcgcctgcgagctgggttgtgtaaaggctggtcattttggggcgcttaggggtgggtgccggggggcgcgctttccctcgtgaaggtcgctccaggagtcatgcgtacattcgttcattttgctctggacgcactgatgttcccggctcgccgccgtgccgcagtcacgaggctctccgaacgcctttcactgtgtttctgtttacattcgcgtctgcaagacccggcggcgcgaccgaggcccgaacaggtgctgcgaggcggggcggggagccagtgctgaggggagctccccaggccgggtggttgaagacagcttctggggggaggtggagctctggctcgtggagaatgggaagggtgtggaaaatgaactggtagctacttagccactctgagcagcctgctctgatgggaaatcggtgatggagtcggagggaagtgggaggcagcttgtgggaggccagggtgctcactctctcccctgccagcatgggacctagtaactttcatacatctctatctatctatctattttgcaaagatggggtcttgctgtgttgcccaggctgggcttgaactcctggactcagacgatcctcccgcctcggcctcccaaagtgctggaattacaggtgtgagccactgcatcccatcccctaggagcttaatgacactgccctttagcttttactgcttagcagaatccggaggcatagaggaactaccaccagggtggcgtggggaagaggccctcccttctgatgattttctctcagcagcactttcagcaatctggcttcaactgaatatctccccagttcataaaacaggcgtctgtaaatgtcaaccccagctgggtgcagggtacaaattttttcctacagagctcttgagtcccaggtagtttaggagacaaggacttgtttggttttcccagacctgtcaggacagctcagaggttttgtctaacccaggggccacaaactttggacaacagcagcagctagcccacagatggttttatttgggcatcgcatagcttttctttgtttgtttgcttttgttttttaataagaatttgaatcccaccaccaccactggtccattaagtaacagccagccttcacacatttgctgcctacctgaaggcatttgtgtttgtgacccttgatcttttctatacacagaagacctccagtggagtcacctaatcccacagccaagtcacccctgctggacagagaactgtacaaagtccaaacaggcgtacatatcctgtatggtttcctcatctataaagagaggggataggatgaaggagtcccaaggttccttttggttctgatgttctgtaattttgtgttgtgagcagcttttgtttttgcctgacgggaaaactttcctttgggaattgtctgcagtccgctgggtcagatggttctttagcaccgcacttctccggtctcccaaggcaggatgggtgtggagaaggggaggtgtggaacccaggcctgaccagctgtagtctccctcctcttgttttcagatttccccagggatgcgcacatgaccaaacctgagatgatctgagcccttgtcggggattttagagaatgaggctgggagaaagaggctctttcttttggtgtttctgagcgcgggaaaagtaggcctagagctgtctgtagttatactccttgcagcagcaatgctggagaaccaggcctggaaatgttaggaaccagctaagccatcctgctttggtactctgattagggtgcgtaccagctcctttggtggt

SEQ ID NO: 2742 - DNA, 4001 bp, Homo sapiens
ccaaatggttttagggcataattaaacaaagaatcagtacttgcaacctttaaagttacaaatctgtcaagatgtattttaaactctactgccaggggtgcactaattaaacctattttaccttaatcaccactcaatataaaacagcatttcttttctcatgtcattgtttgctttttttgtacacaaatactgcaacattggtttgtatgacctctcattgcacaatgtctcattttaattctatagcatttcagctgcactgtaggttaaactggctctttgggctaatccaaactgtaattataaacttctatattgcataactcgaattgcctgaaagacttacaaataattccatagctatatccctagcttttaacttaaaaggttcaagaaaatactacaccttggtttttaaaacacctgaaaacactttaaggtcaaagactgttttcgtgaagcgagcgagcatggcacatgcagcacaggcagaattcacaatcgcaaccagtgctgaatccctggctagttggtttcattttgttagacttttgagcaagactttaagacagtgagtctattctgtaacataaataccacactgtgtcttgttttccaacaggggaaggcaatttttttaatttcataaatttgtatttagctaaaagaggttgaataccaaattccatctcccccaagtcatctcctcgcaagtagagtaaccttgatgtagttcctcccccatttcatctgtctttcaccgctcacatctaagctaattcaacaatggggagtatttctcgagtttggacttagaaataagactatatgaaagtctacttataagacttgcaaaatggtctttataaaatatctgttaagtctataaggctatttgactaagacgtgaaaatagactcgaagtatttgttgtaaactacagcattataacttttttaggtaactaaaattttaagtcaataaaaggcaaacgttaagcaaaccgcttgacgtaactaagcatcgcaaaactgtgatccaataatctagggtcaatattaaaaatcaaaagtttctagaccgagcctgaagaagtcttaattctagacaatggcaaggaaggtgaggggcagaaaaaaacccagaaacactcccaaagctctggagttacattttcaagtcagcaaaatgagagttggattcagaactcttgtgtaggcataatctgtgagatgtttatagtttcaatgtaccatcaaagttaatggattaaaactttttcaacttggaggggaggagtagttgaccttctcacatttgtaaattacctcccctttggggctcaagattttctgctgagactctgagcaaaagctgcttgtgacgtttgcccggggaaggtctcggaggcgggaaaaggctaggtagcgaaagaatccctgggggttctgggatggggcgagaggcgtgagttcccagttgggaaggaggaggcggcgacttggggactcggtaacctgtccgggcagtgaggcgagcacggggaggggaggcgagaaaaggggagggtggagcaaaagctcgtgggtgtaggccttgggccggggagagggaggaagcgcggagggaggcgaagacgcttggggccgggcactcacccgccgggcgctcgggctgaatgggccgccaccgcagtgctcgctcgctcagcaccacgtcacaactgtccctcccgatctcgaagatgccccggagcagaatccgctcggccgccgcctccgtctgctgcggggacgttaacagcgccggaggcacagcggcagcctccgggggcgcctcttcctcccggccgccctccagggcactcacccggttcctgcgcctcctccagggcatggcggagtcgcaggctgggcccgagccaggggtccggggaggcctttggagaaggaggtggagggcgcggcagccccagctctagccgcgtccagcgctgccacagcaacggcgcgcagggcagggacccaggagggaggcggggccgcgcctgacccagtccagcaccctggcctgccagcctcgccgcttcgccactcaccacaaaaagacccagctgcaagaggaagaataagtggctccctccgcctagcttctcctgtaaagtacgatttcgtacttttcgttaccctcgagttaaaccagccctcctcaatcttaaacttgcatataatcgcttgggcatcttgttcaaatggagattcttattgcataggtgtgggactggcccccagataccacatatctaagaaaatactaggtgatggatcccactggccaaggaacacacttagagttgcaagggtggaagcctctgtttttccacctcctttccagagggttccctggagagcacaggtgacgctttacaaccctgtttcagagtagtagcgcacttcccaaaacccctgaggggaagctagagataaggccctggtttgcatagacaaatttgcatctgacaaattcagtattaaaggtaagtgcctccaggtgtaagtatttagggtcctactttcccccaaggtagcgcctctgcagtcttgtctttgcctggatcttgcactcccttgagggagattacaagcagcagggcttcactttcacgcactgccataaagaagtgtcacctggaaaaggagaagagccctgggggggttcacccttttctcctgataactgagatttctaaaatcagctgctcattaattttgataacacagagagtctggaggctagtgattctcaattgtggttgcacattaaagttacatagggaacttttgaaaacccaaatgtccaggccacgctcaagacaactaagctggaatctctggaggcgagacccagacttccggatttttaaaagttcccaggtaattccaatgttcagccaaggctgataatggctgctctaagcagggtgataaaacagggagctgagtacttgtaatggggaagcagtcaggaagaaagtgagtccctgggaagaggagcagagtgggaagtaaagcagaaggctttttttttttttaaacaagatcattatcatcatattgaaaagaaggagtaggggagttgaaaaggaaattaaattcatagggttgtagatctagttccagtgttctagtgcctaaacagttctatcatagaggcagcaaattcttaattctgtcctcattcctggtcacactgcagagtcacagaaagagctaactatagcaggagtttctcaaggttcttagctcagacggtttgtaggcctaaccaaatccctaccaaacataaagcactgtgcaccagttaagctaggactcttactgtttaatgctccgacaataagtacccaagcttcgaggaaaagcaaggaagagcttcagtttgatctgactgcagtgagctatttcttagagcagaagtgcagctgctgctaaaccccatgcaggcttcaggtggctctgttcagcagtcattagagggaaaaggacggtgcccttcgcagaatgagttgcagttctggagtcagcatcttgtattcacagctgttaggcaatcaacacaattagagctcactggcattttaaaagctcacccagagccagtgcaaacaggccaagccaatggctactccttaggagctttgcaaaggggcaagttgccatttttcaagcttcactcaagccaggaagtcaaaaacactggctttgaattgtcctgaagatggaagtaataaggattgtgtttccttctttctttctttttcctttgataagctgccttcttccagggctggagtgccctagggctctctttaggatctatccacacactgtcccgtgctttatgtaccatccagggttctgcaaatgatgtcaccagctccaaccactctcctgaactttaggtattatgtccagctccctacctgacatctctacttg

SEQ ID NO: 2743 - DNA, 4001 bp, Homo sapiens
aaagtgagcccagccagaatttatcagacacaatttatcataattcagcaattgtgtgtagatcccctactatgtgccaacatagagcaaacctgctatccctgagtctgcttgtttttggagagcctgcaaaactgtatagagttcatattttctgtaaccaaacatttgctctagaggtaactctacacctgcaaacacacccattttttcacagcactgctgtgacttttttgatccttttttgtataggatcaatgacacatctgtattagattccaataatttaaacataggtcttaaagtctgttgctttgtgcatgtcaatttctgcaggcgaacagctgacttcgttttcaagcaacaatactgtccggtgaaaaatataccttcctgagacaaaagatactttttgtccccatgaagctttgttgcctcgtccagcagcaaatgactcaaaagacgcgttctgccaccctcaacagtcgttttcaggcaaagaggaacagcaaatgaggtaccagcaaaagcttaagaaacaaaaccaaggtgagttgaaggcggggaagaaaggcggagtggaagcgagaaatgcaatctaaactctactttgtgatctaagaaattcagcctttactgatgaattgggcagaggaaggggagggtacaagaaaggggaagataatattttctgttacgaaaaaaaaagtgtgctgctgtcctggttttctttcagtagcacccagagaatgcatggcaggcacaatctagtttcgcgacgaaaacgaattccatgagaataacacaagtttgtatgtgacacaatggagatatccaaccaaaccgaggaactatacaattgcatgacaattcctcaaaattttaagtgccttcgagtaccaaaaaagaagtttatgattattcacaggacagggttatcagtttaatatcaccattttgcaggatgtggacccgtcctgtcacatcctcttttaaagaaaccgctaataacctgaaatgctattatcccctatttgccaggactgtgggcctgatagtttcacggataaaaaccaaacagcgaccagaagccaggaagtccctggcgaattcttttgaagcacaacccctacaatccgtgtgccggagcataaagattgaagtgtgcgcggttcctcctccctccgggccgcgcgtccggaacgttcctggctgtcaggtgggtggcgcgggccccggcgggaagccctgcctggcagccttgcgtggcgcgccggcggagaggggcgagccccgcggaatgcggcgggtcctgagcccgaccaccgctcacctttgttcgcctgcccttgccgggaggagagcagggcccaggaggagggcagggggcgaccctaacgctccgcggctcctccccggcgcccgggaggaaatccgtggcaagccagaccctttctggctcccagaaagccagcggggcaggggggtcagcaacccctccccgaacacaaaggttgggaggcgtgaacgcgagcgttgggggcgcgggggcgtgcgccagagagcgcgcgagtgtgtgcgcgcgtgtgtgtgcgcagggggaggggaggaggggcttcagcccttcttacctctcgaagatgagccgcaccatgaagatacagaaggccaggggaaaagcgagatagaggtcctcagcctgcgggaaggtggcctcctccgtgttcttcaggtccgcccaggtgacattgtgcgggagccaaaacctctcgttccagaaccaggctaagatccctgccatcttgctttgtccactcctgtcctgcggcacccgcagcccgccaagctctccaccgcgcagggcgcccggggatgcgcgcccggctggccccgagcctgtgccgccgccgccgctgctcccgcccgccgccgccgcctcctccgcggccgctgctctcgaaggctcgcggcgagccccggttctctcctccctctggccgcgctggggaaaggggccgccttgcccgtcacatggcagctcgggccgcccgccctgattggctcgtcttcgcgtcaaacagcgaggcacacacgcggccaactcgcccacacccgcagggcagggcgcagtcgctgcgccctgggcgcaggggcaccgctccggggagtgtcgcccgcccctgctctcaccgctctttcgctttgcgcttagggcgacgacctaaagtcgaccccccaaatccgccctagccccctggctggctcgcacatgctcagaatgctggctcctgccccgctggggtttcagggctctcagtcctcttcccgtgcgcccggaggcggtgggtcagcaggtaggggctgccgccaagcttcagaaccagccctgctccaggaggacagcaaaaaaaaaaaaagggggggggagggggaggggtaaagagcaaaggaggaagtgggagggaaaggatcctccactcccgcgcttggagaggcagggtgaaaaatcaggaactgaggcaggatggtttggcaagagccttctgcctctgccccacgcctgcctttccccaatctttgactttccggtcttttatactgctgcttctcatcaaagtagctcccccagggaacaagcccccctatattgatttatgaggtggtacaaaaaattaggcacttaattgctatttgattattaattgctacttgatgacgatgatgatgatgatgatgatgatgatagcaactgcagcgttctgtaaaaccacccctctcaactaacctctctgaaaaggctgctagaccacattttgacctggcacatcatgagaacctccactgtgctactcggcaggctcattatttctgccttttgaatctaaaacctttaaggcattaggcctgtgaggcctaacccaggcaccttccctcccgcaatgcatttccccattgatacaggagccatgtgtgaattcattccatggcccatgtatacatggttctggggcatttttgttcatttttctcacattcattttctgcctggtgctgccagtaggctatactaaacctttccagtgggcatataaccgcacacacacacacacacacacacacagagagagggagtttcttttactcttccctcccctctttccactctatctcttgaaagtgaaactgaagaatggcctatactggtgcttccaatttctctcccctcattttcttttgaacttccatttggacatttgtctcctctgctgcattgaaactgcccaaggtcacctgtgatcttcatgctgctaaacacaaaggtcagttcttatcttagtccaggctgcttagactaggtggcttaaacagcagaatttattcctcacggttctggaggcagggaagtccaagatcaacatgcaggcagatccagtgtctggcaaggatcctcttcctggtttgaaaacagctgttttcttgtgtatcctcacatggcagagagcacagaaagaggaaacacagattagtgccctatcttcttataagggcactaatcccattcatgaaggttctaccctcattagctaattacctcccaaagactctgtctctgaatactatcacattgggaactaggatttcagcatatgaattttgggggacacacacattcagttcatagcagttcacaacacctctgtcagtagcatttggcccagttgtcaggtcgtgtgtcttaaaacattcttgacttggcttccagaaacctcactcttctgggtttcttcctccttcatggccatttcttctcagtctccttcctggttactcctcacttttctaacccctagaagttatagtggcctaggagtcagtcttttttcctcttcacttttctatctgaatgtattcatttggtgattttatccagtctcgtggcttttaatgacatctgtatgccctccaatgtcatgctaatagctcccatatttatatctcta

SEQ ID NO: 2744 - DNA, 4001 bp, Homo sapiens
agatggatctaaatagaactactgttcttagtaataaaaattagtataagcctataaaatgatatagataaatcagcactaaaagtcccattatgctctctggactttggctcgcctgggaagatgtgagctgtaaagcaaatctgtcttctagccacttacttgattctaggaggtgattaggtacttcttttctttttttcggctcctccactaggttcttcaagagatggggtgatgcattattaaagggttctttagcattctttagtcctctgctgggggttttcaccactgccattttatcatgaaaaatggagtcttctttttagagccaaaggtcatgtcctggggaggaaagagcagcagtataatcatccatgagaaaccacgcacattttttctctttctttgataaatgtacctcgtctctgtgtggtttactgtggttcatgccctccctggctctcctctctgcgggccactccattcccacacatggctgtcccattaatcttcttacataacccattgcaacccaatgtcatgccattgctccaaacccttctgtggtccttgattctccccaggagcttttcctgaaatgtacttctgagatgcttcttgagttcattgcaggggcccgagaagggaaaaataaaggctctcagtcaaacaagtttggaaagtattgatgtaaacagttaaataagacttccaaataagactcttctttcagagatttctccaaatgagtttcttagaatatttgactatggaagcctttaacatttggaggcactgtttacaggacactggcatttcagagtcaccctcctccatccctctgctaacagggtgatgaggagggggtgatgaggaggtggtgaaacctacggccagccaggtgccagacatgggggtattccagctctgtggatcttgattcatgtcgaaccctgtgtccgatttgccttcccttaacacactcattttaagttccactttcttcatgaagttcacagtgatcccaacacactttaacattctttagcaatcactgcttctattactcatttggtgttaataatttataaccctgtaacaacattttacaaatctcacattcccttatatattgcacaactaaatctcttaacttggggcccttgcgcaggccatggggctggtcggcgaagcctctgaaatggaatgttaattagtgtggatctttgtgtgttttttcggttttgttttttctggagaagacccatagcttcagactcccaagacggacaacatcaagcgacaggcagtgaatctatgaaggaaggcgcttaacaataactttcagaaagaagttctcccctcccctcccctcttctcccctcccctcgcaccacctctcatagcatcgctgaaggctgcatggccccctcctcacctgcttcccttccctccagcccttcaacgccagccctaggatcagcctgcagcccgtctcctcccggagcctcacatcccctgtgcttcaggcaggcccaggagccaggcggtctccacgccgcccacacgccggctcgcccaccgccccggtaggcctggctccgggtctcaccgccgcaccctcgttccctcgccccattctctcaccccgggcaggccctctcgccccggccaagcgcctcctcccctccgcgacctttcattccactcctgctaagggtcagggtcgccccaggcccgcgcaccgctccccccaccatcctcaggtcaccctctgggcccgactctcctcggacccaagccgcggccgacttgcggctggacaccacccggggctcggtcgcctcagcagctaggctgcggcgccccagcggccgaccctgggccacccgggccccaggtccctggccgctcaccctggaggtggttcccgggccggattcggccggcgccagcgccggcgcccgctcggagcgtcgccatgacgacgcggacgcgctcccagggccggcggccgggcgcgaccaaacgccccagggcgggggagccgggctgctgcgggccacgaccggaggcggcgggtgattcctgggagctcggagcagtttgccgggcctggtcaagaatagacagcgcgacttatggcatgggatacgaatggattcccgaggggacatgagaaagttggaaacaccacacactggaacccttcaagagcggagcgcgggagagaagacggacggggcggagccgcccgagccagtgggcggggcttcacctgacaggcatcactcacgacgcccactttcttgtagtttgttttacattttctgttacggtaaatttcaaacgtacacaaaggcagaccgaagggtaaaatagatcttcaacacccagctgcaacgatgatcaaatcctagccaatcctgtttcatccgtatctttccctgactccttgtattattttgaagaaaatcccagatatttcatccataaatatttcaaaatatacctccaaaagataaggattcttaaaaaaaccacaataccttaaaaattataatttattaacatcttcaaattatctcatatttatttttagagtttgaatcagaattcaaatacaatttgcaaattggaatagattgatgtgtcttttaggtctcttttcatcaacagattcctctttcatttctttgttagttgttgcaatttattcattgaagaaactgtttatgtccttgatactgatatttaggggttgtaaacatgaaaccgtgcccgctcctctgacctcctgccctggtccattccaccctgctcatccatgaatattattttttttcaaagacagcttaagcttctcttttcccaggaactgtccttgtctcactccctccttgtgtggctttgatacttgcttgatgttacttatggcttcatgttgacgagaggctatagtaagagtccagtgagggtacctgtcttgcctacattgccacttgtgctggatgcgtatattccctccctgctctttcccaatgggaaatgttcattttttccatcttcccattctccaattcctctctgtcccctaccattattacttactaaaaatctccccatctttcaaggctagctgtagataaggtctcctctcctccccaccctccttctaacccaccagtccggaaagactctttccctcctctgggcttccataaccctctgttccactatctttatattgcacccaacatgattcatgtctgtgacttaaactgcagaattcttgggggagggaactgtaccttgtcttaggatctcccagagcccttgacacagttttttttttttttcttgagacagagttttgccttgttgcccaggctggaatgcaatggcccaatcttggctcactgcaacctctgcctcccgggttcaagagactctcttgcctcagcctcccgagtagctgggattataggcgcccgccaccacgaccagctaattgtttgcatttttagtagagacagggtttcgccttgttggccaggctggtctcaaactcctgacctcagatgatccaccggcctcggctcccaaagtgctgggattacaggcatgagccacggcgctcggccaccttgacacagttctttgtccatattgattactcagtaactgttggccaagggggtgaaacaattcatttgtttatagagtaggttgctttagttccttctgttttgttggtacaaagctgtagatttcagaacaggtactatgcttcccacagtcccagacctctccatccagcacaaatcatgagatatttgttttcatatacttttttatttttaattttttgtaggggtgggggtcttgctgtgttaccaaggcttggtttgaaatcctggcctcaagcaatttttctgccttagactccatatgctttttaatggatattgggtaacactttttaattggtattt

SEQ ID NO: 2745 - DNA, 4001 bp, Homo sapiens
tatatactattaattgtaaacaagcttttttgcctacttgagaaaatatttaaaatgaatactacctcatatttaagacaaaaacacatttcaatcaatatgaggcaataatttcttcataacttttaatgtaatattattgttaatggttaaatccttttacaataggttccatattattttattgtactggaattttgctgatgtaaatgttactgaaagtgaccaggcaatttttgttaccacagataaataatgaagttaaataaaatcaaaacaagtgtttactgaatgatcatatgtataaaacaatgcagtgagccaagatcacgccactgcactccagcctgggcaacagagcgacactctgtctcccaaaaaaaaaaaaaaaaaaggagtacaaatacaagttattttgtttttgaacattgttaaaaaattacctgtaaaaataacactttaataactacgatttgaatattgattatagcaatgaaaatgtaatgaaaagattcagtggtcaaactgaatttcatctttaccagattcatgatatcttggaatttaaagaagtcttaaaaggtcatccaggataaccgaccatttgatagctgaatagctgaatccctctaaccctattaagtcgctatcagatccattcaaacactgctggagccgggaagctcattaccttctgaggctggctaactcatcttggatacattctatcatgaaacacttccttcactgaaatttgtttccctgtagcttgtaccaactgaccctagctctattctactcaaccttacaacacaaagcagatgttcaaataattgatgaatactactaccctcaaagtcttgcccgattaaacaaccacaataacgcttgggcactcatttatatgacgtggtttctggttccttttctgcgaatgggctgcaaatagtctccacgaactgaatgcagaactccaagcctgaagaactgctcagaacccggagatgcctgtccttcacggggaatattatgccatatctatacgcctcatttgttccaagaatggtcctgccccacctcgccaatttttggtatagcgaagagtagagagctcaccaaggggaacacaggccaccaaaatcaccggctctgggcttcctggagttatcacatgccctcctttgcagttaactgttggtttggagtgaaatcatttctcatttcctaagctgactacaccgggcgaaatgctagggatcataaggaactcaggtaaaccgacgcttctcctctcaagtctggcaaagctgttgaagaagcccagccaaacagtccacctgccgagggcagaaacgttcgggacagggtgagagaccgaatttacgattcaagtctaatgttcttcggacgtgcgcttcggccccagagaaggggagtctcggtccccgttttcaggtctgcgaaggaacacattggcagggtgaaaggaattcctcccacacaaccagctctaaacctgatgacgcgggtggagaaggtggtgaggggaacgagaccttgcgacaggggtggagacagggggtcggggagacgagagatggcttgtggttaccaaccccctgcccgccgctggtgtgagagaggagaaaaggattgtcggttcgggctctggtttttaccttcacatttctgttccacaaagtccaagatggggatggaccagtctgggcctcgcaggaaccccgcgatgctctccactacccactccacctcgtcttcttcttccgcagccatcccgccccaaaggggcaacggggaagatccctaggccagaccgccggaccccggttaggcctttgggccacaaggagccgagagggagtaggggaagagctggcccgcagtcgctcagcccccaggatagaagctaccaaccagttaatgcaaaatggtcgctatggcaacacacgtagccgccctagaccgcggcccggaagtgaagacaactttccaggagcctgcgcacttagcggggagggcaaacgtttgaaaaacgtttctgattggttaaaaaagaacagtggacgagggctgagaaaagaagtgtagctattggctggaagtcatagacagattgcgctctctcttctgataaatgcgtaggagccaaggtttagaaaacgcgcagtagacgggcgcggtggctcacgcctgtaattccagcactttgggaggccgaggcttgcggatcacctgaggtcaggaggtcgagaccagcttggccaacatggtgaaacctcgtctctaccaaaaatacaaaaattagcctggcgtggtggcgccgcctgtaatcccaggtactcgggaggctgaggcaggagaatcgcttgaacccgggaagccgaggttgcagtgagccactgcactgcagcctgggagactgcgtctcaaaagaaaaacaggaagaaagaaaagaaaaaagaaaaggctcagtgagggtctgaggtaaccgggtctccacctgacagggcttcagcggctgcagttcatcattgtatccccagcacctcagtcccaaccattttcagaccattggcccagaggcgtttgtaattaaagggttgtctgaaaatacaaagccgagctgtgtgagactcgctgattgtcttacggtcagtttgcatctgtatcttcaggcgggtctttaatctcttacgcttggataaagataactagaattaggagcttttcaagggcaagagcaaagttaatactcacttaaataaatgccttggtaaccaaatcttattataactccaactcagcatttaggtggagtccattgtggaatggggtcttcagtggtcattgtgaaggtgtttggagtcccaaaatatcttcagacaaccatatatatatatatattttttacataaataggattatatgtacagttatgaatttttttcttatatctttatcttttaaaaatataaatttgtgctttctttgcaactgcatagtattccataaaccatcctttagtctatttttattttgtgaatgtgcacacagtatcttacctgaatgcatgaagatgatcattatgtgccttttttttttttttttttttagacagagtctcgctctgtcgcccaggctggagtgcagtggcgtgacctcagctcactgcaaccttagccttctgggttcaagagattctcctgtgcctcagcctccagagtagctgggattacaggcatgtgccaccacacccagctaatttttgtagttttagtagggacagggtttcgccatgttggccaggctggcctcgaactcctgacctcaggtgttccgcctgcctcggcctcccaaagagttaggattacaggcgtgaggcaccgtgcctggccatgtgcaatttttttctttttcctcctccgtgctgtggatttgccattttttgcttccacaaactgctgttataaatgttgcatcctgagaactgttggttttatttactattccaagggatagattccagcagaattgctaaatgaaagaatatatatcttggttaatttgaccaaacctcaactgctacattaaattacttgaattttttaaacccgtaaacaattgtgtaatgaatatacttgcacatatgtttttgaaccctagtctcattatttccctcgaacaaattctcatgggaaaattactgaactaattattttaattattattattatttttttttttgagacggagtctcgctctgtcgcccaggctggagtgcagtggcgcaatctcgggtcactgcaagctccgcctcccgggttcgcaccattctcctgcctcagcctcccgagtaggcgggaccacaggcgcccgccaccacgcccgggtaattttttgtattttcggtacagacggggtttcaccatgttagtagccaggatggtctcgatctcctgagctcgtgatctgcccgcctc

SEQ ID NO: 2746 - DNA, 4001 bp, Homo sapiens
ggctccgtgctccagggcgccgcattcactgagaagacggggacctgcatcaatgcggtggcccgcgcgcccctcgcccggcgcccactcctgcgccgctcccccacccgcgcatccctcccccggcgccaactcccgcgccccccaacccgcgcgcccatcgcccggcgcccactcccgcgcccccgcacccgcgcgcccctctcctgacgcctactcccgcgcccccagacccgcaggtccctcacccggcgcccacccccgtccccaccccgcgcacccctgtgcccacctgcgcctctggtcatgctcgcagtagcggccggtgaagtgggccgggcacacgcagaagctgcccagcacgcaggtaccgccgttcctgcagcagcgcggccgcgcggacgcacctgcggggtcacccgggcgtcagccccgcgccccccgcggcccgtggccctccccgcagggacggggccgaacgtggccgcccaggggaggcagtaaaatcagcctccagccaagtgtgtttgctcaggtaaaccctgcttgttagggatgtgaaacaaactatcaggggtgcggcctgcaagccgggcttgctctctcccttcctttcacatgttaacctctggctgtggcttcacctgacagtgattaagcacaggcctcctgggcgggaccacccacgggtgtgatgacgccaaacccaccggcgaggggcctcctggggacgcggtgtctgggagaagccaagcaagagtccgctgttatcttggcttgggatatttattttcaacacatttaaatcacagttctctagatctgcagcaaaataaccattgaagagcaaatacaacgttttaccaatgaaagagtaaagctttttaacacctcactaggaactgtctctagctttatagctttgtaagtgcatcatcatttgaagataacaaaatgctctccttggattttatcctgaatttatcctacatattctcaggtcctaaactctgagtccgcagactgagatgacgccccggattttgtgggcagcgctgcaacttaccctctccgaaagcccgggagtaggggagcggctcctccggcccccagccctcggcgctcccagtcacctctccgaaatgactggaggtccagttgagcggtgactgtcggtgcttctgagtggcaaccttggtgacttcctctctaccgccgttatgtttctctctttgatagcctttaaaaaatattgaaaatgtgagactgataatgattgagaaacaaatattttatgcaattaaaactgaaattatgaataaaatgtttcttactgtttcccaaattgatgatctgtaatgccaaactgaccgtaaacagaagcctagaatatttaaagaaaatcattgaagttgaaagtatctttagaagtataagcagaaattcacatacacataaaaatacaatgccatcattatatataaatataaaattatgtaaaataattataatgaataaggcaatcattttgtaacttgtaggtttttgttaattttgctatggcttagaaagattttgagacagaaagtgtacacctcctttaatgaacagtggctcatgcactacgatttattctgaggctcttaagaccccttcttggctctaagatctcatgacctctgtccttacctgacatggtgcctccaggtcatttttggtttgagagtctccttctcttagtgcattgaagatcagtttccaggaaagctgaatctgaagagtctctgcatttgaaggtgtctttactccaggccccggggacacagaatggacgagtacagaagatgtggatgttcccttcccttcctcagccaggagaaacgggatggtatcttgagttctgcagtccctgagctagggtcgggggcgcagtgacaggcaggcccctccgagcctgaagaacaattccctctatgagacctggctggggggtggggacttgggctgactccccccagcagtgtttacagtgctgacagcagcaggagtgaccaatccctgatgtaaaacattggtatccaaggtgacgagccattttctcactggaaaaaaaaaaaaatcccaacatgaacaaaaagctttcacaggaaggtggagattttctactgcatactacttgtactgggagatggtgaggggccctgtgggagagggagctcctgtgtggggcacaggcaacagcctggggtcccagccgccctgagtggggaacacgaggataagggaaagcacgtcacccctgctttaagagaggcccccttactctgcagatggagcctcttctctgtgcccagcaagtgggggaggggcactgcccccatttactataggaccctctagggtaggcactattattatcccccacgtgaaaagagagaaagggaggcttagagagtttaagtcctttggcagttagatctctgagaaacatgaatggcaccgatatgatgaggagatacccacaggtatttaaggcgagcccttaggagcacaggcgcaactgcggcgcccgcccatcgccagaggagcctgctgaatccaaacggaacccaaggaaggagtgatttggggtattttctagcaccttctaaatctgcttttctaactaccagaatagggactgagccccttttatcagcactaaagaagacactttgcaacccagtgttgcaaattgttctgtgattttaatataaaaactcatttctaaaaatagtattcttcctccaaggctgaaatagtctttaatggtgatttaatttcttacatctttacgtgtgaggtttattaaagaggctgttaaataaagcaataggaaattggaggaccgggctaccctggggggcctcccagcaatgggtcctgtgggctgcaaggaccaggtcaaggccagcagacccgagtgggcagagcacatggaggaaggtgccccaggacttcatcaagcatctgtaagtgctgtaagtcatgagacaaacaccttgttaattttgttttttagaggcaaagtgtcactctgtcagccaggctggagtgcagtgggcgatcatagctcaccacatcctcgaacttctgggcttaagtgatcctcctaccccagcctctgagtggctaggactacaggctcgcgcccctatgcccagctaattttttttttattttgtagagatagggatcttgctatgtttcccaggctgtcctctaacttctggccttaagcgatcctcctgcctctgcctcccaaagtgctgggattacaggcacaaacccaccgtgtccggtgaaaaacacactttatttttttgagacggagtctagctctgtggcccaggctggagtgcagtggtgcaatctcggctcactgcaacctccgcctcccggattcacaccattctcctgcctcagcctcccgagtagctgggactacaggcgcccaccaccatgcctggctaatttttttgtatttttagtagagacggggtttcaccgtgttagccaggatggtcttgatctcctgacctcgtgatccacccgcctcggcctcccaaagtgctgggattactggcatgagccactgcgcccggccgaaaaatacacttttaaactcagtggttactactggttaattgcatcatttaattatatgtaaaagtaagtacattttatgactttaagttaatagaatcttttgcatgagctaaattgtttgtatactaaaatgaagatgtatataagctagatgattgtattttttgtataaataagttttaaaactgttcattttacagagtgatattgaaaccaaacctctctgacaatagtaaagctttaaaagcagcctctaaaatctaactttcccccacagtttatttattaaattttaccttagtggacatttccaaacatacacaaaggctggtagaatgagccaataaacccag

SEQ ID NO: 2747 - DNA, 4001 bp, Homo sapiens
cccacccgcgcatccctcccccggcgccaactcccgcgccccccaacccgcgcgcccatcgcccggcgcccactcccgcgcccccgcacccgcgcgcccctctcctgacgcctactcccgcgcccccagacccgcaggtccctcacccggcgcccacccccgtccccaccccgcgcacccctgtgcccacctgcgcctctggtcatgctcgcagtagcggccggtgaagtgggccgggcacacgcagaagctgcccagcacgcaggtaccgccgttcctgcagcagcgcggccgcgcggacgcacctgcggggtcacccgggcgtcagccccgcgccccccgcggcccgtggccctccccgcagggacggggccgaacgtggccgcccaggggaggcagtaaaatcagcctccagccaagtgtgtttgctcaggtaaaccctgcttgttagggatgtgaaacaaactatcaggggtgcggcctgcaagccgggcttgctctctcccttcctttcacatgttaacctctggctgtggcttcacctgacagtgattaagcacaggcctcctgggcgggaccacccacgggtgtgatgacgccaaacccaccggcgaggggcctcctggggacgcggtgtctgggagaagccaagcaagagtccgctgttatcttggcttgggatatttattttcaacacatttaaatcacagttctctagatctgcagcaaaataaccattgaagagcaaatacaacgttttaccaatgaaagagtaaaactttttaacacctcactaggaactgtctctagctttatagctttgtaagtgcatcatcatttgaagataacaaaatgctctccttggattttatcctgaatttatcctacatattctcaggtcctaaactctgagtccgcagactgagatgacgccccggattttgtgggcagcgctgcaacttaccctctccgaaagcccaggagtatgggagcggctcctccggcccccagccctcggcgctcccagtcacctctccgaaatgactggaggtccagttgagcggtgactgtcggtgcttctgagtggcaaccttggtgacttcctctctaccgccgttatgtttctctctttgatagcctttaaaaaatattgaaaatgtgagactgataatgattgagaaacaaatattttatgcaattaaaactgaaattatgaataaaatgtttcttactgtttcccaaattgatgatctgtaatgccaaactgaccgtaaacagaagcctagaatatttaaagaaaatcattgaagttgaaagtatctttagaagtataagcagaaattcacatacacataaaaatacaatgccatcattatatataaatataaaattatgtaaaataattataatgaataaggcaatcattttgtaacttgtaggtttttgttaattttgctatggcttagaaagattttgagacagaaagtgtacacctcctttaatgaacagtggctcatgcactacgatttattctgaggctcttaagaccccttcttggctctaagatctcatgacctctgtccttacctgacatggtgcctccaggtcatttttggtttgagagtctccttctcttagtgcattgaagatcagtttccaggaaagctgaatctgaagagtctctgcatttgaaggtgtctttactccaggccccggggacacagaatggacgagtacagaagatgtggatgttcccttcccttcctcagccaggagaaacgggatggtatcttgagttctgcagtccctgagctagggtcgggggcgcagtgacaggcaggcccctccgagcctgaagaacaattccctctatgagacctggctggggggtggggacttgggctgactccccccagcagtgtttacagtgctgacagcagcaggagtgaccaatccctgatgtaaaacattggtatccaaggtgacgagccattttctcactggaaaaaaaaaaaaatcccaacatgaacaaaaagctttcacaggaaggtggagattttctactgcatactacttgtactgggagatggtgaggggccctgtgggagagggagctcctgtgtggggcacaggcaacagcctggggtcccagccgccctgagtggggaacacgaggataagggaaagcacgtcacccctgctttaagagaggcccccttactctgcagatggagcctcttctctgtgcccagcaagtgggggaggggcactgcccccatttactataggaccctctagggtaggcactattattatcccccacgtgaaaagagagaaagggaggcttagagagtttaagtcctttggcagttagatctctgagaaacatgaatggcaccgatatgatgaggagatacccacaggtatttaaggcgagcccttgggagcacaggcgcaactgcggcgcccgcccatcgccagaggagcctgctgaatccaaacggaacccaaggaaggagtgatttggggtattttctagcaccttctaaatctgcttttctaactaccagaatagggactgagccccttttatcagcactaaagaagacactttgcaacccagtgttgcaaattgttctgtgattttaatataaaaactcatttctaaaaatagtattcttcctccaaggctgaaatagtctttaatggtgatttaatttcttacatctttacgtgtgaggtttattaaagaggctgttaaataaagcaataggaaattggaggaccgggctaccctggggggcctcccagcaatgggtcctgtgggctgcaaggaccaggtcaaggccagcagacccgagtgggcagagcacatggaggaaggtgccccaggacttcatcaagcatctgtaagtgctgtaagtcatgagacaaacaccttgttaattttgttttttagaggcaaagtgtcactctgtcagccaggctggagtgcagtgggcgatcatagctcaccacatcctcgaacttctgggcttaagtgatcctcctaccccagcctctgagtggctaggactacaggctcgcgcccctatgcccagctaattttttttttattttgtagagatagggatcttgctatgtttcccaggctgtcctctaacttctggccttaagcgatcctcctgcctctgcctcccaaagtgctgggattacaggcacaaacccaccgtgtccggtgaaaaacacactttatttttttgagacggagtctagctctgtggcccaggctggagtgcagtggtgcaatctcggctcactgcaacctccgcctcccggattcacaccattctcctgcctcagcctcccgagtagctgggactacaggcgcccaccaccatgcctggctaatttttttgtatttttagtagagacggggtttcaccgtgttagccaggatggtcttgatctcctgacctcgtgatccacccgcctcggcctcccaaagtgctgggattactggcatgagccactgcgcccggccgaaaaatacacttttaaactcagtggttactactggttaattgcatcatttaattatatgtaaaagtaagtacattttatgactttaagttaatagaatcttttgcatgagctaaattgtttgtatactaaaatgaagatgtatataagctagatgattgtattttttgtataaataagttttaaaactgttcattttacagagtgatattgaaaccaaacctctctgacaatagtaaagctttaaaagcagcctctaaaatctaactttcccccacagtttatttattaaattttaccttagtggacatttccaaacatacacaaaggctggtagaatgagccaataaacccaggttcaacaattaagtatcagcctttgccaattttatttcatttgtttcctccctaacttttttcttgaagttttaaaaactccaatacatcatgacatttca

SEQ ID NO: 2748 - DNA, 4001 bp, Homo sapiens
ccacccgcgcatccctcccccggcgccaactcccgcgccccccaacccgcgcgcccatcgcccggcgcccactcccgcgcccccgcacccgcgcgcccctctcctgacgcctactcccgcgcccccagacccgcaggtccctcacccggcgcccacccccgtccccaccccgcgcacccctgtgcccacctgcgcctctggtcatgctcgcagtagcggccggtgaagtgggccgggcacacgcagaagctgcccagcacgcaggtaccgccgttcctgcagcagcgcggccgcgcggacgcacctgcggggtcacccgggcgtcagccccgcgccccccgcggcccgtggccctccccgcagggacggggccgaacgtggccgcccaggggaggcagtaaaatcagcctccagccaagtgtgtttgctcaggtaaaccctgcttgttagggatgtgaaacaaactatcaggggtgcggcctgcaagccgggcttgctctctcccttcctttcacatgttaacctctggctgtggcttcacctgacagtgattaagcacaggcctcctgggcgggaccacccacgggtgtgatgacgccaaacccaccggcgaggggcctcctggggacgcggtgtctgggagaagccaagcaagagtccgctgttatcttggcttgggatatttattttcaacacatttaaatcacagttctctagatctgcagcaaaataaccattgaagagcaaatacaacgttttaccaatgaaagagtaaagctttttaacacctcactaggaactgtctctagctttatagctttgtaagtgcatcatcatttgaagataacaaaatgctctccttggattttatcctgaatttatcctacatattctcaggtcctaaactctgagtccgcagactgagatgacgccccggattttgtgggcagcgctgcaacttaccctctccgaaagcccgggagtaggggagcggctcctccggcccccagccctcggcgctcccagtcacctctccgaaatgactggaggtccagttgagcggtgactgtcggtgcttctgagtggcaaccttggtgacttcctctctaccgccgttatgtttctctctttgatagcctttaaaaaatattgaaaatgtgagactgataatgattgagaaacaaatattttatgcaattaaaactgaaattatgaataaaatgtttcttactgtttcccaaattgatgatctgtaatgccaaactgaccgtaaacagaagcctagaatatttaaagaaaatcattgaagttgaaagtatctttagaagtataagcagaaattcacatacacataaaaatacaatgccatcattatatataaatataaaattatgtaaaataattataatgaataaggcaatcattttgtaacttgtaggtttttgttaattttgctatggcttagaaagattttgagacagaaagtgtacacctcctttaatgaacagtggctcatgcactacgatttattctgaggctcttaagaccccttcttggctctaagatctcatgacctctgtccttacctgacatggtgcctccaggtcatttttggtttgagagtctccttctcttagtgcattgaagatcagtttccaggaaagctgaatctgaagagtctctgcatttgaaggtgtctttactccaggccccggggacacagaatggacgagtacagaagatgtggatgttcccttcccttcctcagccaggagaaacgggatggtatcttgagttctgcagtccctgagctagggtcgggggcgcagtgacaggcaggcccctccgagcctgaagaacaattccctctatgagacctggctggggggtggggacttgggctgactccccccagcagtgtttacagtgctgacagcagcaggagtgaccaatccctgatgtaaaacattggtatccaaggtgacgagccattttctcactggaaaaaaaaaaaaatcccaacatgaacaaaaagctttcacaggaaggtggagattttctactgcatactacttgtactgggagatggtgaggggccctgtgggagagggagctcctgtgtggggcacaggcaacagcctggggtcccagccgccctgagtggggaacacgaggataagggaaagcacgtcacccctgctttaagagaggcccccttactctgcagatggagcctcttctctgtgcccagcaagtgggggaggggcactgcccccatttactataggaccctctagggtaggcactattattatcccccacgtgaaaagagagaaagggaggcttagagagtttaagtcctttggcagttagatctctgagaaacatgaatggcaccgatatgatgaggagatacccacaggtatttaaggcgagcccttaggagcacaggcgcaactgcggcgcccgcccatcgccagaggagcctgctgaatccaaacggaacccaaggaaggagtgatttggggtattttctagcaccttctaaatctgcttttctaactaccagaatagggactgagccccttttatcagcactaaagaagacactttgcaacccagtgttgcaaattgttctgtgattttaatataaaaactcatttctaaaaatagtattcttcctccaaggctgaaatagtctttaatggtgatttaatttcttacatctttacgtgtgaggtttattaaagaggctgttaaataaagcaataggaaattggaggaccgggctaccctggggggcctcccagcaatgggtcctgtgggctgcaaggaccaggtcaaggccagcagacccgagtgggcagagcacatggaggaaggtgccccaggacttcatcaagcatctgtaagtgctgtaagtcatgagacaaacaccttgttaattttgttttttagaggcaaagtgtcactctgtcagccaggctggagtgcagtgggcgatcatagctcaccacatcctcgaacttctgggcttaagtgatcctcctaccccagcctctgagtggctaggactacaggctcgcgcccctatgcccagctaattttttttttattttgtagagatagggatcttgctatgtttcccaggctgtcctctaacttctggccttaagcgatcctcctgcctctgcctcccaaagtgctgggattacaggcacaaacccaccgtgtccggtgaaaaacacactttatttttttgagacggagtctagctctgtggcccaggctggagtgcagtggtgcaatctcggctcactgcaacctccgcctcccggattcacaccattctcctgcctcagcctcccgagtagctgggactacaggcgcccaccaccatgcctggctaatttttttgtatttttagtagagacggggtttcaccgtgttagccaggatggtcttgatctcctgacctcgtgatccacccgcctcggcctcccaaagtgctgggattactggcatgagccactgcgcccggccgaaaaatacacttttaaactcagtggttactactggttaattgcatcatttaattatatgtaaaagtaagtacattttatgactttaagttaatagaatcttttgcatgagctaaattgtttgtatactaaaatgaagatgtatataagctagatgattgtattttttgtataaataagttttaaaactgttcattttacagagtgatattgaaaccaaacctctctgacaatagtaaagctttaaaagcagcctctaaaatctaactttcccccacagtttatttattaaattttaccttagtggacatttccaaacatacacaaaggctggtagaatgagccaataaacccaggttcaacaattaagtatcagcctttgccaattttatttcatttgtttcctccctaacttttttcttgaagttttaaaaactccaatacatcatgacatttcat

SEQ ID NO: 2749 - DNA, 4001 bp, Homo sapiens
agaagatacaaattatcatgagtatgcagatgaaagtggtatcaagtggtgtagcttctctctttcataataagtactaaatcaccaaagatggcaacccagtatcgagaataagagaaaaataatgtagaagatgtttatctatttgggccaaaaacttaaatcgccaaaaaaagaaagtggctagaagtggagaccatcagaggaacataaatacagaacaagtgtagaaaaggaagcaattttcacaggagaatcacttgaacccaggaggcagaggctgcagtgagcagagatagcaccactgcactccagcctgggtgacagagtgagactctgtctcaaaaaaaaaaaaaaatgtagctgggtgtggtggcacacacctgtagttccagctactccagaggctgatgtgagatgactgcttgagcctagagttagaggctgaagtgagatatgatcaccactgcactccagcctgggcaacaagcaagacctcatctcaaaaaaaaaaaaaaaaaaagaaaagaaaagaaggccccaccttgaatcttttttagaaaaaagcaggttgtaaataaacacaattttaaaaaatgaaatatcttgcaaactagaaaataaaccaaaaaaattgagtgtttatttttaaaaatatgtaaaagactgtatttgagagcgcacatgtgtgaaaaaaaaaaaaaaaacattaaactgaaacctttggttatctctacggaatgaacccctggaggttttctctatttactttgcatgtattttaactcataattataatacaacttgactgaagagtgtctgaagaaaatgcattacagtacagaatgttaggtacaatcctgaagcaagtgcaaagacagccgctgagcatatgaaagtacagagaaagggcaccagggtggggtgtcaagtcttctgaggggagatgacaggaagagagtataagggagagacagggcattccaataatgatagtgcttttcacctcactgatctatagtaagaaagaacgaccgggttctgcaagttacctgggcatactaaaagaaaagacaaaacaaacaaacaaataaacaaaaagaacccatggtgtcataactgccccaccatggcccacaggcttcctccagtcaggctgtcagtggatcttgtctaaactgccttgactcgaagttacctgtgtaggtaactgctgagtcttcctcaaccacattgtgaggttatggggacaagaaccaagtttagatccatttctatgtcctcggcacccagaactctgcctggcccagagaagctcaataaatgttggtaggattatactgaattaaaggcaaggaggcattggagtccataaacacgagtttaattagcccctggggctctacagggaagaaataatcagacttcaagggtgccccattccccagagtccattcctggtatttgaaagagcaacatgccccggagtgttgtgagtcctctggaggctcaaggagacctagggccaaaagcgaggactcaatccttttctgccagtatcgggggacagtgccccgacgtcccaggagcccagggcgacaccagcccaggggcggggatcgggcaggattctcggtctactcacgcccgggcagccgccggctcttcccactggatctccgccgggaccaactcccaccctcgccggacaagctcagacctgctgctccgcaaaaccagaattggaaatgctccagatgggacgaggaacaaggacagaaagtcaaaagcatcaacaggtggcttcgccggagggcgtccgagaacctctgcctgctgaaccgcttcacgcctaatccccgccacccaccggctgaaatgttaccacacaagacataaattctagaatcctgtctgcggaattccccgccccccgcgcagttgaaacttgcacagggccactcgcgtgtctctgggtggtaaaattctccatgcgtggtcaaacggcttatgcatagctcaggaccgttacgtgcgaccccaccaggactgagtggggacagccgctgcgcccccaccacctactaggagctgcggtaggacctccaatgccccaggggcctaggcaatttccgcttcagcttcctggaggtccccagcccaaggctcaaaaaactgcacactatccggcccaccccgggtcgcgcaagactttcggggggagggggaaacccagcgaccctgcaaatggcttcaccttggaaaccggtataaggaagcaagtaataccgtgttaaaagaaggtcaaatgtcagttacaaacagaaacgtaaaacataaagtcgctagagaaagccattttaacgaggacatttgacccaaaagcttaagtaaagcaagtattaacaaaacaagaaaatggatgtaaagcaaacagtaaacattaaaaactccctttcaacccagtcttttttgtttagatcttggagttgggccgggcatggtggctcacgcctgtaatcccagcactttgggatgccgaggcgggcggatcacctaaggtcaggagttcgagaccagactgaccaacatggagaaaccccgtctctattaaaaatacaaaactagccgggcatggtggtgcatgcctgtaatctcagctacttgagaggctgaggcacgagaatcgcttgaacccgacaggcggaggttgcggtgagcagagatagtgccattgcattccagcctgggcaacaagagtgaaatgctgtctcaaaaaaaaaaaaaaaaaaaaaagatcttggagctccagccaggttttttgttcaacgaaacttttgtaaggttatttaggggaatcaccaaaccgaaaagtgccaaaaactccgttcctcttatcggaaatctctctctaaagcaggtcaaaccttccagagcccgctgtctgttgtagattatcgcagtttgttgatgtccaaaaagctttacttatgctatacgctatccccctactggtttcacccctcattgcttaagaacaaatttcaaatgtcaaccaattaaaatattcgcaagacctctggcgtccttgaatttacttcctgcccgtggagccaaaaactgattctgaatttcagtggcctttgttctactgcgtgccactgttaatattaaaagaacatggccttctgtccaaatccagacaccctcaagcaagaacatcttgaagccagtttacatttcccagtcgttttgaggcggtggaaaagtggcagaaacaggttcattttaaaaggctctaaaaacttttcattagccaagcattcccagctttcccaaggcaagctttccttgcacttgggcaaaatagacattaaactgctctggaaaataaccgccctgaccaggctattgtgaaattccctccagggcggcggctcccactgagtgagatcgagcgcatacacaattgttgggaaagtccacgttcccaacaactttcgaaaggaaaaatgccagatcttctcaacagttcaccccaagaattgaactctcaagatcattttaagcaaagtttacacgacgctgagggcccgccactgaagctcgcgggtgggcctctggggctgcggctgcagggggcggccagagttggccaagggttacttccggtctctcaggtccatcggggtgcagcttgtaccgctgtggcccaggtcgcccctttctgggaatccggggcggagttgcgggtagaaggggttcgggggttcggagccgggcggaaacggaagcgggggcattccgcaaagcccgcggtaaacaaccgagataaggaacctacaaaactgagtcaggttccagaagcgcccccgccatcccctggccactgccggccacctgcagtttcccggagcgcagggctgtgaggagcggcgcggggtgggacgcggggcgcggcggcgcagggcctgctgcaatgctgactcagggccgggcgt

SEQ ID NO: 2750 - DNA, 4001 bp, Homo sapiens
aaagcaagtattaacaaaacaagaaaatggatgtaaagcaaacagtaaacattaaaaactccctttcaacccagtcttttttgtttagatcttggagttgggccgggcatggtggctcacgcctgtaatcccagcactttgggatgccgaggcgggcggatcacctaaggtcaggagttcgagaccagactgaccaacatggagaaaccccgtctctattaaaaatacaaaactagccgggcatggtggtgcatgcctgtaatctcagctacttgagaggctgaggcacgagaatcgcttgaacccgacaggcggaggttgcggtgagcagagatagtgccattgcattccagcctgggcaacaagagtgaaatgctgtctcaaaaaaaaaaaaaaaaaaaaaagatcttggagctccagccaggttttttgttcaacgaaacttttgtaaggttatttaggggaatcaccaaaccgaaaagtgccaaaaactccgttcctcttatcggaaatctctctctaaagcaggtcaaaccttccagagcccgctgtctgttgtagattatcgcagtttgttgatgtccaaaaagctttacttatgctatacgctatccccctactggtttcacccctcattgcttaagaacaaatttcaaatgtcaaccaattaaaatattcgcaagacctctggcgtccttgaatttacttcctgcccgtggagccaaaaactgattctgaatttcagtggcctttgttctactgcgtgccactgttaatattaaaagaacatggccttctgtccaaatccagacaccctcaagcaagaacatcttgaagccagtttacatttcccagtcgttttgaggcggtggaaaagtggcagaaacaggttcattttaaaaggctctaaaaacttttcattagccaagcattcccagctttcccaaggcaagctttccttgcacttgggcaaaatagacattaaactgctctggaaaataaccgccctgaccaggctattgtgaaattccctccagggcggcggctcccactgagtgagatcgagcgcatacacaattgttgggaaagtccacgttcccaacaactttcgaaaggaaaaatgccagatcttctcaacagttcaccccaagaattgaactctcaagatcattttaagcaaagtttacacgacgctgagggcccgccactgaagctcgcgggtgggcctctggggctgcggctgcagggggcggccagagttggccaagggttacttccggtctctcaggtccatcggggtgcagcttgtaccgctgtggcccaggtcgcccctttctgggaatccggggcggagttgcgggtagaaggggttcgggggttcggagccgggcggaaacggaagcgggggcattccgcaaagcccgcggtaaacaaccgagataaggaacctacaaaactgagtcaggttccagaagcgcccccgccatcccctggccactgccggccacctgcagtttcccggagcgcagggctgtgaggagcggcgcggggtgggacgcggggcgcggcggcgcagggcctgctgcaatgctgactcagggccgggcgtcggggcttggggtctgggacagctccggcgccgccagcgcgggggtcgagcgcggggcacgtaccgtcctgtcgcggccggactctcctgccgctgccacctcagccttcgctcccctagacgccgggaaggcgcacccaagatggaggcaaagaaaccgaaagcctggaagcggacttggtgctgggcgatcgctgttcgcggcgcttctctcctacacctcctcccgtggtccttgttgtctcagctgtcactggacaaaagtccaatagccggcactcactgtgtgaggccgagtccccacccctagctccgggagtcccttttagttgagactcgtcggtgaggctgcaagctcgctgtttcctgctatggcttgtgtgactgagtatgcagtaaccgggggtggatgtcgacacaagttccacgcgttaggagtaaacactgcgagtgtttttttttttctttctttctttccttcttttttgagacagagtctcgctctgtggcccaggctggagtgcagtggcgcaatttcagctcactgcaacctccgccttcctagttcaagcgattctcttgcctcagcctcccgagtagctgggactacaggcacgcgccagcacgcccgcctaatttttgtgtttagtagagacggggtttcactgttggccagaatggtctcgaactcttgacctcgtgatccgcccgcctcggcctcccaaagtgctgggattacaggcgtgagccaccacgcccggcgcgagtgtttacaattgttgtctgggagtcatagcaaacgtgaacacactttgtggttttttgtgtgtatgtttttgtttgtttttttttgttttccttcttgagacagggtctcgcgctgtcgcccaggctagaaggcagtggcgccatcacagctcactgcagcctggatttcccgctctcaaaccatccagccctcagcctcccaagtagcggggaccacaggtgcaagccaccatgcccgactaatttttttttttttttgtatttttagtagagatggggtttcaccatgttggcaaggctggtctccaactgctggcctcaagtgatccttgcccgcctcggcctcccaaagtgctgggatcacaggcgtgagccaccgcgcccctctacgtttttatttattcctaataactactttattgtgattcttaaagagctttaacttttcttgagataattttaaactcacaggaaaggtgaagaataataccaagagagactaacagcaggacggcatgaagagctcgggattcacccctagtgaaactgaaaattatttaaaacaacaaacaaccattaaccatttaaagcctttgaaatggtcctaagggcaaacagcaaatgaagaaacatctgttccaaaaaatctatgaaaactcttggatcagaatgtgagagtcagtctgtggtatttaaaccaaacctctccctttgttcagcaagagactccactccagactgctgcaactcagaacctctctcttcccacagctcccagtcagagaccagcatatcagcatttctcatcttgcccctagctacctgatgctgaaggtaaatcctgggggagtgtggtggagaggtgggagattccttcttccatccagaggctctaccttgggtggagtgctgagacaccagaggagacttcagctctttttctccatcactttcaccccatattcacccccaacctttttttttaatctctccatcttcccaagatagttatattctgtttgattaatcttcagtatatatgctattataatcatgtaaacggtagtcacagccaagttatgtaccaaactatgattacttttcctttcccacacaacttttagttttttctggagttaataattgtcttgttttgttggtttttccatgtaattctatcctaaactctgtcagttatccaagtttggttttttgtttgtttttgagacagggtctcactccaggctggagtgcagtgacccgatcacagctcactgcagccttaacctcccaggttcaagtgatccttctgcctcagcctcctgagtagctaggactacaggtcctagcatgccaccatgctaggtgtgccactacaggtgccaccatgcccagctaattctttaaaaaaaaatttgtggcccggcgcaatggcttatgcctgtaatcccagcactttgggaggctgaggcgggtggatcacgaggtcaggagttcaagaccagcctggcccagatagtgaaaccccatctctactaaaaatacaaaaaattaactgggtgtgatggcgggcgcctgtaatcccagctactcaggaggctaaggcagagaattgcttgaaccc

SEQ ID NO: 2751 - DNA, 4001 bp, Homo sapiens
agagacaaggtctcactctgtcaccagggctggagtgcagtggcacactcacacctcactgcagcctcaacctcccaggctcaagcaatttctcccacctcagcctcccaagtagctgagactaaaggcacaccatcatgcccagctaatttttgtattttttgtagaaatggggttttgacatattgaccaggtttgtctcgaactcctgggctcaagcgatccgcttgcctcggcctcccaaagtgctgggattacaggcgtgagccaccacactcagccaaaagcatttttttccttctttttttttagggctttctggcaaaaactgaaaagcctgctagacaaattctaaaagagctgttaacactgccaaaagcatttctaatttaaccatgaaattgtacccggctctaagtcctcactacaaactccacatatctttatatgaacatgaggataagattacaccaagatttaacttctcaagataaaagattaactaaagaacaattccgataccttgtactaagtactaggaacacaacaaccataagtgactatatgatacacttatgctcatgaacaccctcaaaaatcttttgtttcatcactcaataacaaaataacttttgctgaaatcattaaaattagctcagtaaaaaaacaaatgcacaaagaagtacaaggatatttattttatagcattattagtagtaacaaaagattggaaagcatctaaacatacagcaacaagaaagggctaaacacattataacacatttagaaaatgaaacgatttaatcattcagaatgattaagtagaggcagttccatgttaatcacatggaacaatttccaagaattttcagatcaggacaatgggcatagggtgttatcatctgtagaagagaaaaaagcaaaaatgaaatatatgtgtagactatctctggatagttacagaatgaactagttcacaacagctgcctttaggaaaaataattggaggtcagtattataggggtaggaagaaaacattttttttgagacagagttttgctcttgtcacccaggctggagtacaatggcgcgatttggctactgcaacctccacttcctgggttcatatgattctcctgcctcagcctcccaagtagctgggattataggcacctgccaccatacctggctaatttttgtattttttagtagagatggagtttcaccatgttggccaggccagtctcgaactcctgacctcaggtgatccttccggctcggcctcccaaagtgctgggattacacgcatgagccaccgcacccgggcaaaaaaatacttttaaaacctcttgtagtacatttaaatttttttccataggcatggtgcatctatttttatttttaaagttacattttctttttttaagttacaatttcaagtgaataaatgaacagtgaaaaaaatgtccaattgtccaactgtatgtatgtatgtatgtatatatatatatatatacatacatacagatacagatgcaaacccacataaaaaagagtctagaaggaaatataccaaaatactaacagtggttgtctttggatagtggaatataggtgatttattttcttttatctttctctatagtctccaaatatctcaatgaacatgtattagctttgaaatataagaagttacacgtttttaaaacaaatacacatttctatcacaattttttcagatattaaataaagtacatgctgtgagaatatgcatatttttattagaactctgaaacggtttcatgctgggattccatatgttttctccagactcaccctgaagttatttgaaggatccttgagactcttttggattgctgcttggagaacattcctgtaacttgtccctgctccttgaactataaaagcagaagggaggtactgagttaaaacttacaaattattatcaaataaatcttcaatagtggttcagtccaaggtcaatcaccatctttcaaaataccctaaactttctagccaccttactgaattcaaaatttcagatgactcttcgaccaaacatcatgaagaatggagtatagggcgccctggcccgccccgccgctgccgcagcccccgcccccagcccacccagcccacccggcgcctggctgcagcgtggcagcggcgcgcctccgcgtcgcagcagctgcagcgtttatgtcgggtcgcggggtctcgcggcagcatgagggactacctatcagcagcagcaccggctacgtggtcgaggacgggttcactgcgctgaaggggtgggttgcccctccacacctgtgggtttttctcgttaggtggaacgagagacttggaaaagaaagacacagacgcaaagtatagagaaagaaaaaagggggcccaggggaccggcgttcagcatacggaggatcccgccggcctcttagttcccttagtatttattgatcatttttaggtgtttctcggagaggggggtgtggcagggtcatagaataatagtggagagaaggtcagcagataaacacgtgaacaaaggtctctgcatcaagaacaaggtaaagaattaagtgctgtgcttcagatatgcatacacataaacatctcaatgacttaaagagcagtagtgctgcccgcatgtcccacctccagccctaaggcggttttcccctatctcagcagatggaacatacaatcaggttttacaccgagacattccattgcccagggactggcaggagacagatgccttcctcttctctcaactgcaaacaggcgttccttcctcttttactaatcctcctcagcacagaccctttatgggtgtcgggctgggggacggtcaggtctttcccttcccatgaggccatatttcagactatcacatggggagaaaccttggacaatacctggctttcctaggcagaggtccctgcggccttccgcagtgtttgtgtccctgggtacttgagattagggagtggtgatgactcttaacgagcacgctgccttcaagcatctgtttaacaaagcacatcttgcacagcccttaatccacttaaccctgagttgacatagcacatgtttcagggagcacagggttgggggtaaggttacagattaacagcatctcgaggcagaagaatttttcttagtacagaacaaaatggagtctcctatgtctacttctttctacacagacacagtaacaatctgatctctctttcttttccccacaccgtgcagcagctcttcgccagtgaccagggactcacctacaacgacttcttgattctcccaggattcatagacttcatagctgatgaggtggacctgacctcagccctgacccaatggtcactctgaagacgccgctgatctcctcccccatggacactgtgacagaggccgacctggccatcgtgatggctctgatgggaggtactggtttcattcaccacaactgcaccccagagttccaggccagtgaggtgcagaaggtcaagaagtttgaaccgggctttatcacacaccccgtggtgctgagccccttgcacactgtgggtgatgtgttggaggccaagatgcgtcatggcttctctggcatccccatcactgagacgggtaccatgggcagcaagctggtgggcatcgtcacctcccgagacatcgactttcttgctgagaaggaccacaccaccctcctcagtgaggtgatgatgccaaggatcaagctagtggtggctccagcagtgtgaggttgaaagaggcaaatgagatcctgcagcttagtaagaaaggaagctgcctatcgtcaatgatcgcgatgagctggtggccattatcacctgcaccgcgctgaagaaccgagactaccctgtggcctccaaggattcccatgagcagctgctgggcggggcagctgtgggtacccatgaggatgacaaataccacctggacctgct

SEQ ID NO: 2752 - DNA, 4001 bp, Homo sapiens
gagacaattactaggagaaaccaaaaagggagttctagtttcattttccttcccattttgcatttgatgggacttaagaaacaaaactataatcattaggaacatgaggaaattctcaagcaatgacttatctgaatcgttacaggcaggcactggcctgcctattttgaggacctattgtcatattttagaaacaataggttctcaaacatttcctggcctatccttaggtcaacagtaccatgtagggccaactagaatgttattttattttatatttttttattttattttattttattttattttattttattttattttaatttttgagatggagtctggctctatagcccaggctggagtgcaatagcacaatcttggcttactgcaacctctgcctcctgggttctagcaattctcctgcctcagcctcccaagtagctgggattacaggcgcccaccactacgcccagctaatttttgtacttttagtagagatggggttttgccatgttggccaggctggtcttgaactcctgacctcaagtgatctgcccggctcagcctcccaaagtgctgggattacaagcatgagccactgtgcccatgagccattgtgctaggccaactggagttaaaaaaaatttttttttttgagacagagtcttgctccgtcgcccaggctggagtgcaatggtgcaatctcgactcactgcaacctccgcctcctgggttcaagtgattctcctgccttcacctcctgtagctgggattataggtgcctaccaccacgcccggctaattttttgtatttttagtagagacggagtttcaccaggttggccaggttggtctcaaactcttgacctcaggtgatctgcccacctcagtctcccaaagtgctaggattacaggcgtgagccaccgtgcctggccatggattttaaatatttttctagcaatcatgacatccccgagatcttcaccactacctggtcttcttttcttcattttttttttttttttttttttttgagatggagtcttgctgtcacccaggctggagtgcagtggcgccatctcagctcaccgcaagctctgcctcccagcttcacaccattctcttgcctcagcctcccgagtaactgggactacaggcgcccgccaccacacccggctactttttttgtatttttagtagagatagggtttcaccgtgttagccaggttggtctcgatctcctgacctcgtgatccacccaccttggccccccaaagtgctgggattacaggcatgagccactgcgcccggcctcctggttttcaactctaaatctctacttttaccatttcccagatacaccagtcacaagaacctccccccaccccactcctacatgcagcctagaccccacaatgaccttgagtcagctgaggagaaatagatggcagtaggagagtgatactatagtggactagcacctccttcctgttttcccccagcacaagcagatgggatgtcttccccacaaccccatcaaaccagggagggaaacacatatgagccagacctatgaattttacagaaacaaggataaaatccaaggatgaaagaaacatccaagaccacaccagaagatgttataatcctatttcttcaattcataaaccaattctcttcccattcatgttgtttaaaagccacctgagatgtctgactcccactatagtggcggcagactgcctgcttccctctctctgtatcaacaagagtagctcccacttctgataggctcctggggccatgaaccaaaagaagaaaactcaccttctccttgcttatcttgcctcggcccatgtaatccttcatgaggaaaattaatgaggacacatcagatttatccaaatcctcaccaatctctgccatcagcactctgcaaaccagacaagttcatttagttaattcagacatcagtcctaagacaactccaagtgcccacgcctcccctatgcaacaatggattaaaagactagttcttgcccctgtgtaaatatgtccctccctcataaaacagcaagcctagatcaccccaggaagagatcttaagggacctcagaaaagggaacttgtccttgcccgtttaataggagatggtacatcctttgccaactaacagtttctgaaaacaactcagagaatggaaacttccttaaagaatcccctagctcccccagaggttacagtgaaatgacttaagaacccaaatgactaacataaaagacagaaatagaatttgaagtagccttctctgtttaacaagctctcaggtgatgttgattcaaggaccatattttgaattgcaagatgctaaaggaaagaaatacctgagataccctggcccacctctgaactcaaagggtacaggcatctggatcacaaggattctgaacttagatgtctttgcctagaaagcctctcctgactcactggtggctggagctaacactatatatatatatatatatatatatttttccccccctaggaaatagactttgagaaccaacaaccacacttttctggggctcctaaggacaccctgtggttagtattgttaccatgacattgtcatcaaggccattttcccagttaggctctcagattcttgaggatggcagacttttcattttgtcctagagcttaccaaaacacttagcaccaatacacaatgaagcccactcaccagatgaataaataaatctagcactcctcttcaactgcccccgcaacccttcccagagggcctgaagaatctccactcatcatagcaaggaaatgggaaatggagagattgccctattcactgaaactcagttggtgcctcccggaaagtctgaagattactgacattaaaactgatggctgaataggtggaagattaaaaaaataataataataacaatgataataatcccttctatctgtagagtgcttcacagtttaaaaagtacttcacatagtaaattattacaactgatgctcacaacaaccttgtaaagtcaggtattattatttttcgctttacaagtaggaaaacagaggcccaacaaggttagtgattggcccagcctgcctggcccataattggtagatctgaggcttgaaacaggtcttccagctacaatgagctatgatcatgccactgcactccagcctggatgacagagcaagaccctgtctcaaaaacaaacaaacaaacaaaaaaacaaaaaccaaaaaaacaggctttccaagttcaaatctcatatactttccaaagcccacactgctttcagctctctttagtatagttcttgataataattatcatctccaaatacacattatcaacataataaaaggctggtggtcgagagaaaaaacaccggctgggcatggtggctcacacctataatcccagcactttaagaggccaaggagggcagatcacttgaggctaagagttcaagaccagcctggccaacatggcaaaaccctgtttctagtaaaaatacaataattagccagacatagtggtgcgtgcctgtaatcccagctactcaggaggctaaggcaggagaatcacttgaacccagaagcagaggttacagtgagccaagatcgcaccactgcactccagcctgggctgcagagcgagactttgtctcaaaaaaaaaaagaaaacaccaacttaaggttacaagttatcttcctttccccaggaagtcagtctctcagtagcttccatgcccctctgaacctctaaagacattaacatgtgaacaggaggaaggagcaacccaaagcttgtgggaactaaagcagactccagtggccatttcctctttggactgaagggacttaaatgtggttaactgaagagattttcaatgtgggctctccaatgtctccaagcgcaggaagtgcaggaagggagcccaccctgataaacttcctc

SEQ ID NO: 2753 - DNA, 4001 bp, Homo sapiens
tctctctctctctctctctttttttgagacagagtctcgctctgtcacccaggctggagtgcagtggcgcaaaatctactcaccatagtctccacttcccaggctcaagcgattctcctgcctcagcctcccaagtagctgggattacaggtgtgcaccactacacctggctaatttttgtatttttagtagagacggggtttcaccacgttggacaggctgttctcgaacccctgatcaagtgatctacccaccttggcctcccaaagtgctgggattacaggcatgagccactgcacctggccaatattctaagtaatgcttccaactgtgacattttagtgcaagtaacccacctcagtggtttaaggaaaggctaagacacctcatgtaatgtgtaatgaggttagtgcgatgtgttgacacttagacatttctaaacattaacaaaagcttttgtgagagaaataaaatagttattgaaccactgcctgtccaataaaaatgtccctaaccattttctataactataatgtgcatgaacataattaccctaataaacacatgaaagccaccataactgttaacagttgccatgtaatttaataaagttatgtcacacacgtgcactcacacattcacaatgaccctccggccccagtgttcttcaagcctttgcaccagtgcatgggaggagagcacgctctacaggttagacttctgatcaaatcctgcctctgatactactcactgtgggacctaggcaggtgtcttaacctctctgagccctgggatctgaatttttttttttttttttttttgaggcggagtctcgctctgtcgcccaggctggagtgcaatggcacgatctcggctcacagcaagctccgcctcccgggttcacgccattctccattctcctgcctcagcctcccgagtatctgggactacaggcgcctgccaccacgcctggctaaattttttttgtatttttagcagagacggggtttcaccgtgttaaccaggatggtatcgatttcctgacttcgtgttccgcccgtctcggcctcccaaagtgctgggattacaggcgtgagccactgctcctggtcgggatctgcattttaaaaatgaggataacggtatctgtctcctaaaggtttggggaggctgcaatgagaaaacttagggtaggtgcctggcaccaagcaggtgctgcttgggtatttcagagcctctgggctgtggcaggggccttgcagggttatcctgggtaacttcccatccaaagcaaaaatttcttcctcagcaaccctgtcaaatggcctctgcttgaatcattccaggacaggaacctagcacctcacaggccggcagttccatctcctgtagagtcgaactgttgggaagctaaaattttgagtagaatcctctcccttaattcttaatttatccctctggtgcccttgtgcctcccagcacccatcccccaagaaaggagacagcggctacagggctagaggagcccacacccgggagctggtccctcggccacctgcaagcggacgacagcctcgggccctccccagcgctccatttcttccccgtcggatgagggggaaagctcccgccagctgcccctcccccaggactgctggaacacggaatgcggggctgggggaagcgcctggggaactgcgaagccccaaattcacaccaaggagcctcaggctcgctctccagtcccttcctccacctgccctcagggtacacaggggcaagggccactgctcccgccgcgtctgagccgcaggggatgcagagggactgcgctctcgggatctggaccagaggctggaggccacctaccccgcgcggccctggctggctgacggcgatgggctcgggtctccggccggccggggcggggtgtcacccacctgctgcggcgccgcgcggctctgggggtccagctccgtgggcgctcctggctgctgcgccgcccgcgcctcgcctcccgccgccagcctcccccgggccgctccacgtggccgctccacgtcgccctcccggctggagccgccgccctggccgggcagagtccggagccagtgccagccgccgccccgcccgccggacctggcccttcgcagctccaccagcgcccccgctgcgcccgcggccggaggggctgcgcgcgcccgtgtgagtgtgcgcgtgtgtgcgtgcgtgagtgcgcatgtgcgcgtgtgcgagtccgcgtgtgctcgtgagtgcgctcgtgtgcttgtgcgggtgtgcacatgcgtgtgacattgtgagcgtgagtgtgagcatgtgtaaggatgcacgtgtgtgagcgtgcatgtgtgcgcggatgtgtgcgtgtgcctgtatgcacacatgtgagtacagagagaccaagagacagtgaggccagtgtgcatcagaagtatgtttaactgtgctcatgctttggttgccactttctctgcctgagggacccagatgtatgtgacaaaatggaacctaacttactgttagcatgtgcggttgtgactggcatgtgtggctctgtgtatgaggaatttgtgacacggtagggggtattttgtgtgactgtgcatccgtgtgatagtgtgggcttcaggggccgggcgtggtggctcacacctgtaatcccaccactttgggaggccaaggcgggtggatcacgaggtcaggagatggagaccatcctggttaacacagtgaaaccccgtctctactgaaaatacaaaaacattagccgggcatggtgacgggcgcctgtagtgtcagctactcgggaggctgaggcaggaggatggcatgaacctgggtggtggagcttgcagtgagccgagatcacgccactgcactccagcctgggtgacaaagcaagactgagactccgtctcaataaataaataaataaataaaaaataaatgatagtgtgggcttcagggtatggccaatgtgtgactgactgcccaggggtgtggcggtgcagagtgttagaggcatatgtattggggtgtcagggtgaactcttcctgagttgtttgtgacactccatcacagcgacactgtcatcacagcgacaagcccactctcatcctgtcctcctcccagtgatgaacactgcttgtcactgcctttttagatcacggattctgctggtttcggcaatacctctcctacctctggtcatttcaaaaaggtctccattttcttcaccgtcagagttcctcagggccctctcctcactttccatctgctcatgtgctcatctgctcacctagctcccatcactgttatgcattgactcgtgtccttcacaaagttatatgttgaagtcttaacctccaatacctcagactgtgaccttatttggaaatagggtcattgcagatgtaatccattaagatgaggtcatactggagtagggtgggcccctaatcaatatgactggtgttcatatcaaaagaggaaatgtggacacagacacacacataggaagaacattgctatggcctgaatatcccaccaaattcatgtgctgaaacttagtccccattgtggtgatattaagaggaggaagccaggcacagtggctcacacctgtaatcccagcactttgggaggccgaagtgtgaggatctcttgaggccaggagttttcgaccagtctgggcaacatagtgagaccgtgtctctacaataaataaataaataaaaattaggcatggtggtgcacgcctgtagtcccagctatttgggaggctgaggcaggcagatcccttgagtccaggaatttgaggttacagtgagctgtgatcctgccactgcactccaaccttggtgacagagcgacatcctgcctctgaaaaaaaccaaaaaggagtagggccttttgggacatgatgaaaccatgagggctctcccctcatgaagggattaatgaccttatgaaagaggtt

SEQ ID NO: 2754 - DNA, 4001 bp, Homo sapiens
ttctcgaacccctgatcaagtgatctacccaccttggcctcccaaagtgctgggattacaggcatgagccactgcacctggccaatattctaagtaatgcttccaactgtgacattttagtgcaagtaacccacctcagtggtttaaggaaaggctaagacacctcatgtaatgtgtaatgaggttagtgcgatgtgttgacacttagacatttctaaacattaacaaaagcttttgtgagagaaataaaatagttattgaaccactgcctgtccaataaaaatgtccctaaccattttctataactataatgtgcatgaacataattaccctaataaacacatgaaagccaccataactgttaacagttgccatgtaatttaataaagttatgtcacacacgtgcactcacacattcacaatgaccctccggccccagtgttcttcaagcctttgcaccagtgcatgggaggagagcacgctctacaggttagacttctgatcaaatcctgcctctgatactactcactgtgggacctaggcaggtgtcttaacctctctgagccctgggatctgaatttttttttttttttttttttgaggcggagtctcgctctgtcgcccaggctggagtgcaatggcacgatctcggctcacagcaagctccgcctcccgggttcacgccattctccattctcctgcctcagcctcccgagtatctgggactacaggcgcctgccaccacgcctggctaaattttttttgtatttttagcagagacggggtttcaccgtgttaaccaggatggtatcgatttcctgacttcgtgttccgcccgtctcggcctcccaaagtgctgggattacaggcgtgagccactgctcctggtcgggatctgcattttaaaaatgaggataacggtatctgtctcctaaaggtttggggaggctgcaatgagaaaacttagggtaggtgcctggcaccaagcaggtgctgcttgggtatttcagagcctctgggctgtggcaggggccttgcagggttatcctgggtaacttcccatccaaagcaaaaatttcttcctcagcaaccctgtcaaatggcctctgcttgaatcattccaggacaggaacctagcacctcacaggccggcagttccatctcctgtagagtcgaactgttgggaagctaaaattttgagtagaatcctctcccttaattcttaatttatccctctggtgcccttgtgcctcccagcacccatcccccaagaaaggagacagcggctacagggctagaggagcccacacccgggagctggtccctcggccacctgcaagcggacgacagcctcgggccctccccagcgctccatttcttccccgtcggatgagggggaaagctcccgccagctgcccctcccccaggactgctggaacacggaatgcggggctgggggaagcgcctggggaactgcgaagccccaaattcacaccaaggagcctcaggctcgctctccagtcccttcctccacctgccctcagggtacacaggggcaagggccactgctcccgccgcgtctgagccgcaggggatgcagagggactgcgctctcgggatctggaccagaggctggaggccacctaccccgcgcggccctggctggctgacggcgatgggctcgggtctccggccggccggggcggggtgtcacccacctgctgcggcgccgcgcggctctgggggtccagctccgtgggcgctcctggctgctgcgccgcccgcgcctcgcctcccgccgccagcctcccccgggccgctccacgtggccgctccacgtcgccctcccggctggagccgccgccctggccgggcagagtccggagccagtgccagccgccgccccgcccgccggacctggcccttcgcagctccaccagcgcccccgctgcgcccgcggccggaggggctgcgcgcgcccgtgtgagtgtgcgcgtgtgtgcgtgcgtgagtgcgcatgtgcgcgtgtgcgagtccgcgtgtgctcgtgagtgcgctcgtgtgcttgtgcgggtgtgcacatgcgtgtgacattgtgagcgtgagtgtgagcatgtgtaaggatgcacgtgtgtgagcgtgcatgtgtgcgcggatgtgtgcgtgtgcctgtatgcacacatgtgagtacagagagaccaagagacagtgaggccagtgtgcatcagaagtatgtttaactgtgctcatgctttggttgccactttctctgcctgagggacccagatgtatgtgacaaaatggaacctaacttactgttagcatgtgcggttgtgactggcatgtgtggctctgtgtatgaggaatttgtgacacggtagggggtattttgtgtgactgtgcatccgtgtgatagtgtgggcttcaggggccgggcgtggtggctcacacctgtaatcccaccactttgggaggccaaggcgggtggatcacgaggtcaggagatggagaccatcctggttaacacagtgaaaccccgtctctactgaaaatacaaaaacattagccgggcatggtgacgggcgcctgtagtgtcagctactcgggaggctgaggcaggaggatggcatgaacctgggtggtggagcttgcagtgagccgagatcacgccactgcactccagcctgggtgacaaagcaagactgagactccgtctcaataaataaataaataaataaaaaataaatgatagtgtgggcttcagggtatggccaatgtgtgactgactgcccaggggtgtggcggtgcagagtgttagaggcatatgtattggggtgtcagggtgaactcttcctgagttgtttgtgacactccatcacagcgacactgtcatcacagcgacaagcccactctcatcctgtcctcctcccagtgatgaacactgcttgtcactgcctttttagatcacggattctgctggtttcggcaatacctctcctacctctggtcatttcaaaaaggtctccattttcttcaccgtcagagttcctcagggccctctcctcactttccatctgctcatgtgctcatctgctcacctagctcccatcactgttatgcattgactcgtgtccttcacaaagttatatgttgaagtcttaacctccaatacctcagactgtgaccttatttggaaatagggtcattgcagatgtaatccattaagatgaggtcatactggagtagggtgggcccctaatcaatatgactggtgttcatatcaaaagaggaaatgtggacacagacacacacataggaagaacattgctatggcctgaatatcccaccaaattcatgtgctgaaacttagtccccattgtggtgatattaagaggaggaagccaggcacagtggctcacacctgtaatcccagcactttgggaggccgaagtgtgaggatctcttgaggccaggagttttcgaccagtctgggcaacatagtgagaccgtgtctctacaataaataaataaataaaaattaggcatggtggtgcacgcctgtagtcccagctatttgggaggctgaggcaggcagatcccttgagtccaggaatttgaggttacagtgagctgtgatcctgccactgcactccaaccttggtgacagagcgacatcctgcctctgaaaaaaaccaaaaaggagtagggccttttgggacatgatgaaaccatgagggctctcccctcatgaagggattaatgaccttatgaaagaggtttctgagagagttcacccctcttgctctcttgcctttctgtcccttccatcacatgaggaaacccagacgcaccatctctgaggaatggaccttcacagacaccgaacctgccagtgcctggatcttggacttcccagtctccagaactgtgaggaataaatttctgttgtttgtaaattactcagtctgtgggattttgttatagcagcacaaactcactaa

SEQ ID NO: 2755 - DNA, 4001 bp, Homo sapiens
tcagctcaccgcaacgtctgcctcccaagcgattctcctgcctcagcctccagagtagctgggactctactggcgtgcgccaccacgcccagctaattttgtatttttagtagacagggggtttctccatgttggtcaggctggtgttgaactcccgacctcaggtgatccacccgcctaggcctcctaaagtgctgggattataggcgggaaccaccacgcctggccagcccctttctccttttaaagaatcacggactgttgtgttgactaggcaatttctaatcatcagtctattctgacagcatacatatctcaatgtgttttgtaacacactgtacattttcgtcaagactagtaaagtatgttgttatagccacatacataaatatttaatacttggtcattataattggagcctgggctaaaggttttcttttcggaatggcaattttaaatattcatatcaaaactgacaactctcaaactcctggcctcaagcagtcctcctggctcaaacttccgaagtgttgggatcagaggcgtgagctaccgggcccagccaaaactgacaactcagaagccatttaatttagcttagttctttaatgtcttgaatattgttctagaacattcttggagatactttggccatgacatttctgttgatctgtaaatgtgcatttatcctaagccattgccccttttcaggtcactgtgtccaacatcccaataggccagtatagtctacttaaaagccaagttcttaactgaccaactctagttgagatagaatggtttctaattcaggttcttttcgtgattttaatcccatgtctctcttatgagcaggtgcaaactactttagcgccttgatcttttccactttccattgaccaatttccaaattattagttacctcaatcttagttttctttatggattagttgttttgtagccagtacaaagctgatttgcataagcagtgagctgctgctaattctctatacatatattgagattaatgtctttgtaggactgactgaaaagtgaatcaatgaacttacatttcatattataattatgagaaccatcaagaaagtaacattaaaataatgctggatatagtaatgagtttggtactatgttattcatataaccagaacttcatttaacttcactagtactgaaaaccaaagtgagttccttaataaccagcgaaaattttggaaactcattctgcaatcctgtgtgtcagaaaataaaacttttgaaagatgtaaagaaatcctagaagtaacatgcacgtttaatcgcaagctcatgaaagtcggctagaatgcagaaatgccaacaaatttaattgctaaaaagctgaatttgcaacttgatttactatttcaactctgtggtgacatgagcattcatcttcccgccaatgggactttttttcttttggcagaggttgcagagagatggagtccccatctccgcactcagcctggtgcgagctcgtgcgcctgtgcccgcgcttctcgccgtctctagagactaaccaccggcatcttaagcagcttcggaaggagtgcccgggctgggttagagatggcgggcaggtggcagggaaaatctacagaaatgttaccccaagccatgtgctttggccccatgaagcgctaaggtgtggttctctagggtgtgggtgctgtgtgtggagttggggagcaggggtcagggggcagtaagtgtggggagctgaccggcgcctcaccttgccggggaccccgcggtggtccgtgctgccctgccagaagcgcctgctgtagttggtgatgtatccgaccagcttgtcctgataggggaaatccaccttccagatcagggacccgtaaccaaaaacccacatcttctcgcggctcctctgccccagtggccgtgaaccctagctgtcgccgcgccgccggggactgaagcctccggtaagcgagtaaccggccgcgcggggcgcaggcgcgatggccacttggggcgcaaagcgcactgggagtttagatccagaaagattttccgagcggatctcagtcagctttattttatttccttgattagggtgtcaagaggcattgaccttcggtgtagtaagcaatggattcttttgcagcatccgtaaatcaccctaacctacctttagtgcccgtgtgcagaaaactacaatacccacaatgctttttggagctatttggctctgaaattggaactgggcttatttctaacggggccgaggaaggagaaaagagcaggagtcgtcactcgtgtccagatacggaggcggtgtaccagcaccgcaggtagcaaagcacctagaaacacgttttgttctgctttggaaattagatttttgcctatataacagcagccagaggaatgtaattcatatttgattttatgtcctgaaaaaaaagtcttttgcctttcaaataaaagcagaaagtttacaatagaagtttacgcttgtgaaagagtagctgtcatttcaatgggaattgtttatatatttaaattttacacaaatttattcatctttagtattatcattggcttgttcacaaaagagcaggcaaatgttcttaacttggggcccctgtaaaggctttggaaacgagctggggaacctgaatttgtatacaaaatttggggtgtacacttttctagggggaaactacagctttcatgagtttctccaaggggtcaaggatcctaaaattttttgaagatctgctcattagagctcttgctgcaaaatattgtttaggaaattcgcttggactatcatggctgtgtctctgtgtgtgaaaacagaaaccttaccaagtgattgttctttcttgaagatttttataccatgatcttgaatgctaaaacactcagattcaaggggtattatttgttttcttataaagaaatcagcaggaagctgctaccagacaaacaaacaaaaaaaaaagcaagtcttttcctattttctctaagttgtggtttcaaattgcctgatatggttgctaacccttcttttttgaaaaattttgaatacacagaaaactcagataaaaagagtgtaatgaccaatacctttcatctagatccagtaattaccattttgcacagttgctgtacttcctttttactttatttatacttttaaatggagaacatttgaagttgcttgtgttatgacattttactgccacatactctacatgtgtctcataagaataaggacattcatcctagaacaagttccctaaaaaaaaagaataagggcattctcctaataactgtgatgccattatcacatctgagaaaattaacaatagttatgtaatcaaataagtattccatatccaaactgcttcatagagtcactaacaagaaattgtgtcttcgagagagtcacatgagagctatactggactctgactggaggggaacttgaagtgagcattggagggaggtgatgatgtgggcaagaactctgttaagaactttctgggctatgtaggaaaaccgggctcatctcttcatggtgttctctgttggtttcagtatgctcagtcagtgggtctatttggtcaagcatagagaatctgagtgtttaacctcttctggaaaggacaagcaggtgcaggaagactagaatgacacctatctttcactgcttttctggcctctttgggtttagttgtttcctatagagggctgtatattgaggctgagcattgctggtagttgaatggccatctctgcataatgtagtgtacactggggattaagcagaggtgctcttatcaatggagcaccaaagagggtgctcttatcaatggagcaccaaagaatgcgttgtggtggggtatgaacaggagcagaagcctactcctcaaacatttccagaggaggaaagatagaacacttaaaagtcccttcatgtttttagtgggaacctt

SEQ ID NO: 2756 - DNA, 4001 bp, Homo sapiens
ctgaggatgactccaaagtctttaccctgaacaaccagaaggatgaaggggatgttatggagaaaagagatgaactgaggtgagcccctcttacctccacagttgcaggtgagcgtggcggctgcacctgctcagcgcactgcaggaagcggcgcatatgctctgcacagttgcccacagctgcctcgttctgtcgaagacactcctcgaaggcctcaaaaggctgagcacaggcctggcggatctggcggatgattgggctgtgggggtagggcagttcagcccctgggagattcccaccccactgcccaccccccacactgtctcatacttgcccgcactcactgggaggatgtgcactgggcaatgctcatcttaaggtagtgacagtcccgctgccaggattccggcttggccgccacacactggccatactgctccagctcccggccacagtagcgagcggtgacctctagggccgcctgcctgtgggacaggatgggctgaggatcattccaggcagtaggcaagcaagggaattcttttttttttttttattttttagagacagggtctcactgtggcccaggctggagtgcagtggcacgatcatagctcactgtagccaccaactcctggattcaagtgatcttcctgccccaacctcctaagtagctgggaccacaggcatgagccaccatgcccagctaattttttatgttttgtagagacagggtcttgctatgttgccgaggctggtattgaacccctgggctcaagcgatccccctgcttagacctcccaaagtgctaggattacaggcataagctatggtgctccgcaaagaaagggagttctggtctgggtctgaagtaggactaggagttcagggcagatgtgggaatctgaaggatcctgagatggtgccaaagaagtggagaggtgaggcccagccctggggcttgtaaagcaggaggggagcttctggggagagagtggaggttctaaaacaaagtctgattaatgtaaggtaggccttcagggtcctagaagacaggccttgaaatccaggcatcccccagtaggcctggggatcatgcacagaagacttggggccttagaagaaagatctagaattccagggagagcttgagagcccttaatgggtttgggggttctaaaagtgaggtttagagctccaagaggtggggtctcaggtcctggggaagagtgtcttagccaaagagtcttcaagatgaaacctaaggccctggtgcgggactcaaggtcccaggggcgtgaagtctggaagccctggatgaggttggtgctctgggaatcctgggcaaggtcagagtggtctaggaacaagtctgtggaccctataggtgaggactggggtcccaggcagatctggaaggttcaaaaggtaaagtttggtgatcaagggggaggaacctggagctctgaggatgggtgtaggagtcatagaggtccctaaataagtctgtagtcttaggatttcagtgtgaaggccggacctggggtactgggggcagagattgggtgaagagtgactggaccgaagtcctaagcagcgcgagagggggcgaggcctaaacgcttagagggcggggcttgggcatgcggagggttggagctcgtgagcgaaggcgctgaatcctgagggtcagatctccaagaaggagggaggctggtcctagttcccgaggtcctagactaggtctagatcactgggtaaaagaaggggagcggcagcacgtatggggtaggcgctctcactactcacatctcgagacctttgccggcgtagggctgtccggggggaacgacccgccttttccggtatcggttgtcatggcggcgcccagcccagcctggttttttccggtagccaattgaactaacaaccccgttccctttaggactaatctgtcacggcggcgccctacctcttcttccggcccggctcgtcatggcggcgccctgagtagccacttccgccctcttctggctaaattgcttcatccctatttccggcttgccatggcagcgctcggggtttaacggaagtaagcaatggaaagtatggtggtgcctcgggtccaaagagaatgcgccgctgagttgcgcggcacctgacgggattgagcctcagacacaagcgctccaaatctccgactgtagctggtgggaagcgcctgctgttgctgcagcgtctcaacatgttgttcccattttcgttgggtgctgtagcggtaggctgttgggctcagggatagggggcctgattcctaacgccgcgctgccaccatcggccttgcgcagacgctgataatccccctggcacccaggttcatgcgagcgcttggaacaggagggaagagggagtcaaaccaagagccgaactaattcggcttgggcctgccatttacccagcctgggacccagacgtttccccatcccttagcgtacgccaggacagacatggcgtttaatcctgactccatgagactatcaagctagttacttcctctctttgtaattaattcctcctaatgtagcaacatttcccccttccttctcatctgtcttaaaagtgtgaggttagacctgggcgtgagtttccccacataagagactggatatcccctggtcagagaactgagcatcagtcctgccgtttcgtttgcagatctttcaagactctagtcaaaatgagcagaacattttgcagttaatcatagagttgaagatgaacgagaagatgaacgagagctacttgattgtgaactagtaacgaccacttggagtcgcagtgtgtctgtaaaatgatgatgacagtgacatcatagaggacatagtgcaagtgaacagtttgatactgagcttggagcctcagtagttctggataagtgagagctgtacgggaggttgtaaccatgagctaccctggttggcagttgacatccgaggaccagcactggtcatcgcacagaaagaaaactttacaccttgagatccctccattcttcttaaacttccaagtgtatgtttgatgggagaagaggggaagggatcaacatttaaaggctctggaaggagtcagataactgtttttggcttcaaatgtagaatgaatccctagattttcctctactgagagaatgaaatcttaacccattccgttcccttgttggtactcagaaacggataccccaaagatgcattttgacatgctgaaaggccttagaagctgccttagaagatctgtctaaccttgtcttgttggtgtgtggaagtgggaatgcccacaggtgcacagggagggagtttctgaaattatctgaccgagaaagcaaaaaaaaaaaatcaattgtcttaaacccggtttctagggatctcattaaagaactaggaaaaattaaccacctgttaacagaaaaaccaaactgaaatgttttaaagagatttattttgagccaatatgagtgaccatggcctggggaacacaggctcaagaggtcctgagaaagtgtgcctgagacagtagaattacagtttggttttgtacattttaggtggacaggagttacagacaaagacataaatcagtacatggaaggtacagattgtgttcagctgggtgcagtggctcacgcctgtaatcccagcactttgggaggtcgaggtgggcgaatcgcttgaggtcaggagttcgagaccagcctggctaacatggtgaaaccgtgtctctacaaaaaatacaaaaaattagccagggatggtggcaggcacctgtagtcctggagctactcaggaggttgaggcacgagaattgctgcggaggttgtagtgagccgagaccacaccactgcactccagcctgggtgacagagcatgactctgtctcaaaaaaaaaaaaaaaattctacggtatttttataatacattttgtagtaccacttataaccacttgg

SEQ ID NO: 2757 - DNA, 4001 bp, Homo sapiens
cagattttgaattctgacaagatccctaatgattagtgtgcacactaatgcttgagaagcactgctctacaatacccagacttgtccataatggggggaaaaacaactaaaattttttattcaataaatgatcttacctgttcggctctggcaagcatagttttaaaaaccaatctcatgcatcaaccctgccattttccagtgtcaatcagctttctcaggtagattaccctactgaagagtgtaccaatatcgtgttcttagcaatttatcatttaaaaacaatctaagtgtacaatatactagagtagtatagtagtacatatactagagactagtttaaacaataaagcaaccatttccccagcatcttttttgcttctccataatcttatctcaatttacgaatggcaatgccaaggccaaacactgaagacaacaaataatctctccctaccacacttctacaataacaagaatcttagaatatacagatgtcacaaaatgtgcatctatataatgttctatagtttccaaagtgatgttataccgttatttcatttaagcgccacaatttttattttaccaaggagcaaaactgagtaagtttcctgacgaaaataatgagtgtctactgttctagggcctttaacaacaacaacaacaaatttacattaacgcacattatgtgccaggaattgcaagatgcataagattagtttttaaaatgtgcctgctagagctgaacaggtaagatcatttattaaaggatttcaggattttttttttccattatggacaagcctaggtgttgcagagcagtgcttctcaaagcactgatgtgcacactaatcattagggagcttgtcagaattcaaaatctgactcagtgggtctggagtggtgtccgagatttaacaagctcccaggtgatgttgatgctgctggttggcatttgagtagcaaagctgtgccgtatttaaagaattagccctaactaccaatatgaaaactttacatccctgaatcttcaattactctgaggtgacactactattattctggcttcacagtcgagaaggcactgagaagtgaactttccagagatcacagagctgagatgtgggaaggcaggattcaaacttaggttgactgactgcagggcattttcaactgtttgcctcccaatattatctcaattaataggtaacgagagttcgaagccgggtccagagctatcttctgtaacattcttctgggtcgagtccctgccccgctacggtatgtgcctagggtcaacacaagggctggggaaagaggaaactgagcctctttttcaacacaacagggaggacggagaacagacggctcctccggcagacgcgacccggcccgctccaaacaacgcttcgggcaggagaaggttctccgggtggtccgcagccgggctggaggggtggggcctacgctgggaaaaggttccgggcgggtcgtaccaacgcgcgcagggggaagaggtttccgaggccaggacggtgtcgctgcctacgcgctcagtggcgaggtggagaaactcttcatccaccctcggctacctgttcgagagccatggcaccaggagctctcgcgtcccacagccgactcctaaagactcttcctccggcccccctgtcgagtgggagtccccggaaatgggggccgggcggtatcgggcaggcggtggggagaagagtgtcctgtcatttaccaacttcactacgccccacacagatccacccgcttatctgccgccgccgtagcccttaccagttctttgggcggcttctcctgggtctttccaaacagccccatgacgaactgaacccgtcttgccccttccggctttcagttccccgcgcccaggcaggtcacgggcagccgcctgggcggggcccgcggaaaaggaggtagtcccaacccccagagtagggagcggcggcactaggggatgttgcgcatgcgccatacgcctgcgcagaatcgagtgagtgggagactagtcaaaaaggctgacgtcatcgcacatgttctggtcatgtctgtgtgggggagaccacggattcggtgcttttcgtaaggtgtagaaatgattgctctgaaagatacgaatttgttggctacaactgcttctaatacttcacctaaacctagatgttgcaccagaagtctggatctccacgcagacgtgtacacttagcatcactttcccgacagcttcatctttgtgtccagtaggcaactcacaggtgacaaaccaaaaataacctctttttcctcccgccaacccactcctcccctctgcttgcaccaccatcacctggtcactaaaccctaggcatcgtcctctctcccctcttaccaagtcccaaccattctaacttcaatatgtctgaacttcaaccctcccctttccatcccaactgcggtcgttttttttcaggccatcgccctttccagcgtgggcgattcctgcctagcatttgtccatgtgtgtcccgtcctacacgccacactgaccgtgagcttaatcacactctcaaaggaatctgactaaagagaactagacacattttagcacggacagttcctgattaggcctatacggtgagctgatggttactgtcattaactcatccgaggatggtgaaggggaccatttgttacctcagccccatactcctgtctctggtggaatcataaaatggttcggcagctttgaaaacattttgacaatttcttaaaatgctaaacaaagccagccttccattcctagctatttacccaagagggaaaaaagcatatgttcttacaaagacttgtacacaaatgttcatagcagctctatttgtaatagccataaactggaaacaatccaaatgtctatcaacaagtgaatggataaaccagtcgtgattgatccatacgaaggaatagtactgagcaataaaaaagtaaactattgataaatgcaacagcatggatgaatctcaaaataattctgccaagtgaaagaagccagaaccgtatgattccatttacataacattctggaaaatgcaaactaatacatagtgacagagagtacatgggcggttgctagcggataggagtggggtcagaaagaggcagaaaagagggattacaaagagacacgaagtttagggggatgatggataatatcttgattgtgatgatggtttcacagatgtatacaatatcaaaacttaccaggttggacactaagtatgtgcgatttattttatgtccaatcatacttcaataaagttgtttttaaaaaagcactgcctgttcattgtgaaaagttaaaccctcattctcacttcctcaggggaaaaggtctcaaaggattcacaccaactattaaatatagtgtgaatcttctgaaaccttttcctttggaaaatatacttttatttttatttatgtatttgtttttgagaccgggtatcactttgtcacccaggctggagtgcagtggcaggatcttgcctcactgcagcctctacctcccagattcaagtgatcctcccaccttagcctcctgagtagctgggtgtcagccaccacgcccactgtgtttttaatttttctgtagagacaagggttagccatgttgcccaggcgggtctcaaactcctgggctcaagcgatcctcccacctcagcctctcaaagtgttgggattacaggtgttagccaccttgcccgggcctatttttacttagttgagattatattatatacattgagccacctctcccagccctatttttatttaattgatattatgttatatacgttgtcctacaatttccttttaaacacattttatgtagactttcatcagtgtcaatacctatggcagtccatagcaagaatgtaccataatttatttaaccatttccctattatataagattgtttctagtttttccctagtaa

SEQ ID NO: 2758 - DNA, 4001 bp, Homo sapiens
atcttcaccacagtggttaaagatttagaatttagaaatccttttaaaagagcatttttcaccccaatttatcttttttattcgtcaggaatgcgagtatttgaaaagttgacttgtaaaccttacttctgaaaccacaccttgaaaatgccaaatatctctttaggaaagaaaatgtttgtaccaaaaaggtccacatttaaggaaaatgctgctattaaataatgcttagatacaaggtactgagaaacagcgagaattttattatttttcagaaaaagaagacacttttttaaagtacctatggaggatcatcaccaagtaagaaatggcacttctagtaatgcacttgggcacagtaaacacagtcccagactgaagcctggtgaagtgaattctaggctcagttttgccacaaaagagccatgtgactttgggaaacaacctctctgggtctaagtttaatttataaaataagatagttaaataaaagtaacactttgattctagcagcttaattcactgggaagtatttacctcaaaaagcatttgaggtatgtaacacctctaacgtgtttgatcaaatgacataattaaaactgaactggaaacttgatattgtgaataacttacttaggctgttctcgtagctatcaattacatatcattgtactttgcttcttcaaaaaagctgaatactttgaacgtctaatgttcacatattgagttttcttaaagtcaggtacgtatgtaccatagtcgttttgtaaaaggaaagaatgtatcttttcagtcctttttcccaacccattgtcattgcagactgagaaaaaaacagcttgaagtcttaaccaccaaaagcaacagtgctgcagtaattacaccacaaaaataacatttcattcttaatgaatactcagtctcctgagattacagttatcttctggtaaccaactttattctgtctgctctcattcgttagtgcaaacattttcaattttaacccatattcagttcacaaatcatacttatttccaacggaatatactgagtccaaaaaaaaaattccccaatagtccaacaggaagcaacacatgcatttggcaattccaaggaggctggggactcacagatacctcgttcaaaataaataaactttccaaggatttatttaccgacgggaaaggcaggtttgaaaacaaccagttaacttcactcccaagttggcatcttagagaatctttgtgcgtttgcaaaacacccaggacctctgagcctcccagccgagaattggccaggggagcacacgcccatcggccctgccgggagaggaaacaatgggagaggcgcgagggagcaagccggcgccccgggcgccccaactctgcggccccggcccgccccgaccccacgcgccgcgccccctccccgggcgcccaggccccccaggcccccgcccccgagccccgggacgcggcccacctgcggcggcgcggggagacggctgcacttaccaaacagggtcagggccattgtaaaggcgctcgccgccgcccgcgagtccaggcgctcctcccaggcgggctagggatcacctcatcagcccgccgcacccacacctcggagagagtggggtgcccgatggggcgtgctgggggcgccggcgcccggggaggctgcaggccgggacgcgggggaccgctgcaagaaaaagttattcacgcgttattgtcgggcgcaccgggcccagggagccccgctagctctccgcgagccggcacttgtcgctgccatcaggcgcggagcgtgcgcgcgggaggaggtacctgcgaggcaggaggcttggccgcggcgcagtggctggcggagaggcggcgccgcactggcggcggcggcggcggcgacggggagagcagcagcagcctcgcacagcccccggcggggcgcgctcactccgcatcccgcggcctcgcagacgccatcttgcgatagcgtctcccacgagctcggccgcgccgctgcctcccgcctctccctcgggcttcccggtcgagtgcgttcccatggcaacgggcgcgcgcgggggtaagagggtgcgccctcattcccgcggctgcgaggagccaccagcgcccccctggaggcggccgcccggagcgggatggagcggggccggtgtgcgttttagctgaaagcccaggttttttcttgaatggaatttgaggaggcgcagagaggagaaaaacgctgttactcgaaagaggaagagtcacaggaggatgctgagtgaacgcagcgcccaggcagggtcatctggggacctggtgcgtgtgagaacatatttcttctcctggcgccctccaggctcactgtggctggagccggtgacctgaagctgcagggctctggtaggaacagaggcactgaaagctgcattcctctccgtttggacttaggagctgctagtagttctgatgaaattgacacacattaggaaaaggagtcgcttaaaaagcatctgagattacctaagataatttgttaaaagaccaatgcttacacctgattttcttccctttacattatacctctttgatattgtctcaaggaaaaaaaaatcagcatgtgtcactgactggcacttatttgccacaaaagattgttcccctgagcttcttgtatttatctgataatcactggcaacgtcctcctttctgtgatgttgtctcctcacctctgtctctgccatgaggagccatacaacgccttgagattgtcagccaaaagatgttcttgaaaagctgggttatatgtttttcgtcgttgtcgtttaatgtattcaaaaagtcattcttctctagttgctatatgtgttccctgtttaagaaattccttcttttttcttgtttctctgcttagggatttgatactattttggtatctgatcatgtagatcttctctttggttctcctttctttctacaggcgtctttcctcttagttcctcaggttccctagtgtcttctctcccattttcaaataattctttaagaatattatagaaatatcttgtatttaatgtatcttagagatcgaatcctgataaagtgggagattactacagtacttccaatggaaccacagttaattcaccatcattatttcaaagcagacttaagcatcagaagaaaagcaggttggaaggaggagccaagccttttgtttcaagtcagttaactcaggaagaaagaaatattaaaatgattcaacatgaatgggcaagtgtttaagatgctatatgtttggaattttgtgatgtaaaatggctctctttagccactaatcaaaatacatctttaaaatccccagaatttaaaatctttcatgaaaatggactcttgattttgaacaacctttctgctcataaaaaattacaaacacacagctcatgaaaataaatgagaaactcaagaaagctttgtgggatagattttataaccatataaagattgctgctaatctgctctgcagccaaataaatcagaaaccgaagactccatttactgtttcaactagtggtcttcaacatttttggaccaaatttccttttgaggctctaatgaaaatactgtccctcctcttagaaaagtgcttgcatacatacacacattcaccggaaatttttcacataatttcaaggggattatgggctattcagggaccttaggtgagcccctggaagtgttttttgtaatctcagaaagtttttgcctttataatttaaaggaaaatattttccttcagaatagaaccattgaattttgaataggaaaagaccaaaactcccatgatttataggtaaaaaaattgagttccccgtaaaaagattttcccaaatgtgttcacctatttagtagcagaaccaatgggaaaatcttagatttctggtgttctcaccgaccaccttccctacccacatcccgcatcaatttagaggttgc

SEQ ID NO: 2759 - DNA, 4001 bp, Homo sapiens
aagaagaaaacgttatttagtttattttaaaatattagcaatttttacatagcccacatatttaagaaacataattttattaggtaatttctccttcatcccaaaatgatctgaagatcacaaaaacctattcctcactatggaaaatgcagagcatatgggtgggggggggggtgttggtatttagtgtttgagtaaaataaatactggtgttaaaaatcagaataaattgcaaatgtggaatgaaattatctatttcagagcctggtgcattataggtgctgaataaatgttgaataaataaataaatgaaagatcatgatttccagctttatcacattttgaaaccaaattattccctttctaaaataaaacctaatgatactttgtctaaactaagaacattcatgtctcaagaaccgcatcacaaagttgtctaactattgggaagttactatagaaatgccagtgcatctacctattaaatgtaactgggtctacttatgcaccacctcacgttgtttaatctctgaattagattgcaaaggacagaaattcaaggccttatatcatgctataaatacagactagatctacatacagcttgaatcaacacacatatcaccttgaaagaaaattcaagtacagttgataaaccacattaacacaataattaaaaactacacatacgcatacatggtgaaagcaaatactcaaaaagtgaggagaagctgctagtgtcagcagcatcaacagtcccatggtagccatcctcctttcatcatggtcaattcattaacaggggagaaaagacagaaactatgagaaatgcaaaccatctgctcaatccagatgcaacagcacatgcctcttatatccaaagctttttaccagaaacacagatctaatcctctcataaaatctccaacagaggtattcagacacatttgtatcacaaataaaaacaatgccaaaatcatcattaactgagaccttttaaatatcagtcaagacttttaccagtgagtacacattgataaaacaatattagaacagcattagagaaaaacagggttggatttctattagccttattcagctattcctcaagtaaaatcaggctgaaaacatctcactccttaaatagcaagaacattttagtcaagtcatcctagttttaaaaagacataagatattcctttaatattatatatttcaagtaatatgcatttcttaaaagactaaaagcaaatattcttaccttgaaattgtgaatcttttcatattttggaatttgctcgttttctttcagagttgctcttctaacaagtgatgtcaactgcgaataagcaaagagtttcagaggttgccagattgtcacagacgactttggagaacccagtttcattcccaaggctgctatcaataaatcttgctgacggccctcttgttttgatttgtgaactgcagccctattagttttcctccctgaccaagactctttggatggcattttggaattcacaaggaaagaaaacctatagtggtctatgtctgtcgatgatatctattcagctaacacatgagcattctgccaggcagcacagaaccctaacctacagagagctgcagagaaacaccacggagaggtggaggaggaggatgaagcacttcttaaacagaggtcgactaaccagcaaattcttctttcttcctttttttttcttaaagggatctatattctagcttctaaaaacttgagtctgaacagaaataaaaagaaagagtcgatgctaacatacaaaacactcagcatctctctttatcattttttaaaaggcatgcaattttgacaaatgatacatttctaaaagctttcttctctattcaagatattaatgtccattctgaatgaaagatgcctacatactgcctgcaatcagtttctagcaacagacaccctatgaagcccctagcagggaaggtggggggaagggagggatttcacaaggaaggctgcattagattggccaccgtaagaaaggagataaccaatgaaaatcaagcaacagtatttaagtactgtattcctaaactcactctgtctctgtttctccctcctctcatgtaagtaagtttcttgctggctcaaggcaaaaaaaaaaaaaaaaaaaaaaaaaaaatcagtgggaaggtaatgagaaatgaatgagtcatgcattattgcaaaatggaatttttttaacctattaaaagcagaggaaaattaacatacatacagcactaggttttaaaaataatgcagcaccactgccaggtaaattatgaaaggctaatctgtatcctttgctcattatggactgaggttagctaaccaaaacccaattttattaaagacaaggaaaaactggtgagtattttgatgaaagataaaagaagtttaactaggtatcatactattttcatgcagaacaaggagcatgcacatcacattgctaacagcttgcagtggtcagttttgtctttgtattatgagtagttttgttgtgggctacacttacatagaagaaaccattattttaattctctagtctcaacattttttttattcagagagcttgaggccaggtcatagtggaagccagttgggaataattccttatttgcacagatctcaattatagtgtaactacttataggacccatatactttttgtttgctggtgtagaaacggggtggctaggtgagagacttagcacaacttgacttaggagcaatacctacattttttcactaaggtgctacaggatgcttacatttcccattttggttccctaagtacgtcctatcatctgtttctcatgctataataattaagttaaaccaattatgccaatgttacactgtatttaaagcatctaaaattctatgtatttaaatggattcagtatatttgtagtgtaaatactttaatctcagatttcataatctacaggaggtatgtgcccagtgcatattctactttaattagggcatgaagtggttcttaagctatgctagacattaaaaataacaaatgactgattttctaaacatccctaaattatttttgtttacttcagtctttagtcccttttatttttctaaaattatgtctaagtaaataaaaggcaaaatttatttacataggagtttcaatttcatgagtttatatacttagataattaatatgagacataaaatgctcccactgcaagaagaaatgcaatggaaaaagtctccttgcctagcctaaattgcttttcagattggacctattttgtcacatgatgactaaaaatataacggccaaccgactctttagacatgtacagcctaaagtgaagtttaaccaattctcagtaggaaccagaaaaaaacagctccaaacacaagttgaacagtaaaattttttcttcaacaatatttgatatcaagttactaagttaaaacaatcacacatgtaaccaaagtagcatctttttcttgagtatttttgatcaacatcctattttatagatcattcctggttctacagctatagttactaaaattcaagcataaaaatattcatgatagttacccagaaaatttatagctaggtaaaagtaaacattttgtcattcagaggtaaggtctactgtagactctgcagattgtactgtatttcctgagtaatgttctatttagtcaagaaattctggattaactgcaatctgagcagctacctagggcagtaaggagatagaaaacaacagcttaggatgaaaacagcgttggctactctcaaatggctaagggtttggtcactattatgccttcaacatggcagtaactgcacttctgcattaattttggtgaagaacttgtaaataacaaaaattgataactctaaaattcagaaccaatataatcaatagtctgacattctagacaaatgtgtatcactcatgcttacaat

SEQ ID NO: 2760 - DNA, 4001 bp, Homo sapiens
ggaagtgaattctattttcccataagtagactttaaaattttaaagatacattattcattttgaaggctgggagtgatttcttatactttcttctataggccacattccatgcttttcccttcctcatcttcaccacagtggttaaagatttagaatttagaaatccttttaaaagagcatttttcaccccaatttatcttttttattcgtcaggaatgcgagtatttgaaaagttgacttgtaaaccttacttctgaaaccacaccttgaaaatgccaaatatctctttaggaaagaaaatgtttgtaccaaaaaggtccacatttaaggaaaatgctgctattaaataatgcttagatacaaggtactgagaaacagcgagaattttattatttttcagaaaaagaagacacttttttaaagtacctatggaggatcatcaccaagtaagaaatggcacttctagtaatgcacttgggcacagtaaacacagtcccagactgaagcctggtgaagtgaattctaggctcagttttgccacaaaagagccatgtgactttgggaaacaacctctctgggtctaagtttaatttataaaataagatagttaaataaaagtaacactttgattctagcagcttaattcactgggaagtatttacctcaaaaagcatttgaggtatgtaacacctctaacgtgtttgatcaaatgacataattaaaactgaactggaaacttgatattgtgaataacttacttaggctgttctcgtagctatcaattacatatcattgtactttgcttcttcaaaaaagctgaatactttgaacgtctaatgttcacatattgagttttcttaaagtcaggtacgtatgtaccatagtcgttttgtaaaaggaaagaatgtatcttttcagtcctttttcccaacccattgtcattgcagactgagaaaaaaacagcttgaagtcttaaccaccaaaagcaacagtgctgcagtaattacaccacaaaaataacatttcattcttaatgaatactcagtctcctgagattacagttatcttctggtaaccaactttattctgtctgctctcattcgttagtgcaaacattttcaattttaacccatattcagttcacaaatcatacttatttccaacggaatatactgagtccaaaaaaaaaattccccaatagtccaacaggaagcaacacatgcatttggcaattccaaggaggctggggactcacagatacctcgttcaaaataaataaactttccaaggatttatttaccgacgggaaaggcaggtttgaaaacaaccagttaacttcactcccaagttggcatcttagagaatctttgtgcgtttgcaaaacacccaggacctctgagcctcccagccgagaattggccaggggagcacacgcccatcggccctgccgggagaggaaacaatgggagaggcgcgagggagcaagccggcgccccgggcgccccaactctgcggccccggcccgccccgaccccacgcgccgcgccccctccccgggcgcccaggccccccaggcccccgcccccgagccccgggacgcggcccacctgcggcggcgcggggagacggctgcacttaccaaacagggtcagggccattgtaaaggcgctcgccgccgcccgcgagtccaggcgctcctcccaggcgggctagggatcacctcatcagcccgccgcacccacacctcggagagagtggggtgcccgatggggcgtgctgggggcgccggcgcccggggaggctgcaggccgggacgcgggggaccgctgcaagaaaaagttattcacgcgttattgtcgggcgcaccgggcccagggagccccgctagctctccgcgagccggcacttgtcgctgccatcaggcgcggagcgtgcgcgcgggaggaggtacctgcgaggcaggaggcttggccgcggcgcagtggctggcggagaggcggcgccgcactggcggcggcggcggcggcgacggggagagcagcagcagcctcgcacagcccccggcggggcgcgctcactccgcatcccgcggcctcgcagacgccatcttgcgatagcgtctcccacgagctcggccgcgccgctgcctcccgcctctccctcgggcttcccggtcgagtgcgttcccatggcaacgggcgcgcgcgggggtaagagggtgcgccctcattcccgcggctgcgaggagccaccagcgcccccctggaggcggccgcccggagcgggatggagcggggccggtgtgcgttttagctgaaagcccaggttttttcttgaatggaatttgaggaggcgcagagaggagaaaaacgctgttactcgaaagaggaagagtcacaggaggatgctgagtgaacgcagcgcccaggcagggtcatctggggacctggtgcgtgtgagaacatatttcttctcctggcgccctccaggctcactgtggctggagccggtgacctgaagctgcagggctctggtaggaacagaggcactgaaagctgcattcctctccgtttggacttaggagctgctagtagttctgatgaaattgacacacattaggaaaaggagtcgcttaaaaagcatctgagattacctaagataatttgttaaaagaccaatgcttacacctgattttcttccctttacattatacctctttgatattgtctcaaggaaaaaaaaatcagcatgtgtcactgactggcacttatttgccacaaaagattgttcccctgagcttcttgtatttatctgataatcactggcaacgtcctcctttctgtgatgttgtctcctcacctctgtctctgccatgaggagccatacaacgccttgagattgtcagccaaaagatgttcttgaaaagctgggttatatgtttttcgtcgttgtcgtttaatgtattcaaaaagtcattcttctctagttgctatatgtgttccctgtttaagaaattccttcttttttcttgtttctctgcttagggatttgatactattttggtatctgatcatgtagatcttctctttggttctcctttctttctacaggcgtctttcctcttagttcctcaggttccctagtgtcttctctcccattttcaaataattctttaagaatattatagaaatatcttgtatttaatgtatcttagagatcgaatcctgataaagtgggagattactacagtacttccaatggaaccacagttaattcaccatcattatttcaaagcagacttaagcatcagaagaaaagcaggttggaaggaggagccaagccttttgtttcaagtcagttaactcaggaagaaagaaatattaaaatgattcaacatgaatgggcaagtgtttaagatgctatatgtttggaattttgtgatgtaaaatggctctctttagccactaatcaaaatacatctttaaaatccccagaatttaaaatctttcatgaaaatggactcttgattttgaacaacctttctgctcataaaaaattacaaacacacagctcatgaaaataaatgagaaactcaagaaagctttgtgggatagattttataaccatataaagattgctgctaatctgctctgcagccaaataaatcagaaaccgaagactccatttactgtttcaactagtggtcttcaacatttttggaccaaatttccttttgaggctctaatgaaaatactgtccctcctcttagaaaagtgcttgcatacatacacacattcaccggaaatttttcacataatttcaaggggattatgggctattcagggaccttaggtgagcccctggaagtgttttttgtaatctcagaaagtttttgcctttataatttaaaggaaaatattttccttcagaatagaaccattgaattttgaataggaaaagaccaaaactcccatgatttataggtaaaaaaattgagttc

SEQ ID NO: 2761 - DNA, 4001 bp, Homo sapiens
tcagctccagatggctatagtgcaccccctggggagaggaagggaagggatctgtgatgagctggcattgtcttccgttgtctcatagtaagtgtctcatctcctcagcctatgacctgttgtggacttgcagtctgagggtttaagtctaccttgaccagttgtgagtctgtgtgaccttcagcatgcctccgctagctcatctgcgaaatgggcatgcgtcctgtctcagagctgtccaagggctaaaataataactaacatcaaatgcctattatgtacaaggctccctgattttttctaatccttgtaacaaccccgagcaataattatttccattggcacaaaggaagatactgaagcccaggatatttagtaatttactgggggtcacagagatagaaaataaatgtccgaattggcatggaaaagcagacctgtatctccaacatccctttgcctctcagagggatttgaacatgacaaggaggtatcagtgggatagcttatcatcccacctcgtggtcaccagtgcagcccaccccggtggcatcgagaatgcagcgacccagccactcgtcagggcgcgcactgacgatgtcgttgcggcagccttccaggtgggggcgcagttgttgcagcagcatgcgcgacagcagcaccccaaagcctccgtggcagtagcggccgggggtgggctctccgccgatgaagtcctggggccggcccaggtacaggtgggcggcggaggccaggctgaggtggccagttaggcgtgccaggccgtgcgcctcggtgtaggtggtgtcaggcaccaggaagaaccagtcaaagtcgtcgccgtgctgctccagcaggtggcgcagcgccaggtgcaggtgtccaatgggtcgctcctcgcctagcgtcaccactgccatgccaggtggggcccggcggccccgtgcgcccgtcaggaacaccacacgctccagccggtgccccagcgtgcggttcacggccacgcccagcgtgggcagcgtggtctgagaggtcagcaccgccaccagcagcctctgcctgatgcccagctccgtgctgatgtagcgggtcctaggggaggagatggcacaagcttatcaaaaggacaacggggcggggggtgggggggaggtggtcagcacagaccctggcaggtcacgtcttctctgtatctgttctctcacctatgaataggttaaaaataaaccctctctcccaggggtcatgaggatttaaacgaaatggtcttaaacaggtagtgctttgcatttgggagatggcaatacccacccagataggagagagatattgtgggtctgactccggggttcgctacttagtagttatgtccttgagcatgttatttaacctgagccatctgtaaaatgggactgattatatctgtttaaagcacccagccaaacgctggacacaccatgtatctactcatttctatataaatatgccattatgccacaaatgcctcacataaatgacataaaggaacgtttggcataggggtgtactgagtgtttttgcggggaggggcaaactgcactcaggggctctaggaacttaccttttggtaaggcagaaggtaaattgcagaaccagcatttgaacccaatgttacttagaagttatttcaactcatcagcagagacattaatgagataggtacattcctccctcccccatctcaccctgaggtggcccttgtaacccactcaggaacaagagatccaggtaaatcctagttctctcctttctcttcccctgtctctatacactcaccctatatataagtcatttctctaacaccagcagcccagccagggagctagtaggatctctggggcgccatcgggtcgagccggtttaggacacagtccagtaagttcagcccaggccgggatagggcccagagaaagtctcggactggccccacggctctcgggaaggcagggccatcggaagttatcggggcccaaagacttcctggctcgccagccccttccttccggagcctgacccgggcccgggcgacctccccgcgcgcttcccggccgctgcccagggggtagagcgggcgcagccgatcactacctgacggcctttttggcggcctggccgggctgtgcagggtggtagggcaagacgcgcggctcccaattctccccggcgccttcgccggccccgggcttctcgcgctccgctccgggctgcaccgagttgggccggcgcgccgcgttggtgttgccgcgcggcggcagctcagagtctccaggttggggcgggcctgggccgcacggctcctccacccaggtgacgctgagcaggctcagggtgaagcccagggagatgcccacggccacgggccctgcgggccgcagcaccgacagcagcagcgatgcccgcatggcgcccggaccgcgggtccccggccccggcgaacccccagagcagccagaggagtctccgagggggcgggaccggggagggggcggatccggagggctcgggccccgcgggcgggcccgctccctccccgcagagcagagccagcggcccgagccgaatccccggagccgcgcctcgattcccctccagcagctgctctgggctgcgcagggttcttgcgctcggcactggagcctcagccgcggccgcagctgtccgacgtgtcactgcaagggccccgcccccggggtggggtctcgggctctcgctaccggagagggaggagaagggggaggttaaaggggaaggacccccggaagtgccccctcctcagtgcgggagagggagacgccgggggcggagtcccctgcctcccgcggcgtggttggtgcgtcccatgtgacgtcagaagcagcccgcccctgcctggatggtgcgccctgagtgacgtcaggagcagaggccggagctgtccatcagcaccaaaggccgcgggcgggctcagggcatggggccgcggttctggggcggcccgagccccggctcctgcgccttccccttcctcaggcccagcccgagttcccggacgccgcgggactggagtgccagccggtgttggacgtggagcggcgccgccaccgcgccgacaccattctctccggcccagcagcccccttcctcgcacgacggactttccctggaccccagtcagttggagcctctggcgccccgcaaccccggcccctcgggcctctgcacagcctctttcactcagaagctcaggtcgcctccagcccaggtaaatcttggacaatcccatattgagccgcccacagatgaatctcttggctgcctccttctcactggcagcacgctcccttcatccccccgactcccgtccctcttttaacttcatcccagcctccactagccaggcacttttgtttccctttgtctttgctccccactccagagatgcttccggagctgcacaaatgtggatactattcctttgtccactgtccttgctgagttctcccaatccctctcccacccccatcctggtggggacccaggactcctccgtgaccccaactttccctctgtcaggttaacttgggagggtgactcccttctattcccagcactatgccggggactgtggcaacactgcggttccagctgctgccccctgagccagatgatgccttctggggtgcaccttgtgaacagcccctggagcgcaggtaccaggcactgccggccctcgtctgcatcatgtgctgtttgtttggagtcgtctactgcttcttcggtgagatccccatctcatccctcacctgggctccccagtgtttccccgagttctttttctgggcccccaagtcttctctgaatccctctaccatcatgaataattcttccttttctttcatcccacacatttatagattgtctagactctagattataggaaaaacaggtttttggattaggcacacctgagtgtgaatttactt

SEQ ID NO: 2762 - DNA, 4001 bp, Homo sapiens
gcctccgtggcagtagcggccgggggtgggctctccgccgatgaagtcctggggccggcccaggtacaggtgggcggcggaggccaggctgaggtggccagttaggcgtgccaggccgtgcgcctcggtgtaggtggtgtcaggcaccaggaagaaccagtcaaagtcgtcgccgtgctgctccagcaggtggcgcagcgccaggtgcaggtgtccaatgggtcgctcctcgcctagcgtcaccactgccatgccaggtggggcccggcggccccgtgcgcccgtcaggaacaccacacgctccagccggtgccccagcgtgcggttcacggccacgcccagcgtgggcagcgtggtctgagaggtcagcaccgccaccagcagcctctgcctgatgcccagctccgtgctgatgtagcgggtcctaggggaggagatggcacaagcttatcaaaaggacaacggggcggggggtgggggggaggtggtcagcacagaccctggcaggtcacgtcttctctgtatctgttctctcacctatgaataggttaaaaataaaccctctctcccaggggtcatgaggatttaaacgaaatggtcttaaacaggtagtgctttgcatttgggagatggcaatacccacccagataggagagagatattgtgggtctgactccggggttcgctacttagtagttatgtccttgagcatgttatttaacctgagccatctgtaaaatgggactgattatatctgtttaaagcacccagccaaacgctggacacaccatgtatctactcatttctatataaatatgccattatgccacaaatgcctcacataaatgacataaaggaacgtttggcataggggtgtactgagtgtttttgcggggaggggcaaactgcactcaggggctctaggaacttaccttttggtaaggcagaaggtaaattgcagaaccagcatttgaacccaatgttacttagaagttatttcaactcatcagcagagacattaatgagataggtacattcctccctcccccatctcaccctgaggtggcccttgtaacccactcaggaacaagagatccaggtaaatcctagttctctcctttctcttcccctgtctctatacactcaccctatatataagtcatttctctaacaccagcagcccagccagggagctagtaggatctctggggcgccatcgggtcgagccggtttaggacacagtccagtaagttcagcccaggccgggatagggcccagagaaagtctcggactggccccacggctctcgggaaggcagggccatcggaagttatcggggcccaaagacttcctggctcgccagccccttccttccggagcctgacccgggcccgggcgacctccccgcgcgcttcccggccgctgcccagggggtagagcgggcgcagccgatcactacctgacggcctttttggcggcctggccgggctgtgcagggtggtagggcaagacgcgcggctcccaattctccccggcgccttcgccggccccgggcttctcgcgctccgctccgggctgcaccgagttgggccggcgcgccgcgttggtgttgccgcgcggcggcagctcagagtctccaggttggggcgggcctgggccgcacggctcctccacccaggtgacgctgagcaggctcagggtgaagcccagggagatgcccacggccacgggccctgcgggccgcagcaccgacagcagcagcgatgcccgcatggcgcccggaccgcgggtccccggccccggcgaacccccagagcagccagaggagtctccgagggggcgggaccggggagggggcggatccggagggctcgggccccgcgggcgggcccgctccctccccgcagagcagagccagcggcccgagccgaatccccggagccgcgcctcgattcccctccagcagctgctctgggctgcgcagggttcttgcgctcggcactggagcctcagccgcggccgcagctgtccgacgtgtcactgcaagggccccgcccccggggtggggtctcgggctctcgctaccggagagggaggagaagggggaggttaaaggggaaggacccccggaagtgccccctcctcagtgcgggagagggagacgccgggggcggagtcccctgcctcccgcggcgtggttggtgcgtcccatgtgacgtcagaagcagcccgcccctgcctggatggtgcgccctgagtgacgtcaggagcagaggccggagctgtccatcagcaccaaaggccgcgggcgggctcagggcatggggccgcggttctggggcggcccgagccccggctcctgcgccttccccttcctcaggcccagcccgagttcccggacgccgcgggactggagtgccagccggtgttggacgtggagcggcgccgccaccgcgccgacaccattctctccggcccagcagcccccttcctcgcacgacggactttccctggaccccagtcagttggagcctctggcgccccgcaaccccggcccctcgggcctctgcacagcctctttcactcagaagctcaggtcgcctccagcccaggtaaatcttggacaatcccatattgagccgcccacagatgaatctcttggctgcctccttctcactggcagcacgctcccttcatccccccgactcccgtccctcttttaacttcatcccagcctccactagccaggcacttttgtttccctttgtctttgctccccactccagagatgcttccggagctgcacaaatgtggatactattcctttgtccactgtccttgctgagttctcccaatccctctcccacccccatcctggtggggacccaggactcctccgtgaccccaactttccctctgtcaggttaacttgggagggtgactcccttctattcccagcactatgccggggactgtggcaacactgcggttccagctgctgccccctgagccagatgatgccttctggggtgcaccttgtgaacagcccctggagcgcaggtaccaggcactgccggccctcgtctgcatcatgtgctgtttgtttggagtcgtctactgcttcttcggtgagatccccatctcatccctcacctgggctccccagtgtttccccgagttctttttctgggcccccaagtcttctctgaatccctctaccatcatgaataattcttccttttctttcatcccacacatttatagattgtctagactctagattataggaaaaacaggtttttggattaggcacacctgagtgtgaatttacttagctttgcagttactaattgtgatgtcttgggcacattaatctgtctgagcctcagttttctcatctgaacaatgatcacaatatttgtctcatgtagtgttgtaagaattagtaagcattcaataaattgtagctattgtgaggatgtgtttggctaactgtgctaggtagccactgaaaacacttagcagggttattacacatggtcccttaccacagggcatattgtctgacagggaggagactccctggagcatttacacctgggatacatattagagtgggctggatggtggtcacacacatccatccagcctacaaggcaggctccggtaatcagagctgctgtgaatacttgtacaggacgggtactaaataagggagctcagctgagtgggcaagtgggggctaaagtccagctcatgctctgacaaactctgggccttggcacaaagctgctttgcctagagaaaggcacacctttttctaatatgcataaaggtgccagatgggctagtggcccagtataatgggagtaagtgaccagtggctttgcagcaagagttacagaacttcagagaggagagtgagctctatgggctgggggcccaaagaaagcctccaggagaattgtaggtgagtgggaccagtgggggcaaatgagtct

SEQ ID NO: 2763 - DNA, 4001 bp, Homo sapiens
tgaaatatttgttgagcatttactgtaagcaaagcattgttttgggagcttcgagatattcaaaactgaatccttcttcctaccctcatggagattgacatttgtcatttacgtaaataactgtgaacaagttggaaagtgatatgccgtaagaaagacggcaatgaagtgcttgagattccagaggcaaagaaaagaaaaagttgaaatgaaaagtgctgtataaatagaacagagatcacgctgtgttaagctaacacaggaaaagagtccctgatataaatgacaattttgtctacaaaggactgattctaagaagggaaactcaaccacagtttcaaagtgttccttttgtaccacactggttccatttgtatttgtatgtaggaaatagctccctgggctgggcaaaagaaattttgaactgttactagtcccatggatcattattatcttaacctgattctgtatctcttgctacctttggctagttcaggctgtgttttctgactgtgcatgtaataaaccaagtctccaactgaccacattccaaaatgtataaattaagtgaccttgggcaggtcagctttagtttccttgtaataaaaaattgaggatgttggactgcctgatctagctctaaatttctataaaacacccatggaaatcaatgccagcaaactcgagatttgacctaaatacatatcacatacttctttaatagctaatcatgcatttttggttagcaataaccaaaatcctaagagatctcttaaggatgtttacattaaagcatatcatttaagaattttcctgtgactgtggttttgcgtgcacgcatgtgtgtgcacgcgcgcgcacacacacacacacacacacacacacatcaggccagctttggctggacagagtccaaatcccacatgatataatttatctgagtttaggctctttcactcaactctgatattgaaaaaaattaataataaagctttttgcctcttgaccagaaggcctgtgtttttcagagcaatattggaaatgaaaaatcacaggatgtcagccaccttgtttctcagttgggatgatatcaccagtaaacttttatgtgaagcaatcagcaaacatctcctgtttccctctagcggaagtctgggattcaggatggtgtttcagctgctgtgttaggacacattccagagtagaatgcaggtcaaatgctgtgcaaggttttatagtttcaattcaaacccaaacctatatatagtaacatcttaaaaaaaaaaagtaggtaggaatgtattcatatggaattttttttaacttcagaaattttgaaaaaattaaaaaatatttgtctctgtggagagagtttagttatgattattaactggtttctatctccagcacatgtagctgtcaatcagtcctctttattattagaattctcctggagcagtaaagggacttgttaactccattgtatgtgattataaggcactgttctaagtatccatagttgtttaaatatgaacccccggacactaccatgatccacaagtggtccaggtcctacaaatggtgccgagtgttcagagggatgagtcggctgccaggcatgatggagggagagacatgcgtgtctatcttgaagtctttgaccaggcagtttctattttaattagataaggcaaactaaaaatctttatccaaaaactcaatcaagctaacatcaggaagaaactgacagagcagcccctggttggggaggctctgccattctgtggtctcatcaaagaagcaagactttgatttgggggcctccagcactttagcctcaaaggagagccctctccccacccctgaccccagcacttacctgagcaaaggctaaagagcaggaggagaggccagggctccatgggctaccggagcttgtgtggaccagggcagagtggtggcctgtgcttctcactggcactctggctgggtgcttgtctgctggagggtttggaaagcgagtcggctcactagagctattgttttacaccacctgtttgtgggagcgacagctgggctgccctcagccctggagcccagggagttactgggactgtacaccattacagatatgcctcactttacacaattgcttacccttgacaagctgagtatgaactgcattatattttaaatgcaccagtagtcagatcttaatgaaaaaaaaatgtataggaaggaaggaattattttaaatggtgagcaaactgcctctcttttgtgtaaaccagaacctcatctctgtgggttgacttgattagggtcatttggtctgagtagatagtcagctgtttgtcctaaaccacaaaaatccacattctgcaaacatggcttcagtttcatttcctctgcttcagtgttaggctgagggtgccgggggcttttctgactgcctggatttcagaaaagtgtagctggtgttgagtctgctgctgggaagcccccacgttgattgggtttggtttttaacaaagacagcttcttccataaaactggctttactggcccccagagtggctgttccaacccctgcctctgtatcaggcaatacctatcccacacgaaccattagctggagcaaattgcccacgtcctatgcactgtgattcaagcgaagagtaattattgggaaaaagtgtcccaccgcatcagcagtcgttccgggttcctgcctccttccatccgtccctctgcctactctcactcagggaagcaaagagcagagtggttcagcttttcaattatcttgcttgaaaaacatcctaaaaaccagcagttagtaatttctcagtctgagaagtattgttaccctagctgtgcttctttgcagggtgtgaggtgagttcccagaaggagacagttacttaaaggtaccctgcctgttccttccaggcctccttcccacatggaactaggtgagaaaggtcctctcacctcaagcccacaacaacatcctgacagatcctctcattccagtggatccaaacaaatcattagagaaggggcttggagggtagaggagagagctgcaagctcatactatttatattttttgtttaaactgtgggagatcagttaactgtttgctaaaaaaaaatttggttctctcccttccatggaatagccccgtggcagaaatacaacccccaccctctgaccagccccttccatctaaatggagccatgggactgacctctggccagtggcatgagtggaaaaatgttctcagactcacaaacctaccagagctcagccccgcccttctagtcttctgaccggctagaatggacatggtcccaaagttaaccttagaaaccatgttctgaaggtggtgttgcttttgacattctgaatccttgaatgactgcatggagggggaccccctatccacctgctcaccacccagcactatttcaatgaaaacaaaacatgcatcgtgctgagccatcaaaatccttgggtttatttgtacagcagctagtgttccgtaattaataaaatatgtaatcctttgcactagtatcctgaggttaaaaataaattctaaaatatgtagcactgcagcagaaggcaagaaaattgatactggaggctgaaaatatgaagacccatgttatatggtatcaaatcatttcataaactgttgtcctcaattacttggtgaacaatgtgtctactgagcctgtagctcccagaatagaggctggtaaacccaaagttagtgcaccatggctctttctggctttgtttagcaagtcagtacaaggaagagctgagctcaggcaaaaatgtgctggttcaagagcagaaatgaaaagaaatagaatgagtccagaaatgtggagtcttctgttttgaacttcaaaagagtaagtgaaaacatggaataaaggctttgagcaaccaaagcccgttaagacttctctttaaacaggcagtt

SEQ ID NO: 2764 - DNA, 4001 bp, Homo sapiens
gacaaaagaggtttggggaaggcaggtacagagtgcggattcaggtctgtcatggacagctgtgcaggatgctcactgcacaactaagggagcattatttctactgtgagcatagacgatttgtgtctgtactgtggacttttgacaggcaggaagagaatgttttctaataaacatcaagataaagtggcaattttccaacatgtgaatcctaatccacttgaaggtgacatcagggctggtgagggcactaggtgggggaaggacagttgggcctggggcttccctgtagggaggcaccaacccctcctggagaacagtgtccaaggcagacgggatctccatgcagaagcaatctggtgccctgcattccctccccgaccccaccggctctgggcggggcattctcttttttttgagatggagtcttgttctgtcgcccaggctggagtgcagtggcgcaatctcggctcactgcaagctccgcctcctgcgttcacaccattctcctgcctcagcttcccgagtagctgggactacaggtacccaccaccacaccaagctaattttttgtatttttagtagagacggggtttcaccgtgtcagccaagatggtcttgatctcctgacctcgtgatccacccccctcggccttccaaagtgctgggattacaggcatgagccactgcgcccggctgggaggggcattcttacgtgctctatccacacattggtagtgagggtctcctcaacttctttctgtaattagacggtagggccatccttcagggccatatcattcttttatccgcacacattcacccactctctctctctctctctctctctttttttttccagggtcttgctcaattgcccaggatggagtgcagtggcacgagcttggctcactgcaacctgcaacctctgcctcctgggttcaagcgattctcctgcctcagccttcctagtagctgggattataggcccacaccatcacacccggctaatttttgtatttttagtagagatcaggttttactatgttggccaggctggtctcgagctcctgacctcaggtgatccacccacctgggcctcccaaagtgctgggattacaggcatgagccaccacacccagcctacattcacccactgtcaattggcacccagggaaaccgtggcatctgggccctgatcactcgcagtcaggagtgggtaggccgccagggagcagagaggaccagtggcctctgaagtgtgtcacagatggggcatgctatgggtgtggttgggggacaccgcagagctgacactggaggggcaggacagcagcctctcagggcacagagcagccgcagcacgtttcccaggaagggagtggccataggccaggtgggggcttctagcttcctccatggctatcctggtactggaaagccatccctgccctccctcccaacccagcaccggagggcctctcaccagggagatgaggttggagagtgtgagggccagggcaacgtccacactctcctctttgtgtgccacgggccggagctccttgttgtagcccttctcttgaaacaggtgccggatcagccgctcctcctcgttcagcccccagctgcctggggagggtcagcgacaaggactgaatggggccctgggcaggggactcaggaaggaagctgccctgaggtcctgctggaccatgaggttgggatgagcaggggggaacccaaccactccctgggagtggggaccccagaaggcggccccccacagggagagatggcagagtgggagtggagtgagtgaggagccatgcggtgtggggcctgggtaagcatcacgggggaccccagggtggggagggtgtcttcccttaccacacaccgccagggcagccagcagccccagtgtcagcactggcccctccatcccatccctctgactgggacgtgcatctgcccctcctgtctacagggctgtggaatgagggtgggcgggagaggggacaggtgttgggggaggagggggtcaacgggaagaggcagccggaaacacaatctgacacctcatggcggtgggggacgggccagccagggcaggagcccaaggacatgaggcaaagatcccaggctgggactccccgcagctcggaggcggggggtggggagggagggccgggggggtgctgggcggagacgctgggcactggggccagcgctgggcagccatgcacgggggcggggcaacaggcaggccagctgctgctgcttctcaggaggcaggagataggctcagataggggccttacagcccctttccagcatctgttacccttgccaactgcttccagaggcagccctgcctgggccccacccctgagactgaatgtccacccaccaggtcccatcccaagaaagctccagagttgtttccgtgtattataaataacatttattaaagcagctgtgattctctgattgtaaacctgggaagacacggggggcccaggacccccaccccatcccacccacacacacccagccactggggcagcgacagtttgtcattatgctcccgaacccctctcagcccctgggagcagtaggtcctccccaggggctgggggcccagacatggctcagggttgcctggcggggggtacctgagggttgagtgggtggtgccccttcctctccagcccgggcccctgccctacatccatccagggtccctcgggctccccttctgccagggcagccacgcggaaggcctgcagggcctgcaccagcagccgggggaggctgcgagccagtgtggccggctccaggcccaccaggccgctgaaggccacatgccggccccccaagcctgcccgcacccaggctctgaaaagcccggtcagtgtcttggagcccagatctgccaggacctacagatggaggagtggggatcaggggcccagaaactcactcctgagttgaaaccccagaggtcaccccctctccccctgggccccagaaactctcacctagacctggaaaccctgctcatttcccgctcatgtggacactcccacccacccctctactcactctccccaccaccacccccagtggcctggctcacactccgcaggccccactcccttcccctcggaccctctacctacccccagagctggggcagaggcgaccccaggctgctgggagggtatctgggctgggccctctgcatcttccctgggctgggtctcagccttcccaggccatcgtgaaggagtctggaagcctggggacctacctcatgaaagttcatggccaggtgctccgaggggacctgcaggatccaggcatgggccccctgcagggcagccaacttctgtcgcaggggctccagcccagggcagcctggaggaagaggagaggccccgggaataatgaacggttgcggtatggaactgggggtggcactcccaccagcacctcaggatggcctcccaggggacacacttatcctcttatgctataggtggggaaactgaggctcggagaagttaagcagtaacaccaggcaaagcatctctgtttgacactgatgagagctaaaaccacaagtactccaaaagagtcatacgctctatggcggggaggggagaacgagtccaccctgttgccccatggggtaagccctttccggagctgcagtagaagcgcttccgacctcgtccaggccctcagcctatcccctcctgaaggtcggcagggggcgtcattaccgttggcttctccgcgcggctccggcctccgcttcgggaaccgagtgcctgcagcccgcgatcctggggaggcacagggttagggtaccgcctcggcggagaaagtggctgtgccgcgcgggtggggccgggccagggctgggctgggctggagggcgcggggtacctgagtgaagccgcagctcccgggcggggtgcagaggagactcc

SEQ ID NO: 2765 - DNA, 4001 bp, Homo sapiens
gactcgggcttagcagggagagcttgggcaccttcaggtgtcttagcctgagatgggcacagaggcccaggggagatggagccaggcctctaggtgctgccagagccaaggccagaagccttgcccaggccttaccccaccactgcccaggcccctctgagagcagctctcttaatcctccccaataaatggcctcactggaagataagggagcagttctgccagtcgaaggggaagtaggtgactgagatagagcaggcggaacggaagatggcaggcggcagccagtagatacagccgtcaggggacacgagcacattgcagtagagggccacctcgaagacaccgtccacgctgtatgcacagaacaggccaggccacgaggctgtgggctcagcccccgacaccccagccccagaccagcccctgtgccccatgtggataggggcctggggacaccagtccctaccagcctgtcaccccctgactggttcccacccggaccactaggtccccccagcaatcctcctgccaccccccgccccagacagacttcctcaggcaccacctcctaatttctgcttatcttactctctcttgttttaatcataataataataataataataatagtcataatagcgactaatgtgttaagcccacaccatgtgccagcccccgagtgatgcacttttcatgcctgtcttgttgactctcgccagcttctataggacccgtcagcggccccatgttacagggaagggagcagcccacccaggtggcccagcccagaggagatggagcctggcgtagggtctgctctgctggccctggggtcagagggcatacccagggccctgccctcggcacctgctccatccagttcttccctagccccacaggtgcccgatttgcaccctctgctcatctttctcttttcccagagtgccttgttctgctgggcccagaccctgtgtcctttgtcccccacacccctgcctgcaccccctcctcacttgttctccagcacgatatccggccgccacaccatggtggacggcaccctcagcacccacaggccttcgtagtctcgcggatcccagcgcaggcgatagtcgcaccactgctgcagggggaggggcagttgctaggcctctgccctctgctgcaccacagccctaggagtgggcatccagcccaagaggacagaagaggcaggaacggggcaggcaactctcaggaggccttggggtggtggggtgggacccctgatggaaggagggtggcagggtggcctcttaccatctctatccagacattggtggtgagggcttcctctcgctcgttctgggggtgcaagggtgtagtatggagggctcagcccccgacttcagtgccagtccccacaggccaccaatggggccaagcatcccccagcctcttgatagtactccccccacaaccatgggggttttccagaccccagcctgtccgatttagggccctccaacctcttggtggctggagccaccccatgctatccccagcaggtcccagggcgtggtgcgctgacccctcctccgtcctgcggcttaccagggagatgaggttggtgagggttagcttcaggctgacattgaccacatccgagtctcgttccgcgggccgcaggttggggtcgtagttttgcatcaggtctgcgagcaggcgctcctcctggttccggccctgggcccctgcaatagacaggcgtgagcctagcaggagcttggaggtggaaagagcggggaggccctgggggtgtgaagtggggactcagggaactgggtccagggcaggccccaatacccctcagaccctccatcccctgaggctgtggaccccagctctgggactccccaggctgagattcctttgtgtcccacccaggcagacagccagcagcagcaggaggagcagcggcccctggcccccatgcatggtgcctcagctctctgcagtgacaggggtgggacaacagctccaaggtctggggcagagagagatgggctctgggtgtcatataacagcctacactcccaccccagccagcccagccagcccggccagcctggcccagccccaccagctgtctgaccacagcgttgtcagctgttccaggatggacacaatgctgggctcaggttacctgggctggagaggggagacaggggccccgtctgccccaaaagagacatccaccttccagccccaactcgggctcagttgtcccagcctcacctccatgttccacatggggggcaaggacagccagggccagctgggtgtggtagggaaggcaggtcgccgaggaacctgacagcggctccagagagggctgaggtggactgcctcctactccctccagggagtcaggatttgggtgggtgtgaaggctgttgggtaggcatgtgagggtttttgtgtttgtttgtttgtttgttttttgctggagtgcagtggtgcgatcttggctcactacaacctccaccttgattcttctacttcagccttctgagtagctgggactactggcatgcgccaacacgcctggctaatttttcttcttcttcttcttttttcttttttgtatttttagtagagacggggtttcaccatgttggccaggccagtcttggaactcctgaactcaagtgatccacccatcttggcctgccactgggcatccccctcactgggcatccccctcactcggcctccccctcactcggcatccccctcactcagcatccctctccctgaacttccccctcgctgaccttccccctcactgggcttccctttccctgagcttcctcctcccagagcttccccctccctgagcttctccctccctaagcttccccctcactgggcttccctttccctgagcttcctcctctctgagcttcctcctccctgagcttcccccttcctgagcttccccctccctgggcatcccccccactgagcttctctctgtgtggcccacttttcctggaatttacaaagccctcgtttccttctcacttctgagagccttgcctttccattttgccctctggtccccctagatgcagttttcttatcctcttttgcagaccagtttctctccacctctttactctcctccatgcccacattttaccaaattcaatggcctccatgatcaggaagcactgccaaacagtggaccacctgtccctgcatcccctaccctccaccctcctgttttctccctttctctgctctgggagagatggcctagaagccttcttggtgttctccgaagggtaaatcatcaatgaggaatggaagtttcttgcaggggttacgtgtgcagggacaggacccattcagagaaaatcatctgtagaattgtctaacactacttctcctttgccaccctctgttataatggctggtagagcaagatactcatttcctagtctcccttcagataggctagccatgtgatgttttgacctgcgggatgtctactggagctttatggaaaagttgtttttttttttttctttgagttggagtttcactcttgtcgccaaggctggagtacaatgacttgatctcggctcactgcaacctctgcctcctgggttcaagcgattctcttgcctcagccgcctgagtagctgggattacaggcgggcgccaccaagcccatctaatttttgtatttttagtagagagggggtttcaccatgttcgtcaggctggtcttgaactcttgaccttaggtgatccagccgcctcagcctcccaaagtgctgtgattacaggcgtgagccactgtgcccggcctatggaaaagttttgcttcttgatgaaaggggtcagaaatggctggcccttttctgcctgaacataggtgctaagtgtgcagctgtggctgtcagctcacaaactggggccaacaggtctgaggacagaagccaacttgc

SEQ ID NO: 2766 - DNA, 4001 bp, Homo sapiens
ctttactctaagaactcaatgctaaaattaaaagcaatttcctattatgttgattgaaagattaagctttatatacagtcattcatcacttaacaatagggataccttctgagaaatgtatcgttaggcgatgttcttctgcaaacatcagagcgttcttacataaacctagatagtacagctaaccacacacctaggctatatggtacagctgaccacacacctaggctatatggaatcatctattgctcccgggctactaacttgtactgctgttactgtactgaatactgtaagcatctgtaatacaatggtaagtatttgtgtatctaaaattagaaaaggtagagtaaaaataaggtagtatagtcttatgggaccactgttgtatatgtggtccatcattgttagaaacatcatgtacggcatttgatggtcctcacatccaggttatccagaagtgtatgaaaagaaaatgaactcctgggtttctgcaatctctaaggtcctgcaaccacctctctcccctgtttctattcctggctctctctcacctttttattgtatgaactcctcaaacactgaaaaatgatccgaatataactgcaagttgcctgtgatgtttacaaattctttcctttctttgttcagttttgcaaacactccaattttcatttcagcgaagaagagaattttctgctcaggtatttctttgagattctattcttcagggtcaagagcaattctgaattctgaattccaattctgagccaagatggactaagctcttaattataatggggagggaagggaaaagaccacttctctctttgtgtcttttcattttaacccagtcactgaaaagagtgaaggaggaggtggttggttatcagagagccagagctaaactgagctgcctaattttaacagcgtctgagacatttctcactctggcactctaagcaatgcaataacccaactcctcatggcccaaagccccagactctggttttcagacaaaacaacaacaacaacaacaacaacaaaaacccaccgttatgacagtcctgccgctgagctaaccagaacctggctgcactactttccattcactgcccaaccctttcctgccttgcagacttggaaagcaaaaatgacattttggaaaacctggttcaccttcccagccagaagtgcagaactgcatgcctcaacctccaacttcggacaggcctcctgacagcgaagatcagaggctcagggcaccccggggcccctcaggcagggaacgtgcattcccacccctgactcccctcgcaccgaagctgcacatgctccttcttccctgccttcctctgcatgctccttggacccaagctgaaccctttcttcctctctccatctacaattacaaacgcaaattctcagccaaggatgaaagaagtaaattgtaggctcgcacaatatcaataattccgcgggtcacagcatcccgcacaaggacgccttcttattgcataattaacgcgaggaaggctcttcccgctactcccgcgaactagggaggtcttcaagtcgccaaaacacaccgggatgtggctcgccaggacaaaacccgcgggttccccggtttttccgtgcgccccgcggcggggagaggggcccaggcgctgaaacccacccgcctgcgcgtccccgagctcaccctactggagcggcgctcgtccgggtccttaggctcctcccctggccctgggggcgccgcgcgggtcgggcttcgccgggcctgtgggcgaagcgcgcggggtcctgggagctcgggaggcccgccccaccttgccccgaggcctccgcgccgcggcccgtcgggtcccgggatgtggcggcggcggcagcggaagtaaggaagacgcccggcgcgctagaccggctttgggggccagaacgccggcaccgcctcacgcggccccctcgcgcctatccggccgtgcgcgccgcctgcccgcgcgcgtccccgccgccgtccccggccgtgcgcgttccagcgggtcgcggggagtggggaggggcgcggccgcgggaccccaggcccggatcccgagtctccctttctgccgctgcaaaagcgttctttctgaccgagacctgcggccggaacaagtcccgctgggcctccatccagaaaacaggttcgctttttgagaaagaaaaaaaatcccaaacttggaaaaaggcaaaaaaccaaaccaaaacaacaacaaagtcacacacacacacaaaaccaccttggaaaaatacaaaaaatagataagtaaatttcttaaatccccaacttggaaaaaggccacttgcttgcgttaagggtaacttctagcattttctaataagcctacttagtaaaagggggacgttctattctttaaagaacccccttggctgtccgggttggggatgtaactgttgtctaggtacagtggattaacgaaggacaatgataacggcctgaccagtttacagacctgaagaattgtaacttcttaacctgcagaaatggataaggcctgagtcaacctcaaaggtattgggattttattgccccaaagaagataaactagttttatttttatacaacctacatgtttgttaactacccgactatatctgtgtctatttagcaaacaagtaaaatagatacgtgtatgtatacacacacacacacacacacacacaatttttcaaagctttcaaggaacaagcgtttttgtttttgttttttttcttttttattggttccctccttaatgagttaataatattgagggagctggctgtttgagtatttcacttctagccccattactaatcatggtttaaaggttctgtccctcatgcagaagacgtttactgagcccttttttggggccctgtggttgagatgagacattgggtttccctttgaggatttgaatcgatacacgtgcacggcagaaaagaagtaagtaaatgtgaagcttggatgtgatgcagcatattatgcaggatttaaggatcaaggctctgggaatcagaccacgtggattcagagccttagtcactgcatatgactgttgaccttgtcacactctcatctctctgtgtcccagtcttctcatctacagaatgtggtactaggccgggcgtggtggctcacgcctgtaatcccaacattttgagaggcggaggtaggtggatcacctgaggtcgggagttcgagaccagcatgaccaacatggagaaaccctgtctctaataaaactacaaaaaaaattagccaggagtgggggcacgtgcctgtaatcccagctgctcgggagactgaggcaggagaattgcttgaacccaggaggcggaggttgcggtgagtcgagatctcgccactgcactccagcctgggcaacaagagtgaaactccttcaaaaaaaaaaaaaaaagtgtggtactaaagaatattgtagaggatgcatttaaaatacaaagcacagtcatcccgcagtagtaaacactgcaacaaacacacactattgtcactgttattactgcattcccaagatactgttcaaaactttaaaagatggagtttgttctagaggcttacacattgacaactaaggtaactgaggttttttggttttttttgttggagtttttcaaaatagttcctctttttttcctataaatgaatgtctaggaaaatattagtatttagtcttttttttttttttgagacggaatctcgctctgtcgcccaggttggagtgcagtggtgccatcccagctcactgcaacctctgcctcctgggttcaagtgattctcctgtctcagtctctcaagtagctggaattacaggtgcgtgccaccacacccggctaatttttgtatttttagtagagacggggtttcaccatgttagccaggctggtctcaaactcctgacctcaagttatccacccgcctcagcctc

SEQ ID NO: 2767 - DNA, 4001 bp, Homo sapiens
cctgacctcagatgatccacccaccatggcctcccaaagtgctgagattataggtgtgagccaccacacccagccggatctgtttttataaagggactaatgttttttgttcacagatggaactctccgtaaaagctagattaaggctgaaaagcagaggaaggctgggcacaagcctgcacaccagagcccttcccacaagagtccctgcttgactcttacctcctgacttgggtgccaaaccacatgcttgacatcctgtgtgtgggagttgagaacactgacacattcatactcatcctcttcatcaactgtgggagagaaaaaggggacccaagagccgaccctgtcagggacacagagggggctgtcaggtggttcccaatccacctggagggacctggcctcaccttcccagacccaaacgctcttatctcggctgcaagtggccaggaggttgccagatggggcccaagccactgacttgacctcattttcatggccctcgagagtggttacacactgtgaaaggggaaagaaaatgagaattaacagcagctaacacccctaagccccttcccatgggtacagcccaactggcgcaggttggctcaggttcctgaaccagccctggggaggaaacaggcaataattctggtcccaaccagcctgggtacctcaaagtcatcctggttcttcttccaaatgcaagtggtagcatcaaagctggcagaggccaggtaattaccgcagggggaccaggctaccttccgcacggtgcgctggtggccttcagaaaggacagacttgcagatccagctgtcacctaaaggcggagcgcaggccaggctctggagctgggtgcagcaccatgaagccattcaatatcaggggctagcactggaatcaagctagtgggggaaagctcagggagtgtatttcacagcttttacaaagatgcaaatgaatctacttcgtctggaagcttttttttttttttttttttttttttgagacggagtttttgctctgatgcccaggctggggtgcaatggcacaatctcggctcactgcaatcttcgcctcctgggttcaagggattctcctgcctcagcctcccgagtagctgggattacaggtgcccgccacaacgcccagctaattttgtagttttagtagagacggggtttcaccatgttggccaggctggtcttgacctcttgacctcaggtgatctacccgcctctgcttcccaaactgctaggattacaggcgtgagccaccgcgcccaacctctggaggcatctttctaaaacaaatctgatctaaaattgctattggttccccaatgccctcgggataaaatgtgaccatccagtcgcaagttactctgaaggccactttcctaacacctctcttttcccattttcctgcctctgcagctaacacaattcccttgacatttcagcttgtctgctgacgtttttcctcccaacagtcgcagacttctttgcctgtaaagcccttctcggcgtggctaacatcccactctccctccgccaggaacaggttcagcctcccctgcaggctgagcgcctgcactacgcgcaggctgagccctcagcgctgagggccgcgcaaccaggctgggccttaccctccgtgccccagatgcggattctccggtcgccgccgcacgaggccagcagggtccccgcggggttccaggccaggaaccagcagcgggagtccgggtgcgccgggacacggcccagcagcaccagcgagtccttcatgtcggcccgacgcagggggaggtgggggcgggcagagtccgctgagcagacagcgggtctcaccgcgcgcgtctgcgtaccgcccactccaggcttccgcggccgacagaggctcccgcttccgccggaggacctgggtcgccccggaaactcaactgcccactgctgcggccgccataccctctgggagttgtagtcgctcccctcacctcggcagggaaagcatcgcgggaccgcctcgaactaccagtcccgtgaggccctgcgcagagccggcggcgcgcccaggctgtgacgcgcgcgggggacggggcggggagccggaggaggcggaggcagaggaggaggaagccggaagtgcatcggccccgggtctgtccgggcgttgcgggattggggcctgggaacgctcggcccccggcagccgagaagcccgtgactgggctgagcagcaccatcccagccctggggcctgctgactggtgaggaacagtgggcggcgtggggagggtcttttctgcgcacaggtcgcaccccaaaccgccggtcccagatcacgggtccccgatccccgcggcccagcccggtcctccgcccctcggcatcctctggctgagaccctgactccgggtctttgctctagcagtagccgatccccgatccctccgccccccactcgagtctgcccagaccccatctggcccctggccctcttcggttgtcgtcccgcagtcccattccggagtctcctgtctccgccccccgaattcccgcagccctccccgtctccgtcagccccgggtcccacccccctatcctctggtgtcaaccctgacagcccagtcccggcttcacctgcagcgaacccggagcgttgctatcctccaccggactgtcaggctctgcgcgccccgcggaggtcggcggcgaccagcagcgactgcggagcgacggcgggcggccccgggcatgtacgcccccggaggcgcagggctgcccggcgggcgccggcggaggagcccgggaggcagcgctctgcccaagcagccggagcgtagcctggcctcggccctgcctggcgccctgtctatcacggcgctgtgcactgccctcgccgagcccgcctggttgcacatccacggaggcacctgttcgcgccaggagctgggggtctccgacgtgttgggctatgtgcacccggacctgctgaaaggtgagggtgctgcgcgctggcccttaaagcctcggtgggggacagaatgtgttctggctgaagcagagatagccagggaccagacacttggttgaaggaaacggccccataactgcctggtgttcatgcccaccaggtggctctgtttggggtccggcccctcattaattctgatgttattcagctaagcacctactcctcacagccatgttaatccggactgctgctattttaggattctgctggaggaaggacgctgtgtatcgagaaaagataagggtgctaggtatcacagttagctggcctcttctaaggatcctgtgaaatacggaaaagcttctttggggcagactgattaatggagaaaaaggaacttttaatatgactaggttttaaaagatatcttagagttctatggtaatcggatgcgtattagagaagaagggaatctgtggcattttaggtaatcggaagaccgttccattgccacccgcagtacaacagtcggaatgtggctcttggaaccattataggtgtgcctgacagaggcaaggttgctttgttcatcatcatgctttccggccagatagacagcagacgatgggagggtcctatgggccccatagtttatcctgcccattcttgtctccagtaaaaattgtgaagtgtgaggacaggactggactgtatcacctgctttttaccctaacaatgatcaatgtaccccaaacagtccttagtaacagcatagttcatcaaccccaaggtcttttgagccatcttgaaggtcttatatcctctctgtgctatcctgtctgtgctattccctggctgtgatgcattccagatgtttactgcaccgcctatcagaagcacttcctgttagatatctgcgtgttacctcctgaagaattcaggcactgggatttggtgaaaaggtccaagttccccgctgtgcatcggaccatactctgcttctgcaggtctaggct

SEQ ID NO: 2768 - DNA, 4001 bp, Homo sapiens
ctagacccccaccccccaacaggccccagtgtgtgatgttcccctccctgtgtccatgtgttctcattgttcaactcccacttatgactgagaaccattatttgaattttgaattttctagccaggtagcatttttttttagatttcattttatttttattcatgtgatacttttcagaaaatttcaatagaggttatatgggtagtaggatatgggtcatttggagttatgtcatatttttctatatttaaaaaagtgagtgaatattattttcaaaagggaaacaatgtcactgggtgacagcccctggttagctccccgtgccctggccatcccccatcctcatttgtgcctggagagtcttgcacttgtgacaaagttgttacctgccaccaccagaccctgagtgggaaatgtggcttccgtgtggtgactggggagggttagtccaagcaaagatgatgagagggaaccttcccccaccttcccctgaaagtgtcttggtgagctcctttattcatctaacaggttttgttgggcacctggcttggcccaaacacacaaacacacacacacctctcacactattcactctcccccacagccccacgagaagggtatttggccacctccacgttgaatgaagtttcttccccactggacagcggtccgcatgacaacagggagcggggctgctcaccaccccaccctcagggcctccacgaggccagcacatcacaggcaccggagaaagggcagggagggagggagggagggagggaggtggagagggaagtctgggcttcagtcatgcatccaagtttacccagccagtggacagccaaaatgggcttcagacataagttccccaagtcctttccttgttctcctcattattccaaagaggttctgtccagctccatgatcctctgaagaaacctcactttggatcccagtaaaaggttagcagcctaaagcctggtgtctcattcagctccagtggggctctgcggatcgtggcccctgggccctcccatccctgcctgccgtgtcccagccccatctccagggctgtgtggctctgagcagggaccacactcagggaccagcgtgaggctgtattagggcaagaatccagctcagagggaggagctgggagaaggaaagaggggcggggcttctactcaccacagaatttcatttctggtcaggaaggtcagggcctgcaacaaatcacagagaagcgacgtgtccactccattcatccctgctgtggcccctggggagtggcgcaattcagaggctggggaggaaatgcccattcttttgctgcacagctgggggaaccccaggttgaggtggatgcctgaggtggcagcaggagaggaaatggtgctctttcttaccccctagtctcttacagccctgggaaggagggcattggcacagatgtggagagcagatcagagacaagagtgaaactctgggctctggtgcaggagacagatggaggaaggtaaccttagagatctcatctgggccacatggatgcagatttagcaaagagagggaccaccgctaccccgcctggtaaactctagagcaagcttgtccaacccacggcctgcaggccacatgcagcccaggacagctttgaatggggtcccaacacatatttgtaaactttcttaaaacattatcagattttttcgtgatttttttttattagctcatcagcaagcattagtgttagtgtattttatgtgtggcccaagacaattcttcttccaatgtggcccagggaagccaaaaattggacacccctgctagagcgtcaggaaggaattttcccattcattccacctgctttaggaagctcccacctctgcccagagtccctagcccgatctacccacctggtactcttccaggtcctcccagtgcatctgatacctcaagcattgccccatgccaaccacacctttctgtctgccagcagtagaacctcagcctcaaggactcgccagctgaggcacctcgttgatccagttgccatggtgacctacattccaccttctgcccattccacctgagttactgagttggcaaagaaacaaattcttttcattcccattccacctgagttgctgagttagcaaagaagcaaattattttcaatcccaaagctaagaggcatcagtcccatacaacaagcagaaaggcagtccaaagatggggctgagagtcacactgtcagctcaggagtcacagtgcctgggctccaatcccagatccaccccattgtaacctgggacaagctcttcaatatctgtgtgtcttagtttcctcatctgtaagtggggatgataatcatgggattgttgtgaggattgacgaatacagggaataatgtcaggcacatagtaagtgctcaataaatgctagctatttgaaccacaacctagctgggcatggtggctcacgcctctaatcccaatactttgggaggccaagtctggtggatcacttgaggtgaggcgtttgctaccagcctggccaacatgcagaaaccctgtctctaccaaaaaatacaaaaattagctggcatggtggcatgacctgtagtcccagtgactccagaggctacgatgggagaatcgcttgaacctgggaggtagaggttgcagagagccaagatcgcaccactgcactccagcctaggaccctgtctcaaaaaaacaaaaaaaccctacaacctgctgggtgcagaggtgcacaccagcacacctgtagtcccagctactcaggaggctgaggcaggaggatcgtttgagcccaggagttcatggctgcagtgagcgatgatcataccactgcacttcagcctgggtgacagagcaagaccttgtctctaacaaatcaaaataaaaaataaacaaggaaccacaaccccaggactatgccaggcatggggatgccgaaatatatcagcatagatccaacctcagggagtggcccaaaaagtacagaaaagggcgttccaccccatcagtcagggtctctgcaggaacaaagggcaccatcaaatcaggatcatgtgaaaagggtctaaaaaaaggactctccacaaagatgtgttcagggtgtagggaagtcacatggataactggataacacagactcctgagcccaacaacaaagagctgctacccgacccagcaccacccacctggaagcaccaccccagccccactctctcctctttctgtgatctcctacagggaagagaacagggcggagcaggatgggcagacagagacaacgtccagcacaggcatcaacatcacaggccaggagggccttccagaagccatcactccctcccctgcctccaggagggtctgcacacccacctttgtcatgaaaggctggtctccttgttctagaacacatcttccctatgctctcctgagtaaacatcccagtgattctctgatgacgcttatttatatctctgaagtgcaactgcctgctttttctttgactgtcctccatggggatagagcctggcagaaggaaacccggggccctcattccttcatctgctcaccagacacaggtagaatatccacagtgtgccagggacttggcttgaccctgggagagagaggactgaacatgacttcaaccctcaaggaacgtatgctcttcatgctcttttaagggagtaagaaaaaaaaaaaaaaaaaagaaatgtgtgctcaccacacacacacacatacacacacacacatatatacacacactaaagcagatggaggcagatgtcacagacggggaagagtacagagttacgagtgtttagaagaggaaaggcttgctgggcaccaagctttcatgtaggtggtggcatttaagttgctgttatcatgcggtggttaagaacatgggctctgaaatctgaaaggcctggcagcatctcttcttactgcatcacctc

SEQ ID NO: 2769 - DNA, 4001 bp, Homo sapiens
gtatgacatataaaaagctgtacatatttaatgtatacaacctgagtttggtgacaagtatatccctgtgaaaccatcatcacaatctacactataaacatatccatcacctccaaaagtttcctcctaccctaataaatttttctatttatcttcatttaatatagttcctttatccttagttaataaagaatgctagaggtcaccccctctccccataaagtgttaactatctagaaaggtctgctaatcaaaaacatttcattcttctcctctatcctgggaaaagtataaaacagatcaaagaggccaacaatatttggtacattttacataacactttacacagatgagaagaatgtaggttctaagcctataactgctttactgaatttctcatagcggacttgcaaaagttattctctgtggatttcttttttcttgtaagaaagctgatacattgaaatttataaagcgaaatgtcaaaagttccagtaaaaaattatgatttctcaggtatatttgtctctaaatataaacagcaaataagcaagcacctgaattccatctaatctcttcattcttgtaaaaatagtaacagctgaccccctaagtatgcagagaaaggaaatgtctgtgtttggtgtcaaaagttattgagccaaccaaatacaagaaacctctccctcccacagttgcaaccacacaaacacaaactggtgcagtggaaaaaaaatcactgggttaatcaggtgttccagatcctagttctggtacaacatttaactagctgtgtaactcttggcaaatttgtttcctcatttataaaatgaggagatggggctggatgattaccaaagagctttcaaggtgtatctgtgttattaaaatttcatgggggagttattaagaaaaaatgtttaataagactccttaggaaggtaacagtgaaaaaaaagttgagaatcactggtctagaagtgagagtatatagcagtatctcatcacctcaactcgttctaaaaacaaataaaagcttagttattttcacaagtttctatgtaggggcaatcaacattttattgagcacctcctctctgtagtggacacagtgatagatgcctacgttgtttcaaatcctttatcttcactatttcacttaatcctcacaattaagtcaatcatccttaatttacagattagaagactgagggtcagatattacaaatattttgtgcaaggtcttaaggctaaaagtgactgctcgaataactagaatccaggtttgactccaaagctgattctttctacttcactcttttgcttttcattactatgatattcaccaaagtattacaactggtagacctgtaattatgtaaaacactaaacttcaacgagtttagtcatcaaaaagacactagattattaggtaatttttttaaagatctatcttaagtaaacggggaggcttctttgtacagaaaagtagagttcagaagccgtgatccctgggatccgaaaagacaaaaaaccagaatcagctgaaggaagtactgaggaattttgacattagtcttcgcatattatggatttgcattctggccgacaaagattctctaggccaccggtctcctcgctgttgcagaataaacgctgaggacccgctgcgtcagcgagctgctcagcagagaaaggcgagaccaccagggctttaggcctagagaagcggaggctgtcctagggatctcagagacaccatcactttcacttccagcagcctctgggaaggcggtccctgtgggcctaatccctccccgggtctgtttactcacttttttgatattggatttggaggcaggatgaaagtctttcttgcacatgaagttggcgaaggatttccccatcttggaactggaactagggaaagcaggggctagatctgttagcaacgtaaacaaactcagccgcctaaccggaactgcgtttccagcagcaagggggaacttccgagatcaaaggtgacagcttccggcaactgatgcctccactggccactcctccctccgtccacctgtcacttcgggtagctgggaggccaggtgaggggcgcgcacgggggaggggcgtgcatagttgagacagaaacccggaagacccaactgtggcgcggcactgcttgaccgaggggctccggagcccagctgcaccggctgcggtttgagcgcccagggccggggtgcggggtggaccgcggcggcccttcgaccaaaggtgcttgaagctcgagcccattactttctgtggactctgactcgagctgcaaaagcttttctgcactgtttttctcatctatgttatgaagataataattccggccctaaccgtagtatgcttgcgagaatccaacaatatgatgtttctgaaagcgccggctgaactaagagcgcgtgaaatagaatgacagacagctctgcaagaacggaggccctgtctattttgtacccagctgtacggtactggcgccgaaagacgttcaataaatacttattgaatgacgaatacgcgttaggagttggtaaaatctctcaaggcttcacctcctcagtgggctaggtgcaattctaaccagggggcaagtttccttagctttccctacgaccccagttaggcagctcaggttactattgcagcttgatggcccttgggactccaggtttttgagtggacgtggctgctactgcagcaggtgatccaccaaccaagttctctatcagggtaatgttaagaataaaccttggccgggcgcggtagctcacgcctgtaatcccagcactttgggaggccaaggtgggtggatcacctgaggtcaggagttcaagaccagcctggccaacatggtgaaaccccgtctctactaaaaacacgaaaaattagccgggtgtggtggcacgcgcctgtaatcccagctactcgggaggttgaggcaggagaatcacttgaacgcgggaggcggaggttgcagtgagccaagactgctccattgcactccagcccgggcaacaagagttaaactccatcaaaaaaaaaaaacaaaaaacgaataagcctttatgagaaattttctctcctaccaaataataacaataacagctttcatgtgagtatctactatgttctatgcactgtgcaaaacactttacgtgttgccttattaagttctcataacagcccatcaaatagtgtcttatttttctgatgaggcagaaggcataggtaagagagagattaaatagtctgccaaagttatatagtgatagaactaactataaaacacaaatagaaggagatccaggacataagagttgaaatacagaaagaaaataacagaagccatcaagacatcagacttctcgtcactgaggagaagaggaaaacccttaagagtttcagtctgaagtttttatttagtcattttcttttctttttaaggaaacatttattatatttaaattttgtttttaagttgctagcatctgcctgtgtaaagccattttaaggttttgccattattaaaggaaagaaggaaactctgtaaaacaatgtgtctgttctggcagcaaaataaggacctttaggtgttctattataagtgaagatctaagattttccaagttacaactgaagaggtaatctagatattaaagtatataattgcgatttataaattaaatatgtgaactttctcctagaaatatcagcaatttggaattatattgacatatttttgtctgaatcaatgagtctgtttcaaaatttcagtctcatcagaattataatgtgtattatttcccagctcaaataagaccccttcttccttcctttgaggaagtactgggcacgtaagatttttttccataagacaagttccagcaaagagaatataaagattagtaagacatactcccagccctcaaggatctcattgtccagtaaaggga

SEQ ID NO: 2770 - DNA, 4001 bp, Homo sapiens
cataatgttataaaatccctagtcctataaatgtgccttcaagctaacatcaacatcaacaatatcatttatatgccaggcctacactaagttctttaaacttactacttttttttttttttttgagacagggtcttcctctgtcactgaggttggagggcagtggcacaaccacggctcactgttgacttgatctcccaggttctagcaatcctcacacctcagtctcctgagtagctgggaatacaggcgtgtaccaccatgctggataattttaaaaaaattttttgtagagacaggatctcactatgttgccaggggtggtctcaaattcctgagctcaagtgaccctcctgctttggcctcccaaagtgctaggattacaggcgtaagtcaaagcactcggcctaaatttacattattgctttcaatccacaaaacaatccaatgagtttttgcaatctgaaattcagagagagtaaatgtcatgcccaaagttacccagctaatatgtggcaattccaggacttgaaaacaggcttttctaaccctggagctcacagccactgttctcagctacaacagtctgttttgaagaatttctgttactggcccacctgagctggtgagccaggcctggtcttacgtcttttgtttttttacagggatgatgatttttacccacaaacccttatatggcttcctttgttggtactaaggataaaatacgcccggtctgctcacggcagacacctatactatggtgactttctacgcaagccatttgtgaggggatgacaagtcaataatttctgccttcaagaactttcaaactagtagtggagataaaatcaacacagcaacaattacagtataaggtaaaatctaagggccataagagacgaaaagaagtatgggagttcagaggtagggcataaatgaggggagtaggtggctagaaaaggttaaaagtaaataatgatgtgaaggaagacaaaaagacgacaggggtgccaaacgactcttaacctcatctgaacggagttgccctgttttgctctctgatgctcatgtatctatccttagagacagcttggcgggcaatgtagagcgtaggggctgacatagggggttggagtcccacctccgtgacttctagcaaattagcaaactttgctgctgctaagcctataaggcggacagaaatgccatctttaaagcttgttatgtaaagtgcctaggacctcgtaggcatcaacaggaataatggatgaaacaaaacaacggtgcgtatcttggagaaagtggcatctgagcaggagtattttgaaaggtaggaaagggctccaagcacatctaagagattagggaacgcagaagccttagccctgggtgcagatttaaccaatcaacttctaaccaccgcaggctgagaggtgtggagtgagagccccgccagaggcaggagacccgggcttcggccagaccccgcctcctggcacagaggaccacgcccggctctgcctggagccaaatgtggatcaaaacagcgcgcagcttcccactgctggtgaaaacccgagcaaggggcctcagtttctttatccggaacgtggtgacaatgacatctctttgcaaggctgctgcagggctttctggaaatacgcccgtgaggtatctgggcctgcgcacagcctcccccgcccaggacccagacgtctacctgggggtcccgtctgcgctcccgggatggaaaacgcccaggggaaacttaggcaggcgagcggacgggcacctcccgcgggacgaactcactcggtggcctcctacttccccggccgtgttccaacgcctgagaataacgggaacagcggtcgtactcaccgacagcggcagcagcggtaggcccgggccccaccatgactcttcagtgacagtttttcttcaaacgccgcgcctgtagccaggaccggcgtgccgcgcgtccacgcgtcctcattggctcctgcgggtttgaaactcgctagtcgtcagcacgggagggcgggacaacaggcaataggctctttgcggttggctctggccttgagaacccgaccttggggccctttgattggaagaacgtgcagcgcacctcggcattgagggcggcttcctcggggcgcggcgccgcccgcctctgagtgcgcctgtgagtgcgcctccgagtgggcgtgggaccctccgtgggggcctcagccgggctggtggttggggggcggttacgctgaatccagctggggttggcgcgccgggagtccctgggcggagagacagggcggtcctcccaggatgctggggccgctacctgattctgtcctttcaaagtctcagactcacaggagctgtgaaaaaataatattataaagaggacatatgggtcttatgcatctaaaggctcctagttcttagtactgcagggtggctcgtttaattgtggtaaaatatgcataacatcacatataccattttaaccattttaaagtgttaaatttttcaaaaatgtgcagtttagtggtattaagtaccctcacattgtggcacagccaccactactgtcctttccagaactttttcatcttcccaaatgaaaccctgtacccgtcactaactccgcactcctccctcccccagccccaggcaatcaccattctagtttctgtctctatggatttgacaactgtaggtgccatataagtagaatcatgcagtatttgttctgtgactggcttgtttcacttagcataaagtattcaaggttcatccatgtgtagcatgtgtcagaatttcctttccttttaagggggaatagcatttcgttgtgtggagatgccacattttgcttcttggtccatccctctccggacacttgagttgcttccactttttggctattgtgaataataatatgaacatgaatgcacaaataactctttgagactctccttttcattcttttgggtatataccacgaagtggtattgttggatcaaacggcaattctatttttaattttttgagaaactgccttactcctctcacggtgatctcttgttcaaggtatattttcgatttcacctgatcagctgactataaggccataaggctaacggagaaacgcaggcctagtttctcctagttactaggagatcgcaggcctcgttgtcctgaatccctagacacacttcattccccttgttttaatcctaaattttttttcttttgaagtttgtcctgtttcatctattctccagtttcttaaagaggtctggaaaatgcttttggctccttgtgtatgaaggttcctcttccatggatgctggagaagtcgtgtgtggaggggcagtcatatctgggcacctgttggccaggttcagcttaccagttgggtactcagcagggcatgaagccactgcagcagcccttctctttagccgtaaatagggagtttggaagagagccagggtttctggatttatgcattttgatattttcaatagtgtattaaatgtttaaaataggaaaactgatcattatttttgttaatgactgagaaagggactccttcaccaacagtttcagaaaagtgaaggcggttttgttttggtctttgtagaatctaggtggttgaatgcatgtcagttgtagaagtcaccttgcctgatatcccacgcagtgctggagtattccacagaccccatgtaggtactgcacctttgcaggtatactgctggtgttggtgagctgccttacctgtcctgttattggagacccctgcttattaggaaacttaaaatgaactcaaatgagcttccttgcttactggtcctagtcctttggagcaacataggccagttctgcctcgtttttttccatcctttgggtatttgacggtctattttgtaggacacaaaatgtgggaaaatagctaggcaggtttaaaaattctcaactctaccaag

SEQ ID NO: 2771 - DNA, 4001 bp, Homo sapiens
caaactattttaagggtctgaaatcttgctctataaaaagcaagttcccatcatctgaactacacttaaagagattctatcccactagttacttaagcataatacaccaggcttcagagttttacttgctatcaattaaaaaaaaagtttacctcttttacataaataaagtggaatctgtgggttaattcaaaagcctgacatactaggagatctgggttttccgttctaacacaaatttatggtgaaaacttagcaaaagccttttctgtatttgccaattcagttgtaacacagagatacaatatttgacacctccaccaccaacaaagtctcctctaaggagtcctgactttggttaaccttacctgggagaattaaaagctatggctgaaaactccttcataaaaactaaaactttagaagtctaaaatggtgttacaaggtagcccataataaacaatgaattatagaaactgagatttcagtaacaactgctaaaaaggtgtattacacaatttaacaagataaccagatcatcaaaatttaaatttcttaacaaatgtaaaaaataaataatattcaatactctgaggcactgtgctactttttatctatatggtcgcaacatcaatgttgctattctcccaatcccttgatgagcaaacggagccaatatccaggatccctcatatcgagaggtcagttaccgtcgtaaataatcgtagtaataaaaacaatttctaatgccagaattgaaaacggactgtggcacccaaatagggtccaaggtacatggcggcatgaaactatttctcgcttctgactcttctgcatcacggtctcccaaaggactagagaatctgaagctctcattgccacatctacaaatgaaagtatcatgtttaaagagctcacaggttctacgaatggtcagtatttaatgaacgcaccccactacacagaaactcacccagctgcaaactcagctgcaaactcaccacagcgtgctttcagactccacattaattttttttaattttagaagcaaacaactattttaaaaatattatgtaataatttaaactctggaaagccccatactcatcccagcagctcggaaaacggaaagcaaaattcgattagctccattgtacctagccaggctaacgtgcaagatcacacactcatcttcgtcagagcgtctctgccaataccaaagaacaacaaaggcaagttgagaagtctgcacaggcttaactcagcacttgttcgctttcccagcttcagaaagaagctcttcgaaggccccgggaaccaaggggaccttgtgcatcccatcaagccggccgctccgctcggcgccgctcgcgcagcttttgtctggcccggttgggagcccaggacgggagcccgggccgcccgcctcccggcaccccttctctctggatctttcttcacacccatcactcgccaatgactagttgttgtgggtttctctccctcgccccctcccttcctttcaaacgcgccccgggctcgctggcttctcccacccggcaggggagactcgggttaggaagggggcccgggtggggtctggaaaagggaaacagagaggggcacacaaagcccgactgaccccagggccgatcccctccctctgcaaagcagcctgggctcagcgacctactggttggataaacaaccctcgcatcccgctcctcgccaggctcccacctcagggccgccccatccccccaaagtgcacccaagagccgatgacagcgctggacatcgcccccacccagacccggcgcccgccactgcgcgggaggggccagggccgcgagagggctcgggtctgaccctccgccccctgaccgggtacttacagccctgtttttcgttactgttgccgctgcggaccagagagccgccgccttctcctccaccccaatgaggttaagcgcttggtgcggggattaaaaaaaaaaaaaaagaaaaaaaaaaaaaagaccgagagagcgagagagacgccgagggcgcctgcgcagtgcggtcaccctttttcttcttaccgccaccaacccgggtacaccatagagagcgtaaaccgagaccagagaggcggctgcctctctatggtaacgccccgcgcaggcgctggcctggccgtgttaggcttcgctggcgtaaagtccccgggagctttgcccctcacggagaacgttagttgaccctgatggggacccgtagggtaaaggttttgtttttgtttttttttacggaaaaggttgtggttaggccccttggaaagttgcgacaaaactcgagttagacaaggaaggtcggaactaagtggccacagcaacaatgcaccagcaagcagggagcgtgataggaagagctaaagaggaatcgggaaaccctgggtaaaagtcgtccaagtggaacttcctttggtcgggggtctgatactcgaaggaaacggtctttcacttctgggttagggcgtccgcccagagggcgactgcaatgaaggaaattgtgccctgcgacttcccgtaacagagctgtgtgtccacgctcccttttccgagcaggcgcggacgcttgtgccggaagtaaacttgttaacggttctttgccttttggggaggggagacagcccagagaaggctttggagacccttgagtcggccagcgagcagggtttcttacttgagcgcctccacaaataaacgctccttcgctcctccgtcgcgtgcgtttccctgggataataagtgggaaagtggtggcttttatttttttgagacagggtctcaccgccgtcgcccaggccggatggagtgcagtggcgcgatcacggctcactgcagcctcgacttcccaggctcaggtgatcctcctgccttagcctcccgagtagctggaattacaggcgtgcaccacccccccccaactactttttgtatttttttgtagagatgggtttcaccatgtttcccagccttgtctcaaactcctgacctcaagtgatccgccgtcttgggtcttcgaaagtgctgggacagcaggagtgagccaccgcatctggcccggaaagtgttttggagcgtagaaaaatgcaaattatagggctgccttcaaggatcccgaaggacccacagatttgccgcatcaggctcctatgcacgccggtaatttgatgtgttgagatgcactgcccagtgcgttgtttttactggaggagcttgtgtgcggagctccttgctagtgtatgtgttgggatgggagagaagtgcgggagaactatgagataatgccccctgatcctcagggtcttaggaggtatggtcggagaggctaagctaaagtatgaaagccgtgtgtaggcccttctgtgtagtgcagaaaaggtagaggtatgtgatttgaaagagtagggatgacatggaggatgcgactcctggttggatctataaactaatgtctttggaacgaaagcacatgcaaccttttgaaaatggatgggtgataatgaaagaccattccagagaagaaacaccatggtgcaaaggctcaagaggcatactggaagtacaatgaagagagcaatctaactgaaatgggaaaaaaagaaacaaagagtaaaaagtaagatttgatgagaaagatggaatcgatttttaaatttttttatctacacaacaaaatttattatcttaaccatttttgagtgaataattcgttagtattaagtatatttacctcgtgcggccagtctccagaattcttttcatcttgcaaaacaaaccccgaacccattaaacaatttctcattcgccattttccagctagccttggtaacctccattctagttctgtctctgtgaatttgactgtgtaccccgtgtaagtggtatcatacagtatttgtatttttgtgactggcatatttcacatagcataatctccttgtggtttatccatct

SEQ ID NO: 2772 - DNA, 4001 bp, Homo sapiens
ctccagaggctgaggcaggagaatggcatgaacctgggaggcagagcttgcagtgagccgagatcacgccactgcactccagcctgggtgacagagcgagactccgtcaaaaaacaaaaacaaaaactaaaactaaaaactgtacaatttccagaaacaaaggagaacatctttgtagccttggattaggcagatttctcacatacgagatcatgagaataatccataacagaaataaaatgataaattagactatcaaaattaaaatcttgttaggagaatgacaagacaagtcacagactgagagaaaaatatttgcaaatcacatgactagcaaagaacaaagagtacatactctatgatctcttatctataaaactctagaaaaagcaaactaatctatagttacagcaagtagatctgtggctgcccagggatgaggagaggaagggagaggaaggaattacaaagagccacaaggaaactttggggtgaggaggatgactatgtgatgatgattgtggtgatggtttcaggggcacacacatatgtcaaaacttaacagattgtatgctttaaatatatacaccattagacctcaataaaactgtgtttttaaaaaattatctctttctgtgaggatggtggagcccattcagtggtcagagggtaccaggagagaagctcatcctagggtctgagcatctgaaggccccagttccctctgcaccccacccccactgtggctactcactgttgggttcaaaaggtaaatgcccagtaatgttgtctcccagaattacggcttgcacaggcttcggaacaggtcttgtctgctgttgaactgagacattccatttttccaggtcagcaaatccccagccctgagcctgggaggatacgctgtcccacacagaggtagagttccagaaccggggagatagcagcaaagaccctcccagggtttccctcatgaacctcagttcttgggaggctcccccttggacagtggcctttatctgttcccagggaagctgtggcttgggcctggagctggaggtggaatgatctttctgggagcagagaggcccagagagtgtgcatctggggcccctggggactttgtgctgaaaggagagaaagttagtgagatttgggtcacctgggggcttacccactacaaagagagtcacaagagagaagaccaaggtcacagccataaatgccggggtagcctgaacgagcctcggtatcttgggggctgcaggagccattgccacagagtccacctctgcaggggagaaggcagtgtccaaggtgagagggtgctgtgcaaggtaagagggtgctgtgcaggctgagacacagcctctctgattctgtttcctgggttgtctaatggggatgataactcctgccatgcttatcatgcaggtggttatggagaaggaagacaaaacactttgggctgttcaccagagctagatgtggatatggtagcaacacagagctgaggagctctgagaccgagaccaccgatctccaaatctcaaggaggctttggtggtgcacagggcacagaacctggcacagagcacagagcaacaaaagtgtagtttgaatgaaagaagaaaggaagggagggaggcctcacaggaccagctcagtgtgcagagccgggattccaagccaggaccatctgaattcaaagttcatcccctttctcttgccaggtctgcatccccaaggacaagggtctggggagagcaataagacagcaataagctgccttatggcagagggccaaaggacaggcaggctactccctcactgggcaagagctggggccccagttttctcaccttgggggtgcagggagacacactggttatctgtgcagaagcggactgcctcaccgtccatctctgcttccttgatcctccagcactgctcccagccactggctcctggaagggccgtcccgtggaccaatggcagtggaagcaaagctgagacacccacacttatatgctcctgaccaccctcccagctcttcctccctccctgcctgactctgcagaaacccgccccagtgggcccctcccctagaggctcccagatacccatctgccctattttcttcctcttcccattagcaccttcccgtcagttctcagccccatcatcccagcctctgccgcatccagcataaccccaaacacacctcttcttctctgggggctgggactggcacctaggaagggggtctcagctttgcacagaaaacatccttatgactatggctgacctttaattctagcctcagaacctcttaagtaaaaggagtcaggtaaaagaggggccaggtcagtgcggccgatatttgcaggtcaaaggaggaagcggggtgaccagccacttggggactcacaactgaattatagtatacaggaggatgtgcggaggttatataaaaatactacatgattttgtacaagggacttgagcatctgtggactttggtacccatgggagtcctgaaacaaatcccctgcagataccaagggacaactctgtaaaaaatatatctggtcttcatctcagttcctgacacagaactcctaaaacgcttagagtttcctgggtgacaggagtgttttttgttattcataataagccccttaggactacacttgggtttatgctaatgaggtgacacagggtggacccttagataatttcaggctggaggctggtcccagaaagaccaaacatgggattagactttggaagactgggactttcagccacccactcccattccctactcccagacctccaggtatgggagatggcctggggtctgggctataacgactcttaaaaaatgagattcaaggagcttagggattggtgatccacatgccaggagggtgtcatgccctgactccacagagacagagtctcctgcacttgggaccccactgggccttgccctgtgtacctcttcatcaggctgtttttgtcctttacaataaaagaataggaagtacagtgtttttctgagttctgtgaattgttctagtgaattatgaaaactgagaggttgttgcagaaaccccctaattttttgtttgagacagggtctccctctgtcactcaggctggagtgcagtggtacgatcataagtcaatgcagccttgaactcctggacacaagtgatcctcagttctcagccccaacatcccagcctctgtcacatccagcataaccccagcataactgggactacaggtgtgtgccaacatacctggctaattttttatttttatttttttgtagagatgggatctctttttataccccaggctggtctggaactcctggcttcaagtgatcctcccacctcagcctcccaaagtgctgggactacaggcatgagccaccttgcctagccagaacccccaaatttgtagttgaccaggcagaagtggggtcactacctcacttgtagctagcatctgaaggggggcagtcttgtgggactgaggccttaccctgtgagatctgtgctaactctggaagttagtgttagaatctgtttgaattgttggatgcccagcgggtgtcagagaatcggctggtgtcaggaaaaagcacacatttggtgtcagaagtggtgtcagaaaataccaagcaggccccaactttagctgattggatccatgcctcctgaggtgaccaggttctcaagactaactccaaagaatctgatggagcaggctggggccaatgtgtggctttcaatgagccctatcccttccaggaggaacagatactgcttcaggggttcctgctgctgggtgggcctagcattagaagagaaggcatgaggcatcccagtggacagtgccatggagctgtgcaaacgtgatgtccctgtccctgccacaggggttaccagctgaacagaaccaatattcccatggctggtcaagga

SEQ ID NO: 2773 - DNA, 4001 bp, Homo sapiens
cagacaaagcagaggtccaaggactgggccttggggatactccatggttagaggtcttgcagatcaagaggaagcagcaaatgagcctggaaaagagcctccagggtggcagaaaaactgagaggtgaagtctttgaaaggttttcaaagagagatggaatgagcaactgtgtcaaatactgctgacagatcaaataagatgaaatgaccattgaatttagcaacatggaggtcattagtgaccattacaagagctatccgatcagaatggtggggacaaaagcctgacaggagtgggttcagacaacggaagggaaagattagagacaatatgtacaagcaactctaggaaattttgttgtagagactagttggcggactaggggatgaaaaatgttccaggaggcagggcgtggtggctcacgcctgtaatctcaccactttgggaggccaaggaggatggatcatttgaggtcaggagctagagaacagcctggccaacatggtgaaaccccatctctactaaaaatacaaaaattagccgggtgtggtggtgggcgcctgtaatcccagctactcgggaggctgaggcagaagaattgcttgaacctgggaggcggagtttacagtgagccgagaccgcgccactgcactccagcctgggcaacagagcgaaattccgtctcacgaaaaaaaaaaaaaaaagttccaggaagaataaacgactggattcttcagaaatgccaaaacacgggagggcataggtcaggaaattaaattagcttcatttactaaaatgtagagtaatgggtttagcagattaggttgtaaggaaggcagaggctgaatgtcattctaagaaatttgaattgtatcctgaaggtgaggtataaaataataacacacatttacctttcagaatgaatattttggaggcaatagtgaaggtgggttagaaaggaggaaagactggagagagataaggagttagattcggaacccctacaagagaaaattaaggtctgaatttggggatggggtcgcagagggcagaggatgaagaaataaatacagaagacattagaaaggactctggtttgtggagtggagaaaggacagggagaacttgcttctaattggcctccttgccggaagaagcaccccatacatactccaaaaacttcctctcagatccaagactcccaatgcccaaatttggaaattctacaactaaataaccattctgcaggtttcttttccgtacggcttcactttaaaatttgaaaactcctgagatttttcaacatattaaagcgtgtcacactaaggagtgacacacaagacccagactcttccctaggctgggagagactcggcggttgaaagcagggaggcgctacaggagagaaagggctgaacccccgcttccgcagatttcacctatttttcagtttgcctggagcaggccacgcaaattcccttcccttgaaggcccaaggagcgtctggtagattgctgattctctgcccatcaccgcttctggaagtgagtgaaggacacctttcgtgccccgcaccctttgccccccgcttaacatttgctctagtcacttccggcccgttcccacgctccggaaaccattattccgcttcatcctacctccagtcctcacctgagtccttttctccaaacaccgacttcagtgcttagagatagtaactagggaatctgggaggtggaactgcatcttgggacaagtagtccaaggtagaagaaagcagtggagaactacagttcccagaatgcacttccatttcctacctcttccccaagaggcccccctcgacctccttttaaaaattctcttagccacgttgattgtacgggaaaagcctttttaaaacatcttttacgttgcttaaacctacagtttcgaaagcattccgaaggctaaagtgagaaataagcccaggctagggagaggagaaacgaagttcacgtcctagtctggcaccgggttggattgtcgctgggacggcagtcaggcatttggtgtggtcgcctaaggggtgggtccttcggcgggagctccgggaaaccccgtgggcctgcgcggcgttcttccttttcgatccgccatctgcggtgggtgtctgcacttcggctgctctcgggttagcaccctatggtgccttctcttgtgatccctgacctaacctgtctcttccttttcctcaacctcaggtggagccgccaccaaaatgcagattttcgtgaaaacccttacggggaagaccatcaccctcgaggtacgggccgggtggtcatgaggaagccaaggtccgaataaggtcctgaggtggattttaggaccggcgctgctttccatgtcttagaccatgattccgaatttgggttctaaaacttaagctttgaaatgagtaccttttgctgagcaacgacctagaggtgattttcggtggccaaaggctggacctgtctcctctcgaggggttccagctagttagttaaaacggaggagctgcggtggggaaggagacgctctgcccgccgggtgcgagcacgtgtggccctgcggccgccgcccgctctgggctggggagatgaaggtgctttccggtagccgacttgggaggttgcccactgggtgggtaataggtctctcgagtaggtctcagccctgtcgctggttcggttcagtggtaattgtcaaactaaatgagttctgctgtagttccttaatgtgtaaccaacatgctttcactttaacactcataggttgaaccctcggatacgatagaaaatgtaaaggccaagatccaggataaggaaggcaagtagtattttgtagttaagaaaacttaacctgcggagacttcggcctacctgtaggtgctagacatacctgctcttggtgatgggggaaggggtcagattgacaaagcgaaatacttgtggaataacacaatagacattggtgatcggggagcacagtacctagattggaatccttgaggtgtatttcacttgcgtgaatttggacacttatttatttattttgtgtgagatggagtctcctctgtcgcccaggctggagtgcattcgcttgtcccggcttactgcagcctccgcctcccgggttcaagtgatttttgtgcttcagcctccctattagtggggattacaggcgtgcaccaccatgcctggctaatttattgtatttttagtagagactgggttttaccttgttggccaggctggttttgaacttttcacatcaagtgatctgcccacctcgacctcccaaagtattggtattacaggtgtcagccactgcagacaaccaagtattgtccctaatattaaatgcggtaaaatgtgacatgtaaagatttagaaccatgcctaacctctagtaagggcttattgtcagcctttagtatcatgtatttgattaaggggtgttaccttataagtctggagcacatcacaggcttggtgtgctgtgacttaatttttgttttttgtcattaggaattcctcctgatcagcagagactgatctttgctggcaagcagctggaagatggacgtactttgtctgactacaatattcaaaaggtctgtctaggggaagagcagcctcttttaaaaaaaaaatgttattttggaaattttttattttactttttttgagacaggctctgactctgtcacctagggtggagtgagtggcgcagtcactgcaacctccacctctcagactcaggtggtcctcccacctcagcctcctgtagttggaactataggcacccgccaccatgcccaggctggtctcaaactcctgggcataagtgatcttcccaccgtggcctcccagcgctgggattacagacgtgagccactccatgtggtgtattctggacattttgacacacaaaaagggaaaatggcattcgaatagcagtagatttttaggta

SEQ ID NO: 2774 - DNA, 4001 bp, Homo sapiens
aatcataaagtttttggccttagtgactggagaaatgggaattgccatatataaacatgggaagagcaatttcatgagattaagtgtttggggcctgtccattagagatgttgagtagatagctggatatgtgaagatgaagttgtgacatatctgtgacatatctggtctgacagataagtttatgagtcatttgcatatgatgatactttaaaagttattaaacaaaaatgagataaccaagaaaatgcagacaaagcagaggtccaaggactgggccttggggatactccatggttagaggtcttgcagatcaagaggaagcagcaaatgagcctggaaaagagcctccagggtggcagaaaaactgagaggtgaagtctttgaaaggttttcaaagagagatggaatgagcaactgtgtcaaatactgctgacagatcaaataagatgaaatgaccattgaatttagcaacatggaggtcattagtgaccattacaagagctatccgatcagaatggtggggacaaaagcctgacaggagtgggttcagacaacggaagggaaagattagagacaatatgtacaagcaactctaggaaattttgttgtagagactagttggcggactaggggatgaaaaatgttccaggaggcagggcgtggtggctcacgcctgtaatctcaccactttgggaggccaaggaggatggatcatttgaggtcaggagctagagaacagcctggccaacatggtgaaaccccatctctactaaaaatacaaaaattagccgggtgtggtggtgggcgcctgtaatcccagctactcgggaggctgaggcagaagaattgcttgaacctgggaggcggagtttacagtgagccgagaccgcgccactgcactccagcctgggcaacagagcgaaattccgtctcacgaaaaaaaaaaaaaaaagttccaggaagaataaacgactggattcttcagaaatgccaaaacacgggagggcataggtcaggaaattaaattagcttcatttactaaaatgtagagtaatgggtttagcagattaggttgtaaggaaggcagaggctgaatgtcattctaagaaatttgaattgtatcctgaaggtgaggtataaaataataacacacatttacctttcagaatgaatattttggaggcaatagtgaaggtgggttagaaaggaggaaagactggagagagataaggagttagattcggaacccctacaagagaaaattaaggtctgaatttggggatggggtcgcagagggcagaggatgaagaaataaatacagaagacattagaaaggactctggtttgtggagtggagaaaggacagggagaacttgcttctaattggcctccttgccggaagaagcaccccatacatactccaaaaacttcctctcagatccaagactcccaatgcccaaatttggaaattctacaactaaataaccattctgcaggtttcttttccgtacggcttcactttaaaatttgaaaactcctgagatttttcaacatattaaagcgtgtcacactaaggagtgacacacaagacccagactcttccctaggctgggagagactcggcggttgaaagcagggaggcgctacaggagagaaagggctgaacccccgcttccgcagatttcacctatttttcagtttgcctggagcaggccacgcaaattcccttcccttgaaggcccaaggagcgtctggtagattgctgattctctgcccatcaccgcttctggaagtgagtgaaggacacctttcgtgccccgcaccctttgccccccgcttaacatttgctctagtcacttccggcccgttcccacgctccggaaaccattattccgcttcatcctacctccagtcctcacctgagtccttttctccaaacaccgacttcagtgcttagagatagtaactagggaatctgggaggtggaactgcatcttgggacaagtagtccaaggtagaagaaagcagtggagaactacagttcccagaatgcacttccatttcctacctcttccccaagaggcccccctcgacctccttttaaaaattctcttagccacgttgattgtacgggaaaagcctttttaaaacatcttttacgttgcttaaacctacagtttcgaaagcattccgaaggctaaagtgagaaataagcccaggctagggagaggagaaacgaagttcacgtcctagtctggcaccgggttggattgtcgctgggacggcagtcaggcatttggtgtggtcgcctaaggggtgggtccttcggcgggagctccgggaaaccccgtgggcctgcgcggcgttcttccttttcgatccgccatctgcggtgggtgtctgcacttcggctgctctcgggttagcaccctatggtgccttctcttgtgatccctgacctaacctgtctcttccttttcctcaacctcaggtggagccgccaccaaaatgcagattttcgtgaaaacccttacggggaagaccatcaccctcgaggtacgggccgggtggtcatgaggaagccaaggtccgaataaggtcctgaggtggattttaggaccggcgctgctttccatgtcttagaccatgattccgaatttgggttctaaaacttaagctttgaaatgagtaccttttgctgagcaacgacctagaggtgattttcggtggccaaaggctggacctgtctcctctcgaggggttccagctagttagttaaaacggaggagctgcggtggggaaggagacgctctgcccgccgggtgcgagcacgtgtggccctgcggccgccgcccgctctgggctggggagatgaaggtgctttccggtagccgacttgggaggttgcccactgggtgggtaataggtctctcgagtaggtctcagccctgtcgctggttcggttcagtggtaattgtcaaactaaatgagttctgctgtagttccttaatgtgtaaccaacatgctttcactttaacactcataggttgaaccctcggatacgatagaaaatgtaaaggccaagatccaggataaggaaggcaagtagtattttgtagttaagaaaacttaacctgcggagacttcggcctacctgtaggtgctagacatacctgctcttggtgatgggggaaggggtcagattgacaaagcgaaatacttgtggaataacacaatagacattggtgatcggggagcacagtacctagattggaatccttgaggtgtatttcacttgcgtgaatttggacacttatttatttattttgtgtgagatggagtctcctctgtcgcccaggctggagtgcattcgcttgtcccggcttactgcagcctccgcctcccgggttcaagtgatttttgtgcttcagcctccctattagtggggattacaggcgtgcaccaccatgcctggctaatttattgtatttttagtagagactgggttttaccttgttggccaggctggttttgaacttttcacatcaagtgatctgcccacctcgacctcccaaagtattggtattacaggtgtcagccactgcagacaaccaagtattgtccctaatattaaatgcggtaaaatgtgacatgtaaagatttagaaccatgcctaacctctagtaagggcttattgtcagcctttagtatcatgtatttgattaaggggtgttaccttataagtctggagcacatcacaggcttggtgtgctgtgacttaatttttgttttttgtcattaggaattcctcctgatcagcagagactgatctttgctggcaagcagctggaagatggacgtactttgtctgactacaatattcaaaaggtctgtctaggggaagagcagcctcttttaaaaaaaaaatgttattttggaaattttttattttactttttttgagacaggctctgactctgtcacctagggtggagtga

SEQ ID NO: 2775 - DNA, 4001 bp, Homo sapiens
gattgcagtgaggagagatcaggccactgcactgcagcctgggtgacagagcagagcgagactccgtctcaaaaaaaaaaaacaaaaacaaaaaaaagagagagagaaaaggaaaagaaaaaaaatattaaaatttcagtgcttccactgctctagccccattcaagtggtcaaaagctatatgtggctagtgctaccatattgggtaatgcaaaaagaacatgtttctggtctccgaaagctcttctaaacagcactgaaggaaaacagtgcagctcactctccagatgagaaaacaatatacaaatgcctgaaacaagacacaaataaaggttaacacactaaagcaagcctatagctccatagttcattataaataattaacaagggagcagtaagcctaaaagtaaccagagtttgaggtttgaacagggagaaagagtgaagttgattttatataatctaaagatcactagtttcaaacacgtgtcaaaattggagttgtcataagctatgagagacaacataggtcacttttttaaaagcccttgctggtgggactgtatgtggtaaacacaaaatgtctgaaatgaatcctacaaatagaataccatgggctaaatcttctacaaaacagaagtaaacacattccatgcatggctagactcaatcttacagtccagatagaccgtatcaaatgaaagcatttaaaaaatgcatcatatttacgaaagcaaaataagctggaaccaggatggttctccaacataaaaacgcagaccaactagactccagcaggttcaagtctctgctttcctccccagttgctcaatgccccgcaccacgtgatcctgtgctgtttagacgactcactttaaattgtgcacaagattcacaaacaacaaacgtcaaagtgaaagtgaagtacaatttaagtgctggcggatgttcctgaggaaggtgtttactgaaacctttcaaaggcgcccgttttatacgatgatggtgctacaatatgaacgcagtctagtatctcagaacatacagcaagttattgtcccataggaacatcatcctctgatacgtatcaaaacactgtctcagcacagagctgaaaaccagagtctggatgacgtgaacagcctgacatctaattcaaagctctaccatcataagcagtgaatgggatccttaaggatgcgggctcagctccagcgctcctttcaacttcccctcccaggtgcggatggttcagaattaagggatctcaggtagccaaggactgcaaggacagccatttggtttagctttgaagacccactggccaaaggtttctcgacaatttaatgcgcaaggggagtcaagtgagaaatgggaagaggccgcgttggaaagccactgcgcgtgcggggactctcggggcagccgcggctggcggtcgtggcccagagcccagctccgccgccgggtcccgcacaccccgcgcccctcaacctaaagttgggccgtccgtcagcggccgccacgaggagtccccatccccgccgggtgggccgctccgccccgagaaggcctccccgcggccagcgacaccggtgcccacgggaggcggccgcggggcttccacagcccccagcgcctctgcgcgaccctcccggggccactgacctccccgcgggcccccagggccgcccaccccggccccaaccccgccgccggccagcccgcggcccgggggggccccgcgcgcccccggcccacctgcctcctccgggtcctctcggagcggccggctggggacgcgggggcgcggaggaaaggccgagaggcgcgctcccgccggcgctgtctcccgtggccgcccacggagcctcccgccgcgccgctccacacctctccgggcccctcccgctgcctcccacgcggggtgggcgcgcgcgcagtgcaggcggccgggcggcgcgcaggcctcggccacggccccgcgcacgcgctggggactcggtggggacggaggaggcagcgcgcgcctgcgctggctcgcctggctcccgcgcccccgcactccccagcagtcagatgatcgggcgcacgcggggccgcgaccccggctgacagcgtctgcggggtgtcgcagtgttacctcccccgccgcgaagccaggcggccccggcacgccgtgcgtgcccaccgccttcacagccctcagcctcgcggcctcacgtctctaacctgcggcgcccccaccagctgctggggccggggacctagtcttacccgtcttgggctccccagagtccagccgagcgtggtcaagagtacatccaccagttccctgctggcagcgcttgctgtaaaaggcctaatccgtgctacacccacgttgagcaattagttcatatctcctgcggctttgctgcctcttcacccacgttttctcctgaccccttctccgtctcccaaggaccagacagggtgaaactgtgcacctaaagtcgtgaactctgacagcctgactctctgtcatctggtaacaagaaagcgttactggacacatagtgagtccccttaatgaggagacctagtaagaccatgaccgaagtttgaaacatggagacaacagtgttacatctatcagctgtctctgaggcctacagcggctgcttcatagaggctgtacttctgtgttcagcgcgcacagtgcctggcaggaacagatgttgaatgaacgtctgtcagtgtctctgcaagagcagaggtaagcgctcaccgcaccccggagcatcttttcctgttagaatcattgatttcagggactggaaaaagcccccttcccacttgcctgaatcctccttacagtgtcttcccaccaagcagtggttgaacacctccactaacaaggaactcattaccttttaaggcagccatttaatctttgatcagccttttggaaattttctaccttaggagctaaaatccagctccctgcatctctccctcactggattttgtttctgccctggggactcttaagtctgactccaattcatccaagacacacattacctgtcccttaggctactcctgatatgacctggtcacaatcccactcaccagcatgttgagggattctcttggatgcattccagcttgtccagagctctcttaaatgtgattatcaggaatgagtgggtggcctgccaagtgcggagaggaaagagactgccacctcttcttaggtcctatgcttaacaacattcaccatatcaaaatagttgctaggagcagtcacatcacattgttgaatcgggtggagcacacttgactaaaacccacaatatttgaatacatgaccatccctgaccctggtcagctgccagtttctctgtctctgcaggctcagcatctgcgagtgctctcagagataatgtgacacggatacttcctcctccctctgaagagtccacctccctttccctgctttcatcataccctcttcttgtctgacccacccatctctttagctggttaaaagaaggaaggcaatctgcccttggttggcttcaagcacctataaatgaggccaattgtcattgaaccacagaaagtcataaagatctgtgtgtaacagagtagctattggtgaagtttccaaacgtatacagttcacttttattgctgatttaaattatccatctgaaataccactattagtaggtgacaaggcatggctagctcagttgttcttagttataataaagatctctgttagaaccagccaggccactggctttatctgctacacccaaacactgtatgatacataggcaaattcccaggataccaagccaccagagtctcccactcacttagttgcctttgttcaaaaatctgacgttacttctttataccatcatcaagaatgcaagtgctcgttggagtcatgcttcctagaatacctcgtgacatacaagctttagaaccaggtattgcccagttaa

SEQ ID NO: 2776 - DNA, 4001 bp, Homo sapiens
cccaaatagctaacacaatcttaaagaacaaagtcagaggattgacactacaggcttaaagatatactacaaagctacagccatcaagactgtggaattggcagaagaatacacaaataaatcaatggaatctaataaagggctcagaaatatactcactcaaatatagtccactgataacacaggagcaaagacaattcaatggaaaaaaaggatagtcttttaaataaatggccctagaacaactggacaaccacatacgaataaatgaatccagacacagatcttacaccttttacaaaaattaactcaaaatggatcgtggacataaacgtaaaattcaaaactataaaacatctatctagaagataacataggagaaaatctaagtgaccttgggtttgctgatgactttttagatacaacaccaaaggcataattaatgaaagaaaaaactgacaagttgaacttcattatattttttcaattctgttctgtgaaaaatcctgttaagacaatgaaaagacaagccacagactaggagaaaatctttgcaaaacacatgtctggtaaagactgttatccaaaatatacaaggcttaaaatttaataaaaagaaaattcaattgtttaaatgggcaaaagatctgaacagacacctcaccaaagaagatatacaaatagcaaataagcatgtgaaaagatgctaacatcatatgtcattagggagctgcagattaaaacaaccatgagatgccactacacgcctattagaatggctaaaatcctaaacagcaacaccaccaaatgctggtgaggatgtggaacacaggaactttcactcattgctggtgggaatgcaaaattataagtcctctgtggaacatcacttggcagttcttacaaagctaagcatagtcttaccatatgatctaacaatcatgctcctaggcatttacccaagtgatatgaaaacttatgtccacacgagaaccgatacgtgaatgttagtaggagcttttttcataattgacaaaactggaaacaaccaagacattcctcagtaagtgaatggataaacaaaccgtagtacctctatacaagggaatattattcagtgatacaaagtaatgagctatcaggccatgaacaaacggagaaaacttaagtgcatattgttaagtgaagaagctaggctgaaaaagctgtgtgaaacaatggagaccgtaaaatgatcagtggttgtcagggctgggaaagagagcgggaaggatgaccagatggagcacaggagacttttaaaggcagtgaaactattctgcatgataccgtaagggtggacatacgacattatgcatttgtcaaaacccaccgaatgtaaaacacaaaagtgaatcctaatgtaaaccacaggctttagttcataataatgtagcattatctattcattgatcgtaagaagaaaaaaagtcaattgtgaagcatttttaatactccttttaagtttggagtgctgaactgactttctgatcattccattacgtacaaaaggttgcattcctgtaaaatatgtcaaagttgcctcattatatatccagttactgaaacccacactcatctgtctaaaataatgctacgctgtgttcaggatactcacctctgccttagcagaaatgagtttcatcagagggctgtatggacaggagattggttttctagtgagacttacccaaaccatgtgactgtcttctcagtgtcacgtagaaaaagaattttcagtccctcatgggtctttctcaccaagagtacagattgttcagcgtgttggttgggagtgcatggaaatgggtgttttcatactgcactccctgaggcccctgtgcagatccaattacagaaaacctggtggtggtggcaggcttcagcaggcctcccttagagtcctcctttgagagcaccagccagcgtccccacaggcagcacgaacacaataatggcattgtggaggtgctatggagaccagatttaaaaggccgaacactattaattatgacccttcacctacctcatcggctgccagcagcaatagcagaggaagaagaaacataaatggggcctggactttcacttcacagcaaagtagcccaggaagtttgaggagactcagagtcactgtcaagtcgtcaaggacctgggtcaccctgcatccccatctggggctccttctatatcagttttcctgaagcttagtccaacttcttgaagtgggccaagaaaaggctgtttccagaattggatattgcatctctaaaacacaagcttcactgatgtcgtggagtctatgagacacaaactttatctcatatggtagaatccggaatggtaggaacagagggagggagcaatcagcccatcggaggtcacaaagtatctttgggtgccgggagtggtcactaccagaggctcagcttaggagggcaaaacacttcccatctttgcccaaattgccacatcacccagggcaaggttgcaggggtgtctttgactaatgagagacctgcggtcccagtgtgttttgaaatcgtgctctctgacacgctctaaagaacagaggaggtcagtacaaattgctggtctttgttgattttcttttctgcaaacagatcagccatcgcttcacacccaaggaaagaactgctgtccagtgccaggcccagagcttcatggtttgtggcaagtctttggaaagataacgtctaacttcattcattttagctgaaaataccccatggtggcatttttctggtctccctactaaaaaagtgagcatgacacacaaaacatggtgcatggttctagctcttaataaattccaagcccttttgaccaaaccactactgtgtagtttctaggaggaagctgcttctgctaaaaaaaaaaaaagaaagaaagaaagaaaattccagttattagggtcatatatctgtcttttgtttctctcttttttttgagacggagtcttgctctgttacccaggctggaatgcagtggcacgatctcagctcactgcaacctccgcctccctggttcaagcaattctcctgcctcagcctcccgagtagctgggactacaggcatgcaccaccatgcctggctaattttttgtatttttagtagagacggggtttcaccatgttggccacgctggtcttgaactcctgacaaggtcatatatctatttaaaaataaaaatattgtgttaatggcataaagaacatttaagaaattgaggaggtatcactctgtggagcacatccaggcgaggggagccttggagcctctgggactttcttcaaacaggaaaccattggctaggagctggggagatcacagtctctattgaaataccactgctgacagaatagaagctgcctatgatgagtgacttctccctgccctctttcaatatgaacgtgaattctcagtcattgtcttcctaatagaaatccttaacctagaaatgttcactcctggctttaaaaggaatagccaaccccttagtacccagaattttctataagctatcatttttttttcacatctattgcaataattactatttatactgaagatcctaaagagctgaaagatctcgaagtacaaccagaatcatgtacaaaagactctggaacctgtactacagtaagcaagcatgtcacctgagaaatcactagtcttgctcactcagggctcttgactcagctgtgtgaagaaaacgtgctgtttggagcacacacgttcacatggcccactccctatgttcatgcagatggcatagagctttgctatacagcatataaccatctccaaagcatcagccaagaacactataggagatgcagcagtttattagtaaagtgtttaataaaagtatgattttcaagggtgtgggcaaagtttagggaaaccctcagaaaaagggcagtactttggggcagtat

SEQ ID NO: 2777 - DNA, 4001 bp, Homo sapiens
ccaccctttgccgactcctttttctgactcagcccgcctgcacccaggtgaaataaacagccatgttgctcacacaaagcctgcctttagtggtctcttcacagacacgtgaaacacacgtcattctccccgtttaaacgtgtaccagaaactagtctccaactcaaatgcaatcataaatgttcctcaccaacaccgcattactgattactgcaaacgtaatcagagttatatctgagttgctgacagaatcatcattacagagcatttccgtaaacggacaaatgaaactaccaaggactttaatcacacacgaaggcaacggtggcatcagaatataaaaacaacaaaacaccatctttccagtaccactcccaagcacatacaacataatttatcctaaacgcaatgttaacacaatctttttgggaatggtaggagccaccttcttttcagaaatgcttcgagcaaaatcgaaaatctctaacctaacaacttgaaaaagacattatacagaaattacttcatcaactgccgttctttcttaccggcgggacccctctgtgtcttccgctacaattcttttttttttaacgccagtcaaatttagcggtaggggttgtatactaattttcgtgacactaataactattaagttctgataacccactaccattggaccagcctgagtataatttttaaagccctccaattgggtcgggggccgtggcttatgcctgtaaccccagcactttgggaggccgaagcaggagggctgcttgagcccaggaattcgagaccagccagggtaatatagagagaccccgcctctataaaaaataaaaaattaaccaggagtggtggcgcgcgcctgtagtcccaactactcaggaggctgaggtgggaagatcacctgagcccagatgtcgaagctgcagtgagccgtcattgcgccacttgcactccggccggggcgacaggggcgagaccttgtctcaaaaaagaaaaaaaggaggctgggcgcagtggctcacacctgtaatcccagcactttgggaggccgaagcggatggatcacctgaggtcaacagtttgaggccagcttaatatggtgaaactctgtctctactaaaaatacaaacattagcccggcgtcgtggcgggcgcctgtaatcccagctatcccggaggctgaagcaggagaatcgcttgaacccgggaggcggaggctgcagtgactcgagatcgcgccactacactctagcctgggcgacagagcgagactccaagaaaagaaaaaagctccaactgctaacccaagaggagtggctgaaacgccatcgcataaaattctcggtcacctgacttctgtcacaacgctccttcaaatacaccccagcatttctctttccttgggttcctaaatctggtttttgttaacaccactgaggacaaagccactcgcgatgtttacgccgacactttcatcattagacattaactgtaacccctacgggttccgtctctttctccacttactccagacaacgtttccccacagctgcttggctcacgcacattctggaaccccagcaaatcccccctcaacggggagcctcgcctttccggccacagggccgaagccggcctccgcccagccgccatcttacagctccgccgaggcggttcacaacatggcgcccgcccgaccgtcccgcgtcaggcggcgccgcttcctcagcggagggcagaagctccaagagggcggccggcctagcaaacaccgtaactacccccgcaggccggatccggcggcgacaggctcggccgcgcaggaaagaggggcgcgccgccactgtgcagcctgggagtgaagggagcaggcagtcgtcgcgccggggacggcgggcagcaaacaagcaggaaaagggggcatcgccaggcgcccgcgaggctcacaggaacggccctgtcacctagtccgctccctcctgcgtcttaccgtcctggacaaagactccaagtcgaaggagacaaagcttgtaacgcaatcacgggaatcacgcagctgactgcgtcgcgcaccaacaacaaaatggagctgacagctgctgcgtcgagactcgtctcgaaaacactgatgacgcagcgagcgcgtctccgccgcggggcgggtcatgcacggggcgagcaggcggaaagggcgggcgtgtcgcgcgcgcgaccatcgtgggcgcaggcgccagggagggaaccagagcccgctgtggcggatgaaaggaagccgtcggcgtgttgtccccactcactgatagtttttgaactctagaacaaggaacaacttgtgaacaaggaaaagtgagggaatcagtatacacagtagcatgtaccctgttagcgaccactaaaacaattgctttaaaactaatacttcacggcgcggtgggtcacgcctgtaaccctagcactttgggaggccgaggcgagcagatcgctgagcccaggatttcgagaccagcctgggcagcatagcgggacccgtctctaaaaaataaataaataaataaaatataccactagcgtcagatggcttcaaattactaatgggatcagtgtgagccaacagaaatcaatgttctgcaccttgatcctcatggtgcctgcatcaggcccaacgtgggcagccagcatacctccctgtctatgatacttttatggccgtaactgagcacacattctaaaaataagctccttgataagttttgaagggaaggccagcgttaaagatacagagtggcagctctacagcaactgcgggctttatgtccagcctaagacctacagaagtggggaaccagcctaatgccagtgcccaccagtggggtacttttaggtaagggcgggaggggcctgggccatatggcttgctgacttgctgccctgcaggatgttaagatgttcccataatgaggcggttctggcccttgttcccgcagaatgtggtggtagttttttttgttttgttttgtttttgagacggagtcttgctctgtcgcccaggctggagtgcagtggcgcgatctccactcactgcaacctccgcctcctgaattcaagcgattctcctgtctcagcttccccagtagctgggactgcaggcgtgcgccaccacccctcgctactttttgtatttttagtagaaactcctgacctcagatgatccacccgcctcggcctcccaaagtgatgggattacaggcgtgagccaccacgaccccccgggaatgtggtgttctttgcactttctcccggcagaatatgataggggtgtttctttagttgcgcctttgtccgttttgtggtcaggtggttaggcaggatgtttctcacagcccgaacccctgtggaatgtttcactttgaccaaggtctgcaaaatagagggtgggggagaccaggcagggctggggaaacggggcagggcggtgggggggcaggatttacaaaatggtgcagtttggactaacactcctaaaatcaaaaaaaacatatttgcaccactaattaaaagtggcagagtttagaataaaacttggaggaggtcagacgcagtggctcacgcctgtaatcccagcactatggaaggccaaggcgggtggatcacgagatcaggagttcaagaccagcctggccaagatggtgaaaccccgtctctattaaaaatacaaaaaattagccgggcgtggtgacaggcacctgtaatcccagctactcgggaggctgaggcaggagaattgcttgaacctaggaggtagaggttgcagtgagccgagatccaccattgcactccagcctgggcaacagagcaatactccgtctcaaaaaaaaaaaaaaaaaaagtggcaaaacaaggtctggccaaagaaaggccttaatactaagtctagaaacttaaatgattaaaattttaaaagtgaaacaaaatgtaaagtcattagtatg

SEQ ID NO: 2778 - DNA, 4001 bp, Homo sapiens
tcctcaccaacaccgcattactgattactgcaaacgtaatcagagttatatctgagttgctgacagaatcatcattacagagcatttccgtaaacggacaaatgaaactaccaaggactttaatcacacacgaaggcaacggtggcatcagaatataaaaacaacaaaacaccatctttccagtaccactcccaagcacatacaacataatttatcctaaacgcaatgttaacacaatctttttgggaatggtaggagccaccttcttttcagaaatgcttcgagcaaaatcgaaaatctctaacctaacaacttgaaaaagacattatacagaaattacttcatcaactgccgttctttcttaccggcgggacccctctgtgtcttccgctacaattcttttttttttaacgccagtcaaatttagcggtaggggttgtatactaattttcgtgacactaataactattaagttctgataacccactaccattggaccagcctgagtataatttttaaagccctccaattgggtcgggggccgtggcttatgcctgtaaccccagcactttgggaggccgaagcaggagggctgcttgagcccaggaattcgagaccagccagggtaatatagagagaccccgcctctataaaaaataaaaaattaaccaggagtggtggcgcgcgcctgtagtcccaactactcaggaggctgaggtgggaagatcacctgagcccagatgtcgaagctgcagtgagccgtcattgcgccacttgcactccggccggggcgacaggggcgagaccttgtctcaaaaaagaaaaaaaggaggctgggcgcagtggctcacacctgtaatcccagcactttgggaggccgaagcggatggatcacctgaggtcaacagtttgaggccagcttaatatggtgaaactctgtctctactaaaaatacaaacattagcccggcgtcgtggcgggcgcctgtaatcccagctatcccggaggctgaagcaggagaatcgcttgaacccgggaggcggaggctgcagtgactcgagatcgcgccactacactctagcctgggcgacagagcgagactccaagaaaagaaaaaagctccaactgctaacccaagaggagtggctgaaacgccatcgcataaaattctcggtcacctgacttctgtcacaacgctccttcaaatacaccccagcatttctctttccttgggttcctaaatctggtttttgttaacaccactgaggacaaagccactcgcgatgtttacgccgacactttcatcattagacattaactgtaacccctacgggttccgtctctttctccacttactccagacaacgtttccccacagctgcttggctcacgcacattctggaaccccagcaaatcccccctcaacggggagcctcgcctttccggccacagggccgaagccggcctccgcccagccgccatcttacagctccgccgaggcggttcacaacatggcgcccgcccgaccgtcccgcgtcaggcggcgccgcttcctcagcggagggcagaagctccaagagggcggccggcctagcaaacaccgtaactacccccgcaggccggatccggcggcgacaggctcggccgcgcaggaaagaggggcgcgccgccactgtgcagcctgggagtgaagggagcaggcagtcgtcgcgccggggacggcgggcagcaaacaagcaggaaaagggggcatcgccaggcgcccgcgaggctcacaggaacggccctgtcacctagtccgctccctcctgcgtcttaccgtcctggacaaagactccaagtcgaaggagacaaagcttgtaacgcaatcacgggaatcacgcagctgactgcgtcgcgcaccaacaacaaaatggagctgacagctgctgcgtcgagactcgtctcgaaaacactgatgacgcagcgagcgcgtctccgccgcggggcgggtcatgcacggggcgagcaggcggaaagggcgggcgtgtcgcgcgcgcgaccatcgtgggcgcaggcgccagggagggaaccagagcccgctgtggcggatgaaaggaagccgtcggcgtgttgtccccactcactgatagtttttgaactctagaacaaggaacaacttgtgaacaaggaaaagtgagggaatcagtatacacagtagcatgtaccctgttagcgaccactaaaacaattgctttaaaactaatacttcacggcgcggtgggtcacgcctgtaaccctagcactttgggaggccgaggcgagcagatcgctgagcccaggatttcgagaccagcctgggcagcatagcgggacccgtctctaaaaaataaataaataaataaaatataccactagcgtcagatggcttcaaattactaatgggatcagtgtgagccaacagaaatcaatgttctgcaccttgatcctcatggtgcctgcatcaggcccaacgtgggcagccagcatacctccctgtctatgatacttttatggccgtaactgagcacacattctaaaaataagctccttgataagttttgaagggaaggccagcgttaaagatacagagtggcagctctacagcaactgcgggctttatgtccagcctaagacctacagaagtggggaaccagcctaatgccagtgcccaccagtggggtacttttaggtaagggcgggaggggcctgggccatatggcttgctgacttgctgccctgcaggatgttaagatgttcccataatgaggcggttctggcccttgttcccgcagaatgtggtggtagttttttttgttttgttttgtttttgagacggagtcttgctctgtcgcccaggctggagtgcagtggcgcgatctccactcactgcaacctccgcctcctgaattcaagcgattctcctgtctcagcttccccagtagctgggactgcaggcgtgcgccaccacccctcgctactttttgtatttttagtagaaactcctgacctcagatgatccacccgcctcggcctcccaaagtgatgggattacaggcgtgagccaccacgaccccccgggaatgtggtgttctttgcactttctcccggcagaatatgataggggtgtttctttagttgcgcctttgtccgttttgtggtcaggtggttaggcaggatgtttctcacagcccgaacccctgtggaatgtttcactttgaccaaggtctgcaaaatagagggtgggggagaccaggcagggctggggaaacggggcagggcggtgggggggcaggatttacaaaatggtgcagtttggactaacactcctaaaatcaaaaaaaacatatttgcaccactaattaaaagtggcagagtttagaataaaacttggaggaggtcagacgcagtggctcacgcctgtaatcccagcactatggaaggccaaggcgggtggatcacgagatcaggagttcaagaccagcctggccaagatggtgaaaccccgtctctattaaaaatacaaaaaattagccgggcgtggtgacaggcacctgtaatcccagctactcgggaggctgaggcaggagaattgcttgaacctaggaggtagaggttgcagtgagccgagatccaccattgcactccagcctgggcaacagagcaatactccgtctcaaaaaaaaaaaaaaaaaaagtggcaaaacaaggtctggccaaagaaaggccttaatactaagtctagaaacttaaatgattaaaattttaaaagtgaaacaaaatgtaaagtcattagtatgccgggtgcggtggcttacgcctgtaatcccaacactttgggaggccaaggtgggtggatcatgaggtcaggagtttgagaccaccctggccaacatgctgaaactgtctctactaaaaatacaaaaactagcaaggcgtggtggtgctcacctgtaatcccagctacttgggaggctgaggca

SEQ ID NO: 2779 - DNA, 4001 bp, Homo sapiens
ttcactgagcagctttgagaaaggccaggcaaggcacatcatcacaatgtcctgtgacaccgcaaccatggaactacaggcccgctgggaacactgtctcacaagaatgggaaatcagctgcacagtgggctggagagagcagtcttcatctgcagcatgtcctctcctagccattcagggggctgagataaacagccaagcactgcaatcatgaagctggcagagcagcgtccccctgggaattcccagttcctcaatgtgcattatctcactgcacgctcacagcatctcagagcgaggctcagacacttatgtgcttgctctgagcatggcaatcttctaagtgctttacaagtattcagttgccaatctctgtgaactggggtgggggggtgctattattattcccaccatatgaattaaggaaactgaggcagagagttgaagaaacttgctcaaagtgacacagctaataaatgccagagtttaaatttaaatacacgtggttgaccttgcgctcttaactgctccacaacgctgtcccgtaagcttggaaaatattcccaagatccatgggggcatcctcagggctcatctgtgtcacaggaggacatctgcctagcctgcgatcagaaagaattttcagtctctttctgtgggtacctgctgtgagtcagatgtttccttaatcaggacaacatcgcaagatgggaattgtacatgtcaaagggcaaaacttagagtagttgagtaacctgcacaaggttcatggccagtcggtaggtaaacactatttaagtctaaatttcttaaaccccctaaactcatgcattttctttttcaccccaagatccttgaatggtgatcatcagcaaataaaattacttcccagctgacattattttccctcactcccggcagcccctttactccctctgtactgctgttgggatgcttttacagcaagcatcgcgtggcttggtgtaggtctatgttccacgtcaggttggaagatccttgcaaacaagaatcttaaaagagttgcctggcatacaggacaccttccctacctgatttgtgaacggaaataaacaaaccacccaggcaagaaccggctctacagaccagcctcttggtccagttctctggtctgaagggttcagatgccacgctgggagctggaagcggacagaactcttacctcctccaaaacggcccgggcggcttcccggtccgggaagaccacggaactgggcaagtctggcaccaccgggtgcagcgggggctccgggacgggcacgacctgtgcgcagcccacctgcagccgcctgccgtcttgcacctcccagaggcgctgccacagctggccgcgcgggtcggcctcgaactcgcccaagtgcgggcgtggtgcctcctgacaggcgcccagcagctcgagcagcgcttgccgggtgtcagggtcatccagggggtcgcgcagcaggaagccttgctgtgcgccgccggcctggccgcccgggcagtagcagagcagcctgagcagctggcaccgctggaaggggccgcggcgcagctggtgcagcaggcgctggtgcagccgcgccgcccggacccgggccccgcagccggcgtccggggtcacgggcacgcacagcgagtagctgcgctccgggggccccagcagcgccgccaggcgggggtcgggggcgtctgcgtcgccgggggcgtcggcgcctagggcgaagtgagccagggtgcagtcgggaagctccaggacgaagcggcgcggcggagccatggccccagcgcagaccccgcgccgcccgagcagcggccccgacagtggcccgcgcaggagccggcgggcgaaggccatgggcgcctcagcgacgccgccctcggccccgcctcggaaacgaaacctggcgggagccaggcgccggcgggaaacgaaacccggagggagccaggcgccagcgggaaacgaaagcgaagcgttgcggggaaacgaaagccggaggcccaggcggggcaggagccctggggctggggcgcccttccggcctctcctcctcgccgcgagatgtgcgcgataaacggccggcgctcgggagcagacgcttggccccggggccccaggtgcgcggctccgcgggcctgcgcggtccccaggcgccggctcccggggctgacaccgaatgaggccccgcgccgtcggccccaaggtagctccgtgtgcgttctgcgggtggctggcggccccgaccctggtttgagttcctcctctgcggcttatgccgggtgcatggaggggggcgggggtgcacgcgcgagggacagagaagtcccttcccggtgtaacgggctcttcaacgcccacttgcaggcgcactactgcccttggatgactgaccaggccctgcagaccatgggctccctccccgacctcaactcctagctctgaccacgcgtccccgcccctctaatcctgcagagctgctttcctgcgggaacagggcgcagttctggctcttccctctcctgtatcttatctcacctgtgcactcactcacctgtgcacacactcacctttgcacacactcacctgtgcacaagcttttccctcttcttggaattgccctctcccttttgctgactctccaactgggaagtgtcgcccagattggcacctcgaaatcgcctttcttccaccaaattgaagtttcctgcactaaggtgaagtgtgtcaggatagcaccctctgcctgccacagtccagcatcagcactgttgctgcctaacagtgtaactgcctaacagtgtaacagtgtttgcgcagttatttggatattttattctgtgtttactcattaactgatgccttttaaaaatgatgtcaagcaaaccaaaaacaaacaaaaagataatattctccagggaaactctctcaaaaaaatagaattgagacgaagattgaaaacattagatgagctgaaagcagttttttttttatgtcttaatagtattggacttaaacttgggattatatttaattctgaaaaaaaaagtcttaacaaacgtgaaatatagataggtggttggagtgtgggttaataggctaagaagaaagaagaattaggagtttaaaattttttagctctttgagaatagaatagtttttattctttctcaggaatttcacttttggacatttagcatgtaccggtggtttcacgtgtatgtagtatatggaagtaagagtcttctagttactcccttttcttctctaagacagtactgcatcctcaagcctgcttgaccttttccctatgccatccacctctctggatgtattagtctatcctggctgccataacaaaataccacggactgggccgcctaaacaatagaaaatttgttttctcaaagttcaggtggccagagaagctggagatcaagttgccagcagggtttgctttttctgaggcctctctttctagcgtgcagaccgcctccttctctctgtgttctcacgggacctttcctttgtgcttgcatccttggcgtctccttgaagttccaaatttcctcttctgggaaggacaccagtcagattgggttagggcccatcataatgttctcattttaatgtaatcacctattgaaagccttattttgaaatacagtcatactgtgaggcactgggggctaggcctgagcatgaattttgggggacatgatatagcctataaccccccacatatctgggttagtagcctctcctgtgtcccccaccaaggctatttgtatcctcggaccttgacactccacagtcacgtgccagtctatttcccaccactgagcaccttgagggtaagtaggaagaccagcttcttcctaacttttctctgagcctccaactgaaagaaaacctgacacacagtttgctaaatgaagcatcttaccttttttaatttaagttttcctctctatttttcac

SEQ ID NO: 2780 - DNA, 4001 bp, Homo sapiens
tggtgcgaagcagggggagttcctgtccttccccctaccccaaagaacgcaaagaagctcccaccagcttagtgaaatcccatctgggtcctctgacctggccgacttttctacaactgggactctggcgtagaagacccagttggtggataccacacacaagtgaccatctctcctctcccggcccaaccacccgcgtcccccatgaattctcagcgtgaacgcacgctgtacattggactccgtgcccagacagcactattcttgctggttttcatgaatgaaagtgtgtatgtgttggggggagggggtggcggacagtgcataatgttaggggcaccgagctgtccactccgggatggagtctgaacccgggtgggtgccattcctgctgatcccagcctcgcccctttggaagatgtgatggggagcgtctgccgtcggggtgccgggcttcgctgcaagggactgctcccgccagcttccggcgaggcctgagccggcggactgcgtgtcagaggcacctggttcaggccaaagaggccggggcgccggctccaggtcctctaggttccagcgccattcatcctccctcacgcgccgcgccaaccggagacccccgctgcagagggccgaagttaaagtcccagctgcgccgctcagtagggagattacacagggagaaaaatgaatcacccggcccggggttgcgggactgcgagggcctgcgcgccaaggcccccaggggcgtcgggaggggccgcgggctgagctaaagagaaaagcctgacggctgggagcccggcgcctttatccggttaggggattgcagaggatcagagagcccgccgccccttctcctccatcaccgagcactaagccccgggcgtccgagatcccgggtgtgattttatcattaaaaaaagtaaccgcgcactcctaaaagaattttaattctcgcctcctcctcagcctacctttctctttgaatccccaagggaaaatagtcccctgggttggggggcagtccttcgccgctgccttcccccggccctgctccctccaggccactgactcaacctcccccggcgcggcgcggactcgagaagacgcggcgcccgctcccgacttggagccggggaagtgggtccttcccggactggcggtccggggacagcgtgacaggaggaaatgtatggggtggggtcgcggctgcaagccctacccgtccccagcgggagccagccctgctccttctgcctcccgccccgacggctcagcgggctcggcccagcgcggctgtgggacgtgagtaaaagggggtgcgatcggcttggggagcacggggagggcttcctgtcctttgaactggactggaggggtatgggagccggggagtgggagccgaggccgtagccgatcctttttcactttctctccagcccgcggcccgtttcagcaccgggggctgcggacagcgccgcgcccgcccctggaagcagcagcatccctcccctgcgtgtggttctctaacttacctcctgtatggggtctgcggccccagcacacctcccggcgccccccaaaaaattccagctcaagagcccctaaaaatccttaccctgccaaagtttgagcttctccgcggcgcgccagggtctgcggagcgcctcctccctcggcctcctaggcgcagttccgctcgctccctcccccgcgctcccggcccaggactctgctcggcgactgctgaaggagcctgtggcctccctctccgtgggaaagtaaggtgaggctctggagcctcaaaggcggtccgaaagaggcagaagtcattagttcacatccccaaccctcccagggaggacggggagagtcaggggcaagaaagcaaacaagtccgtcgttccgttctgggttctctcctaactgtgggcggccaccctggactccttcctgggatgttttgctggtagtgtaatccacactggatgagtaagcaacagagatctggggtttgaagtttaaaggtggggacacacacacacacacacgcacaaagtcttggacccgtttgccatcttagggaagatgttagaaacaagtttctctttgggacaatgtgtattctccttgcagagtttttgtttccttccatcacatcagataacatcggatttcctgaactaaaaattaaaaccaccaatccagctagtaattatttaacccctattgaagcccaaggaacttaaactctttttggagaaaataactttatttactaaaactcattttcctcccagaaggtgtacttccaagaacacacctctccatgaaggatgaagaccgaatcctgcctttccctcaccagcaattgcatgctctggttctggatcgcaggagcaggtcccgggaggaatccaagcctccttgcctgggacaagcctcttgggttccaggttctcttgactgataccctcatgggaagaaactccacaaaagcagatcccaccgcagccagctaaccagagcttctctgaggacttggagtacatggcatttcctagcatacttatcaaatcgcctgttaattgaacacattatctttagaaggcttaagttcatcgagttcatgcaatacttgaagggagagatgaagtgtatgtttttcactgaagaaataaagaattagaatggctcacacacacatgtgcatgtgtgcacacatgtcatgtcttaaaggggggaagtaaaacctagacaaattttcccccaaagaaaatcaggcttagtcgttcagattcaagggactctggtagtggaagagcaaataaatggaagtggtgaatcaacaaaaggaagccaaagccacagaagttggaagagaggagaattcttattttattacttgggcttctgaaaggaacctgaaattataataatttcaagagaaaatataatagatgagactttgcctcattgaggacttcagtattcttattccagggaatctccacgtgcctcaattatgaatctccacgtgcctcagttgttatgtgcattttttttatagttctcattgtcaggaaatgctttatttcttctaatctcattaatttatgcaacaagttaaagctgtttcctgctggcttgtcctcagggaagactggaagcagatgattattttctgttgtccagaaacatttcagagtttcaaaagaatcttaaatcctgattttggagtaaatagtagtgatcatgagatcattttaaggcatcatcctgaaaaatccccttggactttgtttctgaaatgcacatcattcctaagatttgaaggggaaaacaagacctcacagaattaatcaagaaatggagaagtgtcctgagtctgatgaaatgagatagagtgtttagcacagaaatgggcacatagttggcccctagggaatgatgtatgtggcaatagttatcattgaagaactttgggtgtctgaaaagtggaaacagatgaagagactggaaatgaatggaaagagactgaaggggatgtatctgtgaatttgcctgcaaaagtcatcgagctgcaagatcctaggctgccatgatggagggtccagatttggcccaatgctcactcaatggagtggcctctggggacctttccaattattgctcaagcttcaactgaggcatggtcgagtgtggaagggacagcaagattttgtgaagatgcaggatacagcaacctctgaataaattagtgggatgctctaacaggcccatggcactaagagaccaaggagcgcgattctcagaaacccaaagtcttttggtgtttgttagaatagggagaccacaggaagaagagagctatggagaaagcaccatctcctctttctgacagagcaggtgagagtgggaggaagggggtgggggccaggtgaatgctaagttgcttcagcctcagccaggacactaaggaagtggggaggggtctg

SEQ ID NO: 2781 - DNA, 4001 bp, Homo sapiens
aaattagcccggaatggtggggtgcatctgtagtcccagctactcgaaggctgaggcaggagaactgcttgaacctgggaggcgaaagttgcagtgataagagatcggccactgcactccagcctgcgcgacagagctgggagaaagggagactaagtcagcataaatggagttacttttggtgaaagcaaagtgttaagtttccctgactttaccgcagataagggattgacacctaaatacccttatctgcagtaacgccagggaccttaagaatgctctgaaggaaacattacaggtccagtcaatttgatattacatgtgtgcacacaacaatatcccagatacctggagactaccatcttttctatgttcttctagtttctatccaaaaatttggacctgctacaaagtcaagcacacagaaacactctgggagagggaaagagctgggggattagaggacaagcggacatacccctccctgcaaatggggggggggggctatcctgacgcgggggttaaagtgttcgctgtctaaaggattcctcccactctgatcgatggcctttaagtatttcaaaaggtcattccaagctgcaaggccaataccgtcttgaaaagggaccttagaggtctcactgctctccacaggggtgggaccctttccagaaggcttccataactctccaccccttttcagggagagggcactcgcacgggcgtcccctgcaccatgcccgggccgttacctcgcttgaattcctccaggacagcgtccagcttggtgtcgttgaagacgaagtggagcggatggttgtagaaacgagtgatggtgctgagcggcgtgcagtcttcgggatccacgaaggccaagtccttgaggtagagcatgtccacgatgttggagcgctcctcctcgtacaccgggatgcgcgtgtggccgctctgcatgatgctggccaggacgccgaagtccagcacggtgctggcgtccagcatgaagcagtcttcgaggggcgtgagcacgtcctccacggtccggcagcgcagcacgcccttgctgagatcgctgtaggggtcgccgccgccgcgcgccagctccagcacccgctcccgcagccgcccgggccgcgccgccagctccagcagctgccccacgggcagcgcgacgggcagagtgagcaggacggccaggcggctgaggccgagcgctcgcggcgccagcgccagcgtccagcgcccgctcacggcggccggcaccacctctcccaccaggaacacgagccccgcgctgcccaacacggcgggcaccgcacgctggccggccgcgcggtacagcagcaccgccagcgccgcctgcgccaggctggccagcagcagcagcgcgcccaaggcgcagccggcccagcgccgcgcgggctccaaacgccgcgccgccgcacgctccgcctccgagccgctctcgcgcagcacctgcacctcggcaggcgccagcgccagcgcgctcagctgcaggcctcgcgccagcgctgccagcgccagcagcccggccgcccccaggcccagagcccagggcggcgccgcctcctcagccgccccgccacccggctccacgcgcaccgccagcagcgccgagtgcgggcgcacggcctcggcccgcaggcgcaagcgcagcagcgcgcgccactcgcccgcgggggaggccgcctcctcccggcagcccgccccctccggggccacccaggaccaagagctgttggcgaagcccgggccgaagaggcgcaggaggaaggtggcgtccggcgtgtcccgcgccgcccctccgcgtacccaacccgcgcccgccgctccatcctcctccaggcagaagcccagcactcgcgggcccggcgcggcctcccccgcggcgttgcccaggcagagcgcggcgaacaaccagcctaaccgacccgccgcagctaccgccgccgccatcgcctgctgccccctctcggcctctcgcgcagcctaccccgctcgccccgcgcctccccgggccaatcgttacggctcttcgcgcctcctcggccaataggcggtgggcgggggcgggccccagggtcggactaggctgcgccggggagtaaacaagtggcggccaggggcgggccgggggcgtggggctccgggccccgccgagtctgctgcggctccggatgcgcggggtggcagtggccgggaggacgcggggcggcgggcagggcctcccaagcccggctgtcctcggcccgtgcgcggcgcccggagtcccactcctcccgatgctgtcccccgcgcccggaggccgagccaattctctgggaagttcccggcttgggagcggagcggccggtcggaagaacctcgggtgctggcgcgcctgaagttgcagaccagactgaaatgtgcgagacatgtgcctttttcttaggaaaggccccaggtaccagaaaggttttcagcgcgccgacctacggggctaagagggctgaaataagaaccagtgactgagcgccgggaggtttaaggtttatggaagatgttcatcgcgccgtaccctactagaggtttggggacgtgggacacagcccctgcgttcccgccgcggaccccgtgataaatacacagacacacaaaatcactaccgccttgaatctggacagctacctcaggtggttaatatctaacaggagcagagtggagctcagaaagactcagcgtgggtgctgggttccggcgcgaccagcctgatacctaggtcagcatctcagccacacaagcaggcggcagttctgtcaggaattactacatctggtgattccacttctcatagctcaccgctgggagaataattcctcaggattaacaagatctattccagaggatcctcactgctgaagcgattttagaagacagtgtggtctgttgacagtatggaatattctttacccatcagatatgatctgtatgtgattggaaggaaataaaccaactgctaacaacacttctctatagatgttcagattcagtaatttttgtatttttctctacacttttgttttttcaaatttcctagcacaagaagactttgacttactgcacatgtcattttaaatgacctttataaagactctatagaaacaatttgctatgtcatgaaagtaacaatcaaaaaaagtatgcacattgtggccacaaagtaaaacttgtgtggaaggtaatgtgcaaaaaaaaaaaaaaatgagtaagctggtggtgagtgaccaaaggaaaaggctttgtaaaaaacttttttttttttttttgagacggagtctcgctctgtcacccaggctggagtgcagtgacgcagtctcggctcactgcaagctccgcctcccgggttcacgccattctcctgcctcagcctctccgagtagctgggactacaggcgcccgccaccacgcccggctaatttttttgtatttttagtagagacggggtttcaccgtggtctcgatctcctgacctcgtgatccacccaccttggcctcccaaagtgctgggattacaagcgtgagccaccgcgcccggcctgtaaaaaactttttaaaagatggtaatagctggccgggcacggtggctcacgcctgtaatcccagcactttgggaggcggaggcgggcggatcacgaggtcaggagatcgagaccatccggactaacatggtgaaaccccatctgtactaaaaatacaaaaaattagccaggtgtggtggcgtgcacctgtagtcccagctactcgggaggctgaggcaggagaatggtgtgaacccgggaggcggagcttgcagtgagctgagaccacgccactgcactccagcctgggcgacagagcaagactatgtctcaaaaaaaaaaaaatggtaatagtggcccggcgcggtggctcatgcctgtaatcccagcactttgggaggctaaggcgggcacatcacgagg

SEQ ID NO: 2782 - DNA, 4001 bp, Homo sapiens
tgctgggccacaagcacacttttgcttctccactccggttctctgcttgcggggttccctctgcctcaagcagcaagcctctctaccttttaagattctcctcaaatgctccttcccctgtggattccccaatttcccagccccttcctgactccaccccatactctaaatctccatcgccctggcctcttttcaggcatctgtcttactctgtcttgcttcaatagctccctgaggtcttgctccagccctccaagggagcgagtatgtcttattcagctttgattcatcaggagcacacagcacactacctggcagacggcagacacttgagaatgggtctaccgctccaaaatcgttcacctcagaagcataggaagcgataggcaaagggacacagagtcacacaaacagaacactaaagccagcagacacaaaacacgccaggggaaaagaggcgtcaagaggaaattgaaccaggggaactacatctggccttacccttcttgaactcctccagcatggcatccaacttggtgtcatggaagacaaagtgcaccgggtggttatagaagcgagtgatagtcttgaggggggtgcagtcatcggggtccacaaaggccaagtctttgacgtagagaatatctacaatattggactgctcgtcttcgaacaccgggatgcgagtatagccgctttccattatctccgacatggtgttgaagtccaggatggcatcgctgcggatcatgaagcagtcctggagctgggtcatgatatcctctacagttttggtccgtagttccagggcaccctggatcatattgagctcctctttcacgaggtcattatagggctccgtcaccttcaacatctccatcagcttctcccggttgtaaacagtgcgaatctcctggcccagaaaaaagtccaggagcttgctaatgggaaaactgagggggaaggtgagtagcataaagaatttggtgagaaggatggtgttggcacccacagccagcccatgtcgggagcacagggcctgaggtaggatctccccaaagatgacaatgccaatggtggaggaggccaccgccatgaggccggacccgatgaggttgtctagaaggattgtgagggaggtgttgaccagcacgttccctaggagcaacgagcagagaaggtagttgcccttgcgccggatgggctcaatcttgcgggcatagcgcctctccttctcggtgccacagttctgcacgatgcgcagctccatggggtccagggccataagcccgaggttgaggccagaaaatatgcccgacagcaccagcagcaccgtaattaggagaatgtgcagccagagaggcaggaacctcccaggctcctccaccatgaagagcagtgagtccttgtccgtccacttcagccagggcccgtcgggctgggcccgggtgcacagtgcatacagcttcatgctctcgctcctccggaggaacttggtgagcaccaccagcacgccggacgtgttcccgcggctcacgttgaccagctgctggacgaccaggtccttggtgagctcgaggcagctggtggacttgtggagggtctcggcatcgtccacctcggtgaaggagatcaggttgctggagatgttgcccaggctgtagccgtacagcctcaggttcacggtgctgccctcggacacgaagatgatgccatccgggttcgtcccacacgacttgttgcagctcgccagcctcatgcccacgatcgtgccctgctgggggctgccctggccccgggcccccagcgcccacagcagcaccagcagcaccggcgccgccaggaggaggcgcccgcgggccggtccgccgaccgggcgcccgcccccgcccaccggcgccatgttgctctggctctgccgccgccgccgctccccgcgccacgccgcgcggccccggtccgcaccgcagctccggccgctccgctgccgccgagccaactgcccgggccgcgagcctgacgtcaggtcagcgccccgcccgccccgccccgcctgcccacgcccctcatttgcattggaggccccgcccccggggctcgctgcttgagcgcccgcccttaagggggtacagtcgcttaaggtggagcagcgccgccgcgcgagagccgccagcgggtacccgcccagtgctccgcctccgcgcccttccccgcctttctctgccagtggggccagctctccttctccgggacctggtctcctagctacgccgttcctgttcctcggcctcgcacggccgcacgtgggaggctcctctcccgtccctcacctgcagctaggggtggcccgctctgcaggcagggcgagaaaagtgcttttcctgatgtagaaaaagaaaaaggaaacctgagggcttaggctggcattgcagcctgccccttggagacttttctggcctcctcactgctgagatttttgccgaccttgtcctaaggccagaagtaggttaccccagccccagccccagcccgacgatgcttccatcaaccagtggctgcctgatgtggaaggcaaatctggggaactaaggttatagaaggggcaggctctggcctagacttctctcctgtctcttccatttaggcatagatatttattgaacacctactttgtaccaggcacttgttctaggctctgacaatagagcagtgaacaagccaaagtcgctgcccattggggtttacagtctagaacagaaaacaggagataaacaagtaaacacatatattcattaaatccccccaacaaccctcagagttagtagaattatttccatttagagatgcagaaattgagccgagacaaaaatcctggtgcctccatactgtcatctcccagcccatttctccatctgtaaatgggggtaagaatgacagagcattacttcgctaagcttgcgggattgtggacctagacattgaacatgacaggacagctctttagaatattctttggctaggtagtagttgttgctacctgccttccaggaccaaactcctaaccccaaattgtggtgattgatcagctgggcagctgcttgtggacatgagcaggcaggcgcggcagtgggcctatccctgaaatgactgcttcctgaatggccctagccctgtgtcagtagggtgtataaggaagaccacagctgcccgccctgtgagggggaagaagacagacagataaacatccttacaataattgcacaggtgcacagagaagatcaggtactgggttgaccaccaggtctcacagcaaatcttttgccagtactgaagacacagaacccactttactcccttcccgcactgacacttgtatttattttcattttggtgtaatgtttgctaataaaagcagcaatcagtaccaaacggaaggagcctaaacagaaaggatcacacaatgttgtgggaggaggtgtggtagcagagaggccctgactcaagaaagccctgttagctgggattgagggttctgtaaactaggccagcctggagaagtatgttgctagtaggggccccactcatagcggatactttgcagtgagtgcccagcaggtcagttttttcgaggaataggagccttggaatgggcactggctgagacagaacaaaagcagaaccttgactgcctgttccttccctgtctccaccaaccaggaagagctacctgaattgcctcaaagcaaacccagctctcctcatctcctagtgagctgtaacaccagcgccctgctccacccctacccccacctcccatacttagaaactttcccattctattatcaatcaattggctattttttccctttttcttatgattttatttttttctctattatgtcttttttctgcttaagtacgaattggctccttttattttacccttttcaggctgtctacactcagaagctctgttcatatgcactgagtctaatgacaga

SEQ ID NO: 2783 - DNA, 4001 bp, Homo sapiens
gtctgtgtgtgtgtgtgtgtttagaagctgtcaccctaactcactgcagcctcaaactcctaggctcaagtgatcctcctgcctcaaactcctgagcagctggggctacaggtgttagccaccccatgcccagcaaattttttattgctttgtaaagacaggatcttactatgttgcccaggatggtttcaaactcctggcctcaagcaattcccaccccccaacctccaccacttcggcctccaaaagtgctgggattataggcgtgagccacctagccaggcctaggtggtgagttttgaccacaaacctgtgttacattcactttctgggcagtcacaagcttcttagaagcaggttaagtacctgtaccctaaaggcatctcaggccaatacaaagggttgcccttcttagataagggcactacaggacacctatcagaagatcctgatgggatgcccggcaggaacactaactagaaacgcggccctcctgtaccataaaaacaaactcctggtgttacttcaaaatctactgcctagccttgactcactgtatagcaggccctacctatactggttaaggaatgtaagatcaagctgtttcctatctctgtgtgcttcctccactacactggttcctaaatccttcaggtcccgttgtcaacatgccatttttcttgttttctgactgcaagtcttctcgcaaagcaaatccacataaagcatcacctgcttgagcttaaaaacaaaaaaaaatgcagcctcgcatctaacctactagtttgatctcaccaatgccacacaatagtaaatacattttacataatgtataccacgtatgcactttacataatgtccagtaagtcatgtgtttccaaacgcgagatcatcaatttgagactttctatcctctgcccccatccctaacaggctaagaaaggcggctgcaaagtctttaaggtgtttcatgtgtatttccgcccaccaacttcttcagcttcttaatactgacttccacgtactcctttgagactaaaaaccggggacagatccagtcttatcattggttttaacttcacacaccacagacgggttttcgaagaacgaaccgtatttgagacactaaacatgtcaagacctacactgagctgtatgatgtgatggggtgtatagagaaatcattttcggtgtcacgaacttgcaattaagctaccacctctccattctttagagttaaggcggggaggagtgaggggcgtgggaacgcagagagaggcggaaaaagaggatgatcatttcacagggatagttaatttccctttcaggtgagttcccagcagcgcaggtggaaagctgcggaatctaacgctatccacacggcacagctggcttcaggaggtacctgagagcggagggcggtcgggttcctggccgccgcgggcgggcggcgcggggttgagcaggtgcgcgaagctggcggcgaaggggttggcggccagcggctcggtgcggtacatctcccagagcaggtagagcgccgtgaggcgctgcgccgcgctaggcagcaggtcgggctgctggagcagcatgacgagcaccgagcccaggcggaagtggtcggccttgctgaagtagtggtggaaggcggtggacaggccctcgaaggtgctgccgccgcccgcctcctccgatatgatgctcagcaggctcgagagctccttcggggtcaagctcatcctgcccgcggggccccccgggcctccgctcccggacccggggccgcttgctccgcctctgccgccgccggagcccccgaagccgctcctggacgccgaccctgccgcttcccgggaccctctttgctccgcggcggtgagaagccggccagacgccgcgctcgcccctccgccgggcatcaacctcgctccccttcccctcttcccggcccgaggggccctggcgccggctcgctccgtccccgcggccgtaaagcgcgctgttacacgacagcgtcgcaaacaaaacacgtcggggaaaccagaccgccgcggagagggacagcgcccagcgaaagcgaggctgatggagcgaagccaggaagaggatgcggagacgcggggtaggcggggcgaattggcaggaagcgggggcggggcccgggaagggaggggaggggcggggcgaggtcgggctggtggcgttcagggttaggtctgccgaggtcccgcggcaggagagcccggggactgcatgcgtctgcgcagctgcgaggttaagccgccctttggcggtccccaggacggttcctggtgccagacggtcccagtaagtgctgtctacgttattatttggaagaatgcacctcagatgttaactattttcttaatataacatccgtaagtattcgtcgtaaaaagtattgtaaatgcaggccgggcgtggtggcgcgtgcctgtaatcccagcactttgagagtcctaggcgggagggtcgcttgagcccgggagtcccaggctgcagtgagctgtgatcaccactgcattgcagcccgggcgctctgtctcagaaacattttttttaatttagtaaatgcaaatataccacacatttcacataaccacggttaatttctagtcttacactcattgcagaaatggaatcatactgcactatgagcttttttgtacatggttttttctcttaacatgatttcgagaacatgtctccagttaatattcatttacaaaattgtttgctgtgccacgttttacttagattgccctagggcacttatcctgggcacttagctgtgcattagaaacccacggggagacgttacaaatacctagttccacccccagagatgctgattgagatattaataaaccccacctcttcaggtgagtctgaggtgtagtctgggctgagaaccaccaggtggcatttcccagacttgcccggtccctaaacctacagaaacgtacgcgtatttcgccagtgattaccaccagcgattctaattatctagttaagagccacctcaattcttttttaaaacatatttttattttattttatgtgtttttggggagaaagatattttatgtaaaaaaaatttttttcatctttttaaaacttgtatttcagtagttttgggggtacaggtggtttttggttacatggataagtttttagtggtgatttctgagactttggtgcacccgtcaccagagcagtgtacgctgtacctgtcaggcctctgagcccaagcctgcacatatacatccacatggcctgaagtaactgaagaatcacaaaagaagtgcaaatggctggttcctgccttaactgatgacattaccttgtgaaatcccttctcctggctcagaagctcccccgctgagcaccttatgacccccgccccggcctgccagagaacaaccccctttgactgtaattttccactacccacccaaatcctataagatggccccacccctctctcacttccctgactcttttcagactcagcccgcctgcacccaggtgattaaaaagctttattgctcacacagagcctgtttggtggtctccacacggacgcgcgtgacagtacccaaaatatagtcttttatccctcagccctgtcccacgtataccccctcccaccccagagtcctcaaagtccattatatcattcttatgtctttgcatcctcataacttagctcccacttagaagtgtaatatttggtttgctacctcaattcttatgaaaaatttaaggaagagaaattgctgggtcaacaggtgtgatatctactgaattttaaaggcttcttcaatttactgctaaattgcacttcagaaagatcctgccaattaacgttcctaacagcagcagatataatgtggtaacttggggaactgattcaaattagctcaaaagtactctcataaattttttattatagggcctgggcaaggtggcttatgcct

SEQ ID NO: 2784 - DNA, 4001 bp, Homo sapiens
gtcttaccatggagatcaggaacaagtcagaggatgacacatgctgcaagtagtctgggtttcggtgccggagccgttcaatgtacaccagagccagcatcatagcacatggggagatgcatgcctccctgggtggtagaaaggatcactaattaaacccaagggtccttcagctcttgcaagtcttatgatgctcgttcctgtctttacctcttatctttggaaaaaaactattcctggctgggcacggtggctcatgtctgtaatcccagcactttggaagaccaaggtgggtggactgacaccaggagtttgacaccagcctggccaacatggtgaaaccccgtctttactaaaaatacaaaaattagccaggggcggtggtgtgtgcctgtagtcccagctactggggaggctgaggcacaagaatcactggaacccaggaggcggaggttgcggtgagccgagattgtgccactgcactccagcctgggtgacaaagtgagactgtctcaaaaaaaaaaaaaagaaagaaagaaaagaaagaaaagacgattcccctttctctagggcccaaacactctcatcctatcctcatttccaggctcaccgggacacatgagctacatatttcttctggagtcggcgaatagggctgggggctgccttctggagcagttcgacagcaatgtctgcaagggacagaaggaaggccgagtgagcaaacaagcacccacacccaacacaccagtccccactgctagcagaagacccagatctgtattttctgaggccttggggacaggaccatagtaacaaaatagagatcaaattctcacacactgagacaaaaagcccattccaagttcgaatttcagctcattctaacaggaaagcttattgccctgtcacatcaaactatccagatttatctgtcactgctgttcatctgtggcataaacatgccttgtttacttggggaacatatgatggatatccttcgaaaattagcttttcaatatataaatcaagagtgatttgtatagatatatgtggcagcaatgttttttattcatttgggctaaaagaatgggaaatgcaaactgccctcttgaaccaagtaccaacgagctagcaatgaagagacagtgtagccacggggcaaacctcgagccattttctgcctgatgacaatcccattttcatgcttctcacttgtccagtcacacaacactgcctaacctgccaccgggctggagagctcctccaggctacagtcggcttcccagtcccagccatagtagagcctccttcggatccgggcactcagcttctggtgtcctgggaggaactgaaacagggcaggggcagcggagggtgaagggcacggaaaggtatgatgcagatcctggctctgggctggaaggcggggcaggggacaggccggcctcgctgctagggggcccgtgccttacccagacccgcgttctgtaaatcgcttgccaatggcagcctggtccatagagggaggaatgcccccacccccatcgagggttccccgggagaagttctccgagaagggccctcgtgtggccacccctacgcccattcctatactccgcggctctccctcccggcccaagcagccgcggcctcaaggaagcactgctcgagcagctgccgcccagtcccggcacagcagtcaggcgagctcgcagcgccgctcaggccgggaggggcgcgccgggaggccggggagggggcgggacccccactcaccgtgaagtcctggaagccggcgagggagaaggtgccttcttcgtccagcaggagcccggtcaggtccatcgcgccgccagtcgccgccctgcgaaggtgaacggaaggaaacgagttgtagggggctcgcggagctgtccttgcccgcctgtccacctgccagcctgcctccccggggcgggccgccgtcctcgccctcgccctcgcagctccctccccccggcggcggaaggcggggcccgggctgaactgggcgcctcttcctgttccgccccgggcttggcgcggcgcgcgggggccctaggcccgggaagggaggtgtcaagcgtccgtgcgacgctcacctcgcggagcagaaaggagatgcggctgcgaggcgcgtactccgcctgtgccgcgtccgcccggcgtttacaagccgcgggggtgccgcctgcaagtcagcgcctggcacttcctgccgcccatctggcccagcctcccgccccgacccgcgggcaggaaccggactcgaactcctggtctcacggaacgtggccaagccccaggcgcctctgagaaatggggacaattcgtaggggggaccacgccgcactgaggatgaacaagccaggcgtagcaatggagaagttaatgtgaataagacgaaacgcacaacaggaagttgttcccagttgctttttaggagagatattatacatactcagcaatgcatatgaaaagcgtctgaaaggacacacaggaaatttagcagtgggtgaactatgaaaaggaagagaaactcagggtgttttttttttttactgtaatttgaacttttaaacctaaggctactgaggaaattctgtgatcttaagcgaatgtaaggcctcaaaacgtgtcaacacgtccacccaaaagtaaactgcatctacccaaggttttgtgttgaaacccacctcccgcctccgatctcatgcttgagtaggccgaggtgggaagaagctccgatatgtggaagtgggaaagtttaaggagataggaaagaaacaacttttctgagtagatgttgttttcgagtctgtcgagtcaagcgctggtgtgtgtttgtttacccactgaggggagggaactgggaggaccagtgcgttgagggttggttgagtaatgggacggccaccgcccttcccgagcgagcagaagcagaccctaccggggatactgggaatctggaagcccacttcctgccccacacggggataccggggcagcaccacactccctagccgccctgcctactgtgggataagaaaacgggctcgactgcctggacctagacccggactcggaacccggggtacttcgtcaaccagaaaacgaacctgtgtaggcgcagtgtcagcggcagccgccggggcgcatgcgcggcccgccctatccgggggggggggggttaggccgcgtcacgtgacgggctcagcgctccgcagtcacgtgacgctcgtccgcaacctctgctgtcctccgcggcgcccccttccgcctgacgcgcccccggcggcggccgcgcagccctggctcctcgcgggctcgggcggcggctgcggcggggctatggcgagcggcggtggcgggggtaacactggcgcgggtggggggccggggatgggcctgagcctgggcctgggtctgggtctgagcctaggcatgagtgaggccaccagtgaggcagaggaggaggcggccacggccgaggcggtgggacgcctggccacgacgctgtggctgcggctccgcggctgggaggcggtgctggcggcggcgcagcggttgctggtgtgggagaagccgctgcacagcctggtcacggcggccgcgctcaacggcctcttctggtaacggccgcggaggagggggcggggccgggatgagcgggggagggaggggtcgagagcaccattcccctttctgggttatcacttggcctgggggcatgacccatccccagtttttgcaggctgacatccgcttgaattgcccatttttttctatctctgagtcgtgagtcgcgagttaggcctggaggtgccattaccccatcagtaggcgcctttccaccttctgagatggatgcatgagcctgtctcacccactcactgctgaggtgcctgtctctccctaaggttgctgtcttcctcgtccctccggcccttcttcctactcagcgtctcacttttggccta

SEQ ID NO: 2785 - DNA, 4001 bp, Homo sapiens
ggataaggttggcaggaaagaagggaaaggaaaagcctggattatatccaggtgcacagaacactgggaaatgtgagaataaagggtgcatggagctgtgggggatgctgacaaatagatgaatcaggagtaccagaaaccatccagatttggttctaggtccttgcaccttggaaggctaatacaagtttactgaattaaaacgtaagctataagtagtatctgatgaattcaaagtccttccacccccgcaataatgcccaccatatgtagtagatacaataaatgctggtttattttctctctgcagactagactttggtaggtagaaacgagaggtaaaggggctccacccgcagttcttccgggtaggctactgcatgctcccacacactttcccgccagaggtctactgggtgcattatccagcggtcgctggcaagaaatcgtccctgccatggataaaccaaaaaacatcctcttgctgtggggatgttgctaatcccaggcaccatcaccagcctgaacagaaaactcaggagaaaaagaacagcatacggcatggaaaaccgtgaaactaggccagagaaggggcggccgctctcttactagtgtctgctgctccaccccagggtcccagccactgaatggcgaagggagtggggagcatccctcagggagccccagtaatcacccctcccctgcctttccacctcattcctcctttctccctccttcagccttgcgggcagaccctgtgggccgcctggaccgcgcgcaggagggctgggattgcggtggctgaaccctgcggacctctcccatctgctccaccccgaccgcctgcggttccgcgcccaaggctggacagaaggcaggagaaatttataagaaacagacaagcaaaaaccctggcttcttgtcactgattttaaagaacccactgaggtcactgcgatgggtggagggaagcgagaatggaggaatacaagccaaagggaaggaaggggacgaaggcggacagggagtgacctcttcctccaacccccgggcccgctgggagcggcgcgaggccagaggcccttgagaggctcgggctgtcctgggggcctcagtcctctgcctgtaccccatgggggaccctgctgccaccaggcgccccgcactcactcgacctgcagcgtgctgggtttaatcttcacctcaaccttgtaggaggagccggtgagcagcttgatggtgcggttctggccgaagcgctgcccgtccaccttgtaaaagaccgggccgtcattaggctggatgcgcagcgcgatggagaggcgcacgaggcccggcaggtcccccatgtctgggcgagggtctggcgcggcggctccggggggcggaggacagcgccggctgcggccgagtggctggagcgcgaggggcggagaggaagcgcggggagggtgagggaggtggtggagctgaggctgccgctaggaacccgcgccgtcgccgccgtccgcccgggcttttgaggagcagctccttaggctgtggcccccctccccactcggcgaggaagcgggcccaagagacggctccaaggccgcgcgcttccccatcccccgctccagtgctgcgccctccacgcacccgaaggctcgctctggcccgcaggccgccgcgcagatccgcgcagctgggggcgagggagttaatcctgtttacgcaccacaatccccttcagctggggaagcggacatttaggctcctcctagaacagccccgggcaggaggaggagaggtttgggaggcactgggaaggcgctggagttaagcgaccactatgccaaggagcgagacccccggaatctggataccgcctcggccagctacgtgaggtggacactgctgctcgcggatccggcgccagccaggcgggaggaggctgagggggggtaaagggaggcgggaaggggggacaggaaaccgctagccggtgatttaaatttcaggaaatatgagtctttccaaagcttaggggaaatggccgaggaaaggcgcaattccacgtgatggagccacgctggatgaggaatggatgcaagaggaagaaaataaccatattcaaggagctacatcttcttgtgggtgtacatttccattatacgtatgctcgtcccaaaaatgacacatacataaatatatgtaatgaatcacatatatttacacagattttgaagggtgagctattaaccctgtaaaaggcaactgacatgagcctaaggcattctggtgacaaaatggccaagaggtgggatgggtcaaaggattattggcagggggccatatgcgacaccgcagagtttagatttgcatattaagcgtgattagacagttttcgtggcagaggtcggtagacagctgacttttggaagcgaggggagactcagggggtgaggactatactgggaatggcttcccggagcagagagagcacctgcttcagcaccacccagatggatagtaccagagccagggagcacacctgggaaatgaagtgggctagtgagaacaaatgggtagggatgcgtttccttggcagtttttgtttacccaagttagactgctcttttttaagaaataataagctatacatataatatatatgtaatatgggtgtttattgcaacattggttgcaaaaataaaaataaaacctaaatgaaatgttaaccaataaataaatggctgaataaattcttatatacccacactatagaacgttacacaactatcaaaataatgaaatataggttgcattggcaaacacacaggcaaaaactgttaatgataaaagtgggatggctgggaaacaaagcctgagggcgagcattttgtctgttttgtttgttgctgtttccccagcatgccaaaatagtgcctgacacatagtaggtgctccagaaatcgttgttgaattgacttacggttgtggtcttaatcatgtccatatgtaaattctttcacatctttaaaattaattagatccttgcgatttacctggaatgatgaaaagaaatctaattgcaagtagcatctctagtgttttagaaaaatgaaaatttaaaaagaatataaatgtgtatgtttgtattagctcttttaaaagaatgagagagttacacagtaaacttaatgttggttattatggtttatgagtagtggaaagagggtgagtatctttttggggtcatttaaaagcctttttggaaattttgccttttttcctcaaccttttgtttagcaaccccacaatctcaagccaacttccacctgtgtatcaaaaagagcattggacctggaggatgatgactccattttaaaacctggttctaaggccggcatggtggctcatgcctggaatcccagcactttgggagaccaaggagggcagatcatttgaggccaggagttcaagaccagcctcgccaaaatggcaaaacctgtctctactaaaaatacaaaaaattagccaggcgtggtggcgcatgcctgtagtcccagctacttgggaggctgaggcatgagaatcgcttgagctggggaggcagagcttatagtgagccgagatcatgccactgcactccagtctgggcaacaaagtgagactccatctgaaaaaaaaaaaaaaaacccacacaaaaacaaaaacaaaaactctggttctagcctggctaggtagtgcactcttgcagtccccactacttgggaggctaaggtgggaagatcacttaagccgacgagtttgaggccagtatggacaaaatagtaagactgccatctcataaataaataaaataaaaaaaacctaactctgccactttttagtttcgttatgcaaataacttaacatctttatgtttcatctttgtaaaatgaggattaaaatacctccttcccaacattgtgagaattgaatgaggaaatggaaattgtttgaaaaaaataaat

SEQ ID NO: 2786 - DNA, 4001 bp, Homo sapiens
ccagcgctgtgccttacctcctcttactaaccacttagatctttttctaaagcaccacgggaacaattccacagaagaagaaaaagaaggaggtggaagagaatgagatgaagaagtaaaagaaaaaaactcagattccaacggctcctacatattctctgaaataatttctaaaccagggccctttggatactcccttagagaggatgatccctttagccttcctgtagaacacaaactttaatacaatcggtataaggcattatgactaactatagatgctggccctccaaaacttccgaccacagacagaaacactggctcagttgtgaacatttttctatacaccacatttgtccaattgtcttcccttgagacataactccggggataaatgcacagggtcctctaggacctaactgggtggagagtgaggtagaaaggtccctatgtggtaagtaatcttcctactgttctctaaccaaccatgatagtgcaaattacaaaaactaaaaagtaaaactgttccaatatgggtaatatttctgagcttcatgacagggataagggatatgggagcaagcccagaaacttgagggaccttgataaaccatctttggaaacaacacagatggcttaattgcattctttctcatttaggaagtcccagagctggaaaaacttccctttctctgcctagagaggcagctgaggaattgagcctgaacctctcatagctccagagatttattcaagtttgacggactggattctttaaatatatagtgcagttggtggatccccgggagcccaggcttcttgcctattaaattaaatgtcctacacttgccgaggttagagcttggacgacagagtgtacacttagtgcatactcattagtgttcacaggcacaaagatttttggggtggggtatgcatcaaagctcttcctcctgtaataggggcagccattgatcttgtggttaacaacattggtccatgactcttaggccaaaactcccaatcctgttaaaccggtgcccattggttgcaagataccccaactggagccttctgcctagggcagaacgcagagccacgtatcgtggggtgcttggtatactgcaaatccgaggcactgcattcagagatgagccactgtcaccgagcacggtggctgggagcatctccatcccaggaagctcagctcccagtgcattctgtctgaaccaggggcccttctccggaaaaagcactggctgagatcaggcaggcatggaacgcggagctagcaggaggttaagggaagagaaacctttccttatcccttgaactttgcgataacggaagaagggaggaaatccagcacggttggctcatttgagctctactaacttttgggatggttggagtgatggaaccacactgatcagcattttttttccgtttcctttgcccaaagcagacacaatcgagtacgcttagatagttgattgtctttctgaatgcgatcgttttccacctcaccttcccgcccccagctcctcgtactcacagtttgtcgctgttaatcctaaatgccacaagccagagaacagcaaagtcaaaacgctggtcagccgtggtaaagaatccatttcccccgagtgagcggtccctcccaatcgaatcccaaattcgcagtagccagccgcggcttcttctcgctgtctctctcctctgcacagcctgaccccctcccacccccgcttggagaggcactcgctctttcactccatcccgtgcccagacgctccaccgaaaccgtggcgggggattcttcggagctgcagctggggctacggtccccgcaacagccgctagctggactcgccttcctcgcccgcctcttccttctcttcccccctccttaacggtgcaaatccaaacccaattagaacgacaggcgccggagctcggtggacagccaaatccacctcgtcgggcgcgagagctggaatcagcacccgggtggcggacagctccttataggcgagcggggccgcgcggcaccgcccccagccaggcccgccccgcgctcgcctataagagcagcctgggcgggtctttgccccgctcgggcgcttttcctccaggaagccaagccgctgcggtgcgctttggctacctgggagggaaaggggaaggaaattctctctaccccccggctttctcttcccttccccccatttgggaaacgagtagaggtattgaaatttaaaggagattttcaaaggccgctgtcgaaggatgctaataggagttgcaagacagacgcattaggaagagggaatttcccacggaaagctttgtaatgagctaacgagacgcgttcccccacctcacctttggaggggaggggaaaacagagcttgaattacgcatttaatttcccctgcgctcgttcccaaatgggaaaagctgatgggtctcgataggatcgggatttctggtttcaaggtttaacgttgtgcgcgctcccctgcttgcagaccccgcagctactcccaccgcacatcctctcgccggtcttcgcgtctgcgtctccctcccgctgttggcgcgttgcttcgggcaagtactgcaaggtgttccggggctctggattccaagcccaggtggttcactggcgtctcagggagacggagagaggaaagacacatgggtgtggtagtgatgagagtcagggtggaagcccgggttagctcgtaagaatccaaaatataagggctctgctggagggatttgaattttgaaaaagggaaagaatgattttggtttctttctagacacccccgcttacaaattttgtttctgtttttggcttctagtatatatctggaaactctcctgctttatcataaatcaacttattttgtttttattggaagctgtcagaaagctgtcaaaccttaacaaaatgagggaccataatgatttatcctatttgaagcttacaattaagttagggttgatgaactctacctgcttcagaggaatttgatgtcttcctctctccccaccctcctcttaccttcaacagaagcaattatactgccttatttgacactgcagactcctgacaatcctggctgcacgactatagatgggactaggtttcaagcagcttctgcatgaatcctgaggttaaccttgtgttttttggttacagctagactcacatcattgaaatattaagagacagttgaatgacaactggattagtgacctcattattttattagagaagaaagaattctgagggtcctatcacttatacataaatgatcctcttctctctaagcttctaactaaagataattatgtaagtcactagattcctgagcaaactgaaagactttcccagctggagctttacttggggtgcatggtagggtgcagtggaggaccacacccagaagatggtgaatgtcaacatatccaggctgaggtgacctaaggagctgccctgttggcagctggaaggggtctgaagagaggagagggctggggttcaaagttgagctgcatgggcttcttttttccttctacctagggtcctcaggatttgccacccaacccctagcctttgaggatcccatggtgaaaaacatctatctggctattaatcatactaagaaatctagaggaatacactgagccattacagcttggtatgttgtaattgtatgcaaacacttagacatttttaaaagtagaatattagagatataacttaagctccttttgcattcttctctgatcccattcatctgccatcatacctagaagtaaacactttacttatctggtgtatatcattcctatacataatgtttttaaacttttaccacacgtatttatctccctgaacaatatgtaagagtgctttgtctttaaccaatacataaacggtgtcatgttctttcattttgcaccttgcaatttacttaatattataa

SEQ ID NO: 2787 - DNA, 4001 bp, Homo sapiens
ctgcctacagcattctagccaaacagctccgctttctatactggagagaccatgttccattcatcagtatttgttccctgaactggagcctggcgctccgtacatgtttgctgtatcaaccgctgcagaaagccagcttggaattctctgtgctgctgctattgtcctccacttggagtttctttcctcagtcctactcagtgtactttcttcccttgactactcatcaacatggccttccgatgctgaacgtctggataaaatccagtctcctcactctgacacacatacaggccttcacacctggctgcaaccttcccctcaggccttctgtcgcattcccctatggcaggacactagctcctctgcgccctcccacatctccctgcctctgcacttgctgttctttcagattttccccacaaccacaacagttcccactcctttacttgataaactactactcaacttttaagactcagctcaaatgtcatctcagaagattccaaattctgaagcaaaatcagacgctctcccttgggctaacgcatttttctcctcaagatctagtcattaaacacatgtttaataaatgcttacagtcttatggcaggaatttagacccttagatgtctatttctcccatgacaccaagcttacatgggtagtgactgttactgattcatcttcgttatcaccagtgtcaggtaccatgcctgccacttaagaggcatttaccaggagctggctgaacggcagcaccagtgagtaaggggcagaagggacacagccctggacaggggagcctgaaaacaacggtacttcagtttcctcatttatataaggaagttgggcgagataatctcttaaatttataataactcaagttttactagacattgggaggcgagaatggctgactgctaaaatcagtgaaccaaacaaattgtgactcggtagaaacactggtacagtcttacagtggatgtccatttgggggtaatcttttctctgaaataacagcaactttctgaaactacatcccccaatgcaaagacaattgcacacaattgaatgccctctcgtcgggcctctgcaattggaaaaggcacttgtgctttacttgagctctaatccagaactcaggtccactgtgaacctcactacatgtttcagtgcattccaagagggtgctgaggagacctgtgtctgtagccggggagtgaaggaagagtgtaggggaagcaagatacgaaatcgtgaaaatatggagttgccttatttttacaacttaacatccaagaatgcagagaactgtaactcagaaacaaattcacatcaacacaagtcaaactgagcacacattgtcacaactgaacaggcaggagacactactggccagggcagtgtaccaggtttacgcaactctctggaatcattaattctacagattatcatttctaggcaggcaagaaacctggcttattctcctttatgtctccaaagcctagtagagtgctagcattcaataaaggcttcgtgaactgaaatgggttaacctttacaaaaacccgacagggtgcgtttatcgttatctccgatttaaccccacagggaactggggctccgacagctcagtggatctgcgcacgttcagtgagcccgagctgtgacctacgcccgggatggttaactccaaccgccgccgcgggcgacccgctgccctccgccgagccaggcctgcctgggacaggggtcgtcaccaccgggagcgcccggccgcgctacctggaccacacagtccgactgcagcagacacgcgcccaggtcctccttcaggcccgcgcacgcgccgccctgcggcttgtcctcataatacttaggcatgacggcgcttcccctccgatgcggacgcgactttctcccaccgcaacacttgcaaccgggtcgggagcgagcgaggccccagtctcaggggaccggaagccagcggcaacaacttccggcgggccgcggcggtagggccgaggactacgggggccgagaggtggcgcgtccgcggcggaagtcggttcccgtgacgcggcgcgccccaagggccggctccgttgagggaagggaagcccgcccggtggcggctggggtcggctgctgggaggaggtggtgggctggttcggacgtgggtcgaggctgtagcaggactccaggtgaggcctgaggaccactctgccctcccgcggcccgggctcgcgccgggggccatttaatcccgacagcttgcggcctgacgtcgctgcggcctggcagtgaccatgtcggcgtccggcccctcggccggcgatagagttgcggctaaaatgaaaggacgcccagttacatttgcatcgtagataaagaaagagcatttagtataagcatgtccgaaatgttgcgtgggatgtaggcatactaaaaccttattcgtggcctgtctgaaatccaaatggagctgggtattctgtgtttttatttgctaaatctggcagccgtacccgcggccccgggcagggagggagcagctgggctcggccagaccctgccggcgtctggggggcctgcgaagtggaggggagacgggcagccgggcagtggccggcgttccccggagctcggaccggttggattggactccgacgctaccgctccctctgctgaactattccggatgtaaaacactagggatcggagtttttcttggttttttaatctcattctagtgaccgagaagcttgctggcagtgcgctgatggatctgtgtgaataggccatttatttgacctcttcagtaacactgttctaaccggctgaaactgctttcttaggcattttcttaaaagcttggtggttaagagcacggaatttcgagtcagatttccaatcttggctctatcactatcctcggagtcatggggcagtcacatcatccctgtctctgtaatggtagctgcccctggataagtgttattaggtgattcagaagggtgggctgttgcccttgcctgaggttgcagtctgcggttcccaagccccaagacccgcctcagaactaactgcatttgcttttgactcctggcctttctctagggttgggaagaacatggaaagtgacctccctgccaaataactcagaagaggagtgtcggtagccaaatgtttcttcagaatacgtgtaaaagaaatgtttttcttccatctaggaagatgttaccgagtacttcagtgaattccttagtgcaggggaacggagtcttgaattccagggatgcggcaagacacacagccggagcgaaacgctacaaatatctgagaaggcttttccgctttcggcaaatggactttgaatttgctgcctggcagatgctctacctgttcacatccccacagagagtttacagaaattttcattatcgaaaacagacgaaggaccagtgggccagagatgaccctgctttcttggtcctgttaagtatctggctctgtggtaagtgtgtttatctgagatagaattgaacgctgagtgtttctgattagattttttgttataaatgtgttgtgggtcagaatctggaaatattggaaactatttctcctttttactgaagcctcaaaaaatctcacaggaaagaaagttgtagtcttggttctacaggtcccaagcagatgccagagtaaactgttaccctaggacattgaaaagcaggggacaagattcactccatatctttttaagtacttgaatcggtacccaaatgtcagctgactgtgaataggaatatgaaactggaaattgcatttcacaggcaaatccacagtgagaattgtaaaggtattgatgggaacctgagaaactgaagttctccaattccataatgcaagggtctcatttacctgtagggtgttgaagtgggtaagatattgaagtttatagggtgttttgcaccttaactggacttaaactatg

SEQ ID NO: 2788 - DNA, 4001 bp, Homo sapiens
tagtgacaacgtcgatttttccttaacgtttctatttctggaatgctcgtattctcattagggcatttctgcattcagattaactaagaaaataaactatgttggaggaacacttatgctggggggaaaaatcttgtactacatcaaacgagtttcctacttgagaaactcaactagcatccaggttactcctgaactatttactaagaccaaggttattttcaggttttcttcatctcttgcagaactacctgttctcattactgtttactcaaacgcttaacaaggtaactattagcatatctggcaggaagacatgcctcatttaatattaactcaccatgtgacagcccccttcctctcttctcaaacatgtgaggataaaaagaaaagtagagttgtttgcaatctgatttgcgctgggttttggaaccagcaattggccacaggcacacacacccccaatcagaggcgcgcaccccgctcgctcccggaactgtcatgcgggctgacagctggcacaccctcctgtcgccctccacccgcctgcagaaagcccactccctacagtcaccttgacattgctcacctgcctgggcctcagcccatgaccaaggaaacttttgccctccctccccaggagctcacttacaggtatcgtccaccgctcccccagagcccaaacaagggtccctttgttacaatttttgctcccggactcctcacccaattcctggcattcagctggcctgtagcaacccagggcagccccggtaggaaggcaaccaaaaacgacccgagccctccgcccgggcggcctccgagaaggccgggaggaagcagcctccccggccgcgtggaggacagtcagtgagtcaggccgccggcagggcagcgagttgccagccaggtgaaacggccgaggcctcgctgtcctcgccggcctcgccctccccggtgagaggcggcgcggcgctctgggcttacctggctggggcgtcctgcgggcgcggggttcggccgtccatcgccctgcggggcgctgcgcgggctccagctcccaggcggcgcgtcactgctggggtgggagaggccggcgggtcagggcgggacgcgcgccttcccgaggccggagcgaagctggctgagcgtcaagagcccgcccgagccgctccagccccggccggcccgcctcccgggtgcgcttccacctgcgggccccggctcccagcccgcgggcgccgccgccgtctctacaaggtctagcgggcgcccagagcacggcggaggaggcggtggcgctgcagcccccgccccgtggggtttactgggtagccatttggcgcctctcggagggagaggagccgccggggctggaaaaggaggaggagcggggccgggcgcacgggcaccgctgccacgccggcagcgcactcccaggctcctccggccgagtttgcacaaacaaaacgccctaggaaaacttttcccgaagagaagttgggagggctgatctctcttttcccacccaaggctcctacgttcttttccaaaggagacagtagctcgcctgttctccctcgcggcttcctctcctactcttcccttccccggcccgcgctcttgccgctcggctctcaagccaggacttgaatggagaagcggcaacccctgcgaggctcagcccagcgcgggcagggccgactcagcacctcccctgtcccgcgggcggggtgcgggcgctggctgggcgctgggggcctcgctggagcccgctctctcactcaccctgccccatttccctgcccggagtccgggagctcgccgccgcctctgcagcacggccgcacataagtggggaccagctcggcggcattggagcgagggaagcagcgagccggagagaggaacggggcgggggtgggccgggagcaagttggaatttccttcccccagggcttcgggtctttggggtccggctggggaagctgaaccgaaagaaagctcccagacgaggtgttcccattcccaccgctaggctgcgcttcgggaaggctggtgcgcctgaaccggacaggtgcgggggaagggaggttacctgccttgccaggatccgcggggaggattggggcctccgcggaatgcggtcagaaactcgcagagtggggcctgcagcttgccccccctagagtccgaccctcgacgtccaggatcgtttttttaaatttgtgtttttaacttgacctttaagattgccattcttttaaaagcgcacctgtgacacagatctttctaattggtggcaggtttaagcttgccctgtcttcagaggcattttttgtaaaagcctataacagctctgacatgagaactggacaacagtatgtctaatgacagtctataaactaagaattaagtaatagattgtattcacttattggaacttttacaagggtaaaggaatcagacacagctgtgtgcttgtttgtacgttttagtatccacgtgcatgccctttagatgattctttacacctgacagacaggtactaggttggtgcaaaagtaactgcggtttttgccattttttttttttttaaaaagtaatgacaaaaccgcaattacttttgcaccaccctaatatatttacatattttatatttttcataagcgccaattgttttaagatgcgcgccattctgatgggcccaaaaatgtgttttcagaaaacaacgtgacattaagaaatgaatttaaaattagagttttaaaaacatatttggattaaactgatggagagatcttacaggaaggaacatcctgcaggggacttctgttgtagcactaacatcaagtaataaacctgtgttagccactgatagaataacatttggcaggtattacaattaaattgatattaatgctcctttagttggttatccattgcagcaacaaaaaaagattgctgaactaaatgcctagcaatgtgccatttgtctaccacacgcaggcattggtatttatttctttcagtgcataatgtcctttcagtgcatcttaaatatgaaaagaaaaaaacacatggctcatttggattacaatactggaaccatattagaaaaagttgcttttagagattttaactaagagtaaagcaatttatttaaatacctctgggttttagtctttaaacaataactctgtttaaacaatttcatgaatcatttatgcttctgaatacagagctgtgcaagcttttacagttgcttgcacagacaatgatgcaaatattgagtaacagtgaaactacttgaaagtccataactttcaatcacaagacaagattaaatctttaattagtttcagccttaatttatgacatactagtaatattatggaccctaataccagtaagattaggctaatcttagtcataaaacattcataacatttcgtaaccactgaaggcattttcagtgcttaccactttttgctgtcctccttctggtcctagggagaactatatgctccaccccatggaaattaggtatgaccctgtgactttgataagtggaaatgtgaacagacatgaaatgctttatttcctggtgaaattactgccagtgtttgagtctctatgttcccttcctttgctactgcaatcatgaaagcatgtattaaaatgaaggtgacacaagactggaatgctaaactattacccagagcacagctgccctggagagtcccaggacctacaacagaatccacataagcaagaaataagctcatgttgggcaaaaccacttaagagcaccaccaagcttggtggtcttcacataatggtactaagctatcctcactgtagccagtgattagcaaaataataatcacagatttgctataaatcttttttttttttttttttttttttttggagaaggagtcttgttcctgttgcccaggctggagtgcagtgatgcgatctcggctcactgcaacctc

SEQ ID NO: 2789 - DNA, 4001 bp, Homo sapiens
ttgtctctacattaaaataaaatatcaagagtaaagtctgaaggttcttactacagttatgcttgccagcaaaaagtgttcttctgtttcttcaacacagagccatctgacctcacctattttacttaaaagtccccagtgacttctgaacacccatgggtgtattttgtgaaagcaggtatgtttttctttcttttttgttttttaaagtaccttaacctaatccatttccaaatccaatttaattctatctcattttgcaatccctgaatacatttcggtatcctgacagctgtctcatcgtcaattcacataattttgcagctccacttaggaaccttgcttgtatgctcaatatctttctaccgatatatttctttactcatcctaatgtgagaatatatgtcaggatatatgaaaatatttaagcaatgaaaaacctggggaaagaaaagaaatgaaagtcaacagtgggagtaatatttgcagaaaggagaaagttaatttgagcaaaatgaaataattaatacactacatgtttcctctatgtaaaaattatactaaatatcttttagattagtcatgttgctttgagacttttccatgtttcctctagacagctgccaatgttcgcatggtctctgatgaataaacatgctgtgacttgcttctaaggaaacgcctgtcatgttccagggaaaaatgacttctacactcttaaatcaggaaaactgtacaagtctcattcattagtgacaacgtcgatttttccttaacgtttctatttctggaatgctcgtattctcattagggcatttctgcattcagattaactaagaaaataaactatgttggaggaacacttatgctggggggaaaaatcttgtactacatcaaacgagtttcctacttgagaaactcaactagcatccaggttactcctgaactatttactaagaccaaggttattttcaggttttcttcatctcttgcagaactacctgttctcattactgtttactcaaacgcttaacaaggtaactattagcatatctggcaggaagacatgcctcatttaatattaactcaccatgtgacagcccccttcctctcttctcaaacatgtgaggataaaaagaaaagtagagttgtttgcaatctgatttgcgctgggttttggaaccagcaattggccacaggcacacacacccccaatcagaggcgcgcaccccgctcgctcccggaactgtcatgcgggctgacagctggcacaccctcctgtcgccctccacccgcctgcagaaagcccactccctacagtcaccttgacattgctcacctgcctgggcctcagcccatgaccaaggaaacttttgccctccctccccaggagctcacttacaggtatcgtccaccgctcccccagagcccaaacaagggtccctttgttacaatttttgctcccggactcctcacccaattcctggcattcagctggcctgtagcaacccagggcagccccggtaggaaggcaaccaaaaacgacccgagccctccgcccgggcggcctccgagaaggccgggaggaagcagcctccccggccgcgtggaggacagtcagtgagtcaggccgccggcagggcagcgagttgccagccaggtgaaacggccgaggcctcgctgtcctcgccggcctcgccctccccggtgagaggcggcgcggcgctctgggcttacctggctggggcgtcctgcgggcgcggggttcggccgtccatcgccctgcggggcgctgcgcgggctccagctcccaggcggcgcgtcactgctggggtgggagaggccggcgggtcagggcgggacgcgcgccttcccgaggccggagcgaagctggctgagcgtcaagagcccgcccgagccgctccagccccggccggcccgcctcccgggtgcgcttccacctgcgggccccggctcccagcccgcgggcgccgccgccgtctctacaaggtctagcgggcgcccagagcacggcggaggaggcggtggcgctgcagcccccgccccgtggggtttactgggtagccatttggcgcctctcggagggagaggagccgccggggctggaaaaggaggaggagcggggccgggcgcacgggcaccgctgccacgccggcagcgcactcccaggctcctccggccgagtttgcacaaacaaaacgccctaggaaaacttttcccgaagagaagttgggagggctgatctctcttttcccacccaaggctcctacgttcttttccaaaggagacagtagctcgcctgttctccctcgcggcttcctctcctactcttcccttccccggcccgcgctcttgccgctcggctctcaagccaggacttgaatggagaagcggcaacccctgcgaggctcagcccagcgcgggcagggccgactcagcacctcccctgtcccgcgggcggggtgcgggcgctggctgggcgctgggggcctcgctggagcccgctctctcactcaccctgccccatttccctgcccggagtccgggagctcgccgccgcctctgcagcacggccgcacataagtggggaccagctcggcggcattggagcgagggaagcagcgagccggagagaggaacggggcgggggtgggccgggagcaagttggaatttccttcccccagggcttcgggtctttggggtccggctggggaagctgaaccgaaagaaagctcccagacgaggtgttcccattcccaccgctaggctgcgcttcgggaaggctggtgcgcctgaaccggacaggtgcgggggaagggaggttacctgccttgccaggatccgcggggaggattggggcctccgcggaatgcggtcagaaactcgcagagtggggcctgcagcttgccccccctagagtccgaccctcgacgtccaggatcgtttttttaaatttgtgtttttaacttgacctttaagattgccattcttttaaaagcgcacctgtgacacagatctttctaattggtggcaggtttaagcttgccctgtcttcagaggcattttttgtaaaagcctataacagctctgacatgagaactggacaacagtatgtctaatgacagtctataaactaagaattaagtaatagattgtattcacttattggaacttttacaagggtaaaggaatcagacacagctgtgtgcttgtttgtacgttttagtatccacgtgcatgccctttagatgattctttacacctgacagacaggtactaggttggtgcaaaagtaactgcggtttttgccattttttttttttttaaaaagtaatgacaaaaccgcaattacttttgcaccaccctaatatatttacatattttatatttttcataagcgccaattgttttaagatgcgcgccattctgatgggcccaaaaatgtgttttcagaaaacaacgtgacattaagaaatgaatttaaaattagagttttaaaaacatatttggattaaactgatggagagatcttacaggaaggaacatcctgcaggggacttctgttgtagcactaacatcaagtaataaacctgtgttagccactgatagaataacatttggcaggtattacaattaaattgatattaatgctcctttagttggttatccattgcagcaacaaaaaaagattgctgaactaaatgcctagcaatgtgccatttgtctaccacacgcaggcattggtatttatttctttcagtgcataatgtcctttcagtgcatcttaaatatgaaaagaaaaaaacacatggctcatttggattacaatactggaaccatattagaaaaagttgcttttagagattttaactaagagtaaagcaatttatttaaatacctctgggttttagtctttaaacaataactctgtttaaacaatttcatgaatcatttatgcttctgaatacagagctgtgca

SEQ ID NO: 2790 - DNA, 4001 bp, Homo sapiens
tgattattttttgcatctaaagagaaagagggaaataaacagaacttaatgtgatgtcaaggtactgtaagtggcaaacacccccccactaaagttggattgggaagaaaaatagccacagtgcttataaaaagcttgcaaccacgaggcaactacaaatatgttgcaattttttgagctaaaacccctaagtttgtagtcttttcaataaatggttggtgggggatagtagtcatttggtatcctaaaaaaggactgtgagttgtagcatctcctgggaagagcaggatagggaggaaaaggggagaggaatgagaaaggaagaaggattgagagttcaggggaaagaaagggtgaggaggcaaggagagagagaactaaaaaaaagaaatggaggcataaggaggccacatggggagtagggagggagtaacaggcagggaagacagaggaggagagaggagtagatatgggcttgcctaggaaggggtggggtgatgagtgaagagaagtctaaaggagccaaaaggggtggagagagataaggaggagggcaaagcgaaggagaggaggggtaaggaggagaggaaattaagggaacaaggaaaatgggtgtttcttttcttttgtgtccatgggctgaatataactgaagacatttcattgtatatctacccctcccctcatacacacatttacatgtattagctatgaggacaacaaatacatttgatattacaaacaaaaaccaaattttcatgcagtgtcctttgcaaaatctatatgtttaaatgtaaccatgtttagttatgtgcaataaaaattgtctaataatttctcctagctatctttacatttagcacttaaatatttatttctatggaagtttgtattccaatttgttcagcattttcatgactatggtaaataaaagaatattttcacataaataatgagacaaatgtgtttttaggggaaattagaatatgaaaaacattacatgcaattattagaaaatatagcaaaacagctttctgaagtcaaacagtactagtatctttaccttgtttgcagcaaagtcaaacctcctgttgaaacattttaaaaaatattttcttcattaatgcgaatgtggttaaaacgtagaatatgtggaaaatattagtcccttaatatcaagctactagaaaagatgaattaatcaatcattcttgaaacaaaataaaaacaggaataataaaatattttagcagtttgatccctttgaagaatgtttataggtatcttgtagccattttacagaaatatattcaatgattctgataatgcgtagaatcttcctttagactgttcttaatccatgatatttgaaaggcattcttattcagaaaacaatgctcaatattctaaccttacaaagaatccagcagacaaagaggaacataaaattattgcaagagaccaataacttccagactgcctggggaagtattccaagatgttaacaatccaggagggaaaaattttaaagccatttttaaaagtttccagtgcctttaacatgaaaacaagttagtacaagaacatcttatcttaaccacagaactcttaaaaacacacataacgcgattatttttcaagtaatgtaaaaagcacagccatggtcagttcaacgtttcacaatctggagcttatagaggaaattatcttgaatcaggcaactgattttcccctttacacccctctttgtgaggagaagaaagacaaaaatcccataaagtttcttgaaatcagtacctactcaccttcctgttgtgccaaaataatagtgggatgaagcagagcgagaagtagccagctccccttttgcacaaagctcatcatgtctaaatatcagacatgagactctttgtgcaaaaaggagaaaagaaaagcagttcaaagtagcaccatcaagttgttccctgcccttcagcaccgggcccgtcataaaactcagccactgagattcctttgctttggccttaaataggaaaaagtttggcttccctcactttccagcccctttctgaaatatgagagccgcacccatcccctcagcagtaaaagaaatgataaatatttctttttcccttatagaagacacaacccacagtaagaaaaagagcacatctggagtttgtatgcatctgcttatgtaaaagtttttttacatatttcactcttacatatatgtttgtataacttaggaacgtatagaaatgctctgccttgttttaatacatacaatgtaaatgcatacatttttatttccccttatgaagttaacaactgcataattttgaaaaactgcttgatgcccatttatctagtatgtctaatttacagaactgatcttcctagaagatttttatgttgggattttgccagaagtaatcctaactcaatttaaataggagactgtaagagactcacggaaagaaatgccaccgtatgccccttcgactcatccacccaccctgggtcctagaagttaagtttcaggcaaatatcaaaagacaaagtatttcagcaatgtttgaatggcttcctaaaagttagatacttatctatagctgtttccatttctcacaaatttctttagcaagccagagtgctttcttgtgagatttccaatttttatgctgcctgggaaagacagagcagatttttctagagaaaaattcagccttttcatgacataactttttaggaaactggaagagaaagagtttatcacatagaatagcaaaagagtaccagagaaagtggtcattttttctgcattactctaaagattagtataaatatttctaatttagacttttatgtgtatactttccagatcctcatccacaaaactttccaatgtatttctggatctatctaagcagtaatttttgtgtcatatttgaaagaggggcaaataccatttataggtctttgataaatctctgcaggaaaaatatgcttgtccacagtataaggctatatctggcaatggagatatctctttacaccctaatcatcagttcatagttagttcatctatctctataatctacggtggacatttcaattctaatcaaggtcacttgaactaattttcttcaccttcacctaaacatgtccgtctctatgcctgtgcacataaaattctccccatttcacaccaattaatggaagtcacttccttatgcctcaatgcaaaactttcctccttaagtaaattacctcctttaaactaattttcatctttctctttcttctaatttgtgttactaaattttcactcaactcatgtcatatgtatattcccaggtgtacatgaatcctgtaagcatggacagtggcaaacttgctttcttgtttcttgcatcttttttttttttttttttgcgacggggtcgccctctctcgcccaggctagactgcagtggcgcaatctcggctcacggcaagctccgcctcccgggttcacgccattctcctgcctcagcctcccgagtagctgggactacaggcgcccgccactacgcctggttaattttttgtatttttagtagagacggggtttcaccgtgttagtcaggatggtcttgatgtcctgacctcgtgatccgcccgcctcggcctcccaagctttcttatatcttcagtcacaaggacacaaaccaagacatctcaatgtagatgacatcatttgatgacaggaaaggaaaactagaacgagaccaacctcttgtgtatctttattttagattggagagtcactgcttgggggcgtgggagaaaagtaactgttgagaatggtcatgaatataagcttttctactggatcacagtagagatgctggggaaaggctgttatatgcatctttctgtctttcagacatctttgtcctgtacacaaaaaatatttcctgtgttcaaaccaattcagaaacatagtttttctcatg

SEQ ID NO: 2791 - DNA, 4001 bp, Homo sapiens
gtaacaacagaattgaaaatggtataactagagtttgcatggtccccaagcattactttttcaggctgatcctcacataagtacaattcttccaccccttcccaatctcattcctgttcttctaaattcagaaacatgtgcaaaccctgctctggatctcttctccaggcttccccacaacacacatttcctttaggattttgcttttttggatttatttgtcctggttaaagctggtagataatccccactgagttttatctatcatgcctagtagcatttaaatacctggtctgggaattcctaatgtatgcaaagtgcatttttgttagaaccagctacacaaacagattacatagattacaaatgtcctttagaatgtgaaacagtgaataatctaaatgtaaactgatagggaaatggttcaattaactttggcatattgtgaaatactgtgcaacaaagcaaaaagaaaaacaggaggatcttaaatactgacatggactggtctacaggttgcaaaggaatacagcacagtatcatttatgttaaaaggccaacaaaaacatacatatatgtttgtgggttcatatgtgtgtgtgtaaattcatggacaatgtttggaaaactacatgaaatatgaaagtggtgaaagtggacacctcttggaagacaaggaaatggggagaggtatggggggtgtcagagagggctttagtttcacctataatgtctgcaatgtcttcatttaatttaaataggaaaaacatatagaacctatatgtgaccataggttctaaaattcttttcatgtaacatatataaatatttatgtgaccgttaatttccaatcataatctcaatgataacatttgtaaaaacatctgctcatccttggaaatgaaatttcctatgccacgttatcacccaaatcaactttttaaagtgtaaaaataacaagtatctgaaaagttaaagtttactttcacaaggtaaaatcaagtgagtcaactctaggaggcacaatcgttttgaggacaatcaatttctatttaatggcaaagaataagaaatatgggatggatttaaataaatccagtttcactcaaattccaagtcaaaaatcaaatcaaagtgtcagattgcttaaatgattctaacctgagttcgatttctaaggtgctcttaatttttcagtgatagcatttgcttttcccaacaatagcaaaggaaaactggagggcaagttttgcaaggaagaaactgagccccagagaggtcagggtttagtgtgacgtcccagctaggaagtggcggctgggactccctgcaggtgtctcctgccagccctctgtgcgctgggccaagctgcttgatttgattcaccagcgtgacaccgtgcatctccacatccggtgttctcacgtatcatccctggcgattatctatgtgtctattttttaatttactgacctctggaggcctgtccccgccatccctgactcctaggcactggacaagccccctcctcgcctcttcccccagccccgcgcattccacctgttccggggcatccccgcttgctcccttccgctcgctgcctgtcccgggacctgcgtgaagccctcagcctcgccactagcccggcagccgctccactaccgcgccgctgcgggtggggccagcgcgtcccccggacgcgtggaggagggatggaagtgcgggggtgggggtcgcgcagcccccactcaccttgctggctgcgggcgccgccgccaggagcaccagcaggagcggcagcaggagcacctgcggcctgggggcggtccgggcgctcatggtgggcgcgcgctcagagcctgggcgagtccggggaccctcaggctctcaggccaccgcgtctcctgcgcagcgcggctctgggagcccggctggaaagctcgcctcgccactcggccggggcgggttttgtagggctcggtcgcgcggttcgtccctccccacccaggctttttggttgtggcttcaagggagggaagacgtggctcaggtcccgccctcataccccctccctcccaacttaccaggcagtgtcccttctacccgggcatcgtgcccaggaggcgagaaagggctgggcgcctgaggggcaggtgggcgcggatccagggtaaggggttaaggaggtgatgctcccaaggtccgggggcccaggcggggaagtggggtgcggtcggaggtggggcgtttgggggtgtgcggtggggaggtggctgcgcggtggggaggtggctgcgcagggtggagggagtggccagcggccctgcccagattaagcgggaggcgcgccgggcgtctgcactcgggaggccccgcttgttccccgcgcccgcggcggtccgcgttccccgcctccagcccgcctccaacttgcggccgccgggcttggctgcgagagcgccgcgaagaggcagcggggcgcgggtggattggggctggaggtgcgcgtcccgtggggtggcaaggcggcagctcctggcgctgcgggcgtccccacaggtaaggcgcccataggtggggcaaccgctgtcccggggccccggcacctgcctgggaggggcagtggagggagcgtggcattcaaggggtggtggcgggcccagctggggagttgtggcccgggggtcaccagaggagagcgcgtctggctcctgggcttgtctgcctgggctttaactgggtgctgtgtgttttgattaatttggaggctcgagttaccggcctggcagtcggggcactccaaaatgccaagagaaagaggcagctgaggagaaagagaaagcccatcttattctccgctgagttgaactgcttttcaggccaaatcttatctgcggaaatgcagggcaaaacaagactcagctctggtcagggtgcgctcttcctgggggtggcctgcgatgcaaatgtgccagggcacggtcctccagccggctctcgccgtttcctgtgctacggaccacactggctctggtaaagcaattagactgtttctcagaagaatgttgtgaaatgcataaaatacaattaaatcagaatcagttttattggaatgcaattatggaagtcctcaagtcgtgatatagtaactaacacaggtgcatcatcattattgcattaaatagcttgatttaacagcaggccgattaagcaacagtaatgtcaaagtagtgatgtctgcaaatggtattttgagataatagcccaaactgaaatgtgacatgaaaataccggtgggtgcaaattatcaagaactgccaatactactgtgctctgttgcctgtgctcataagggaaggacatgttgaacttctgtgacatgttactaaaagtaaagatgcaacttattttcctatgtgagtttcctatacagatcacctgaattccatcctcaggttaagaatctttgctttggaacagtgttgctgatatttgctgcaattggcttcagacaccaagtatgatcatgcagttggtcactgattttagggaaccacttgcttgcagttaaatttgggatctattggtatcttagaactttgtagccatgcaggtaggcaaaaccctaacagtgaatgaagacactcctcccattctttttattttgactatagcatgaatcttacagtcttctttctgtcttttatgccagtgattctcaactatcgttgtgcattagaatctttgggaggataaaacaatgttgctacccagaccattccaagccaattttatcagactctctagctgttttaaaatttcctgtacattcccatgcacaatcaagtatgagagctcctgttttcacgaacatgtgaaaatttcacgcacatgttgaattaggatatattcttagtagaataataaaaagcacatatattaaactcttcattacaacttgggaacactgcggaatttatgaccatatcgcagatgttgct

SEQ ID NO: 2792 - DNA, 4001 bp, Homo sapiens
cacacagcaacatctgcgatatggtcataaattccgcagtgttcccaagttgtaatgaagagtttaatatatgtgctttttattattctactaagaatatatcctaattcaacatgtgcgtgaaattttcacatgttcgtgaaaacaggagctctcatacttgattgtgcatgggaatgtacaggaaattttaaaacagctagagagtctgataaaattggcttggaatggtctgggtagcaacattgttttatcctcccaaagattctaatgcacaacgatagttgagaatcactggcataaaagacagaaagaagactgtaagattcatgctatagtcaaaataaaaagaatgggaggagtgtcttcattcactgttagggttttgcctacctgcatggctacaaagttctaagataccaatagatcccaaatttaactgcaagcaagtggttccctaaaatcagtgaccaactgcatgatcatacttggtgtctgaagccaattgcagcaaatatcagcaacactgttccaaagcaaagattcttaacctgaggatggaattcaggtgatctgtataggaaactcacataggaaaataagttgcatctttacttttagtaacatgtcacagaagttcaacatgtccttcccttatgagcacaggcaacagagcacagtagtattggcagttcttgataatttgcacccaccggtattttcatgtcacatttcagtttgggctattatctcaaaataccatttgcagacatcactactttgacattactgttgcttaatcggcctgctgttaaatcaagctatttaatgcaataatgatgatgcacctgtgttagttactatatcacgacttgaggacttccataattgcattccaataaaactgattctgatttaattgtattttatgcatttcacaacattcttctgagaaacagtctaattgctttaccagagccagtgtggtccgtagcacaggaaacggcgagagccggctggaggaccgtgccctggcacatttgcatcgcaggccacccccaggaagagcgcaccctgaccagagctgagtcttgttttgccctgcatttccgcagataagatttggcctgaaaagcagttcaactcagcggagaataagatgggctttctctttctcctcagctgcctctttctcttggcattttggagtgccccgactgccaggccggtaactcgagcctccaaattaatcaaaacacacagcacccagttaaagcccaggcagacaagcccaggagccagacgcgctctcctctggtgacccccgggccacaactccccagctgggcccgccaccaccccttgaatgccacgctccctccactgcccctcccaggcaggtgccggggccccgggacagcggttgccccacctatgggcgccttacctgtggggacgcccgcagcgccaggagctgccgccttgccaccccacgggacgcgcacctccagccccaatccacccgcgccccgctgcctcttcgcggcgctctcgcagccaagcccggcggccgcaagttggaggcgggctggaggcggggaacgcggaccgccgcgggcgcggggaacaagcggggcctcccgagtgcagacgcccggcgcgcctcccgcttaatctgggcagggccgctggccactccctccaccctgcgcagccacctccccaccgcgcagccacctccccaccgcacacccccaaacgccccacctccgaccgcaccccacttccccgcctgggcccccggaccttgggagcatcacctccttaaccccttaccctggatccgcgcccacctgcccctcaggcgcccagccctttctcgcctcctgggcacgatgcccgggtagaagggacactgcctggtaagttgggagggagggggtatgagggcgggacctgagccacgtcttccctcccttgaagccacaaccaaaaagcctgggtggggagggacgaaccgcgcgaccgagccctacaaaacccgccccggccgagtggcgaggcgagctttccagccgggctcccagagccgcgctgcgcaggagacgcggtggcctgagagcctgagggtccccggactcgcccaggctctgagcgcgcgcccaccatgagcgcccggaccgcccccaggccgcaggtgctcctgctgccgctcctgctggtgctcctggcggcggcgcccgcagccagcaaggtgagtgggggctgcgcgacccccacccccgcacttccatccctcctccacgcgtccgggggacgcgctggccccacccgcagcggcgcggtagtggagcggctgccgggctagtggcgaggctgagggcttcacgcaggtcccgggacaggcagcgagcggaagggagcaagcggggatgccccggaacaggtggaatgcgcggggctgggggaagaggcgaggagggggcttgtccagtgcctaggagtcagggatggcggggacaggcctccagaggtcagtaaattaaaaaatagacacatagataatcgccagggatgatacgtgagaacaccggatgtggagatgcacggtgtcacgctggtgaatcaaatcaagcagcttggcccagcgcacagagggctggcaggagacacctgcagggagtcccagccgccacttcctagctgggacgtcacactaaaccctgacctctctggggctcagtttcttccttgcaaaacttgccctccagttttcctttgctattgttgggaaaagcaaatgctatcactgaaaaattaagagcaccttagaaatcgaactcaggttagaatcatttaagcaatctgacactttgatttgatttttgacttggaatttgagtgaaactggatttatttaaatccatcccatatttcttattctttgccattaaatagaaattgattgtcctcaaaacgattgtgcctcctagagttgactcacttgattttaccttgtgaaagtaaactttaacttttcagatacttgttatttttacactttaaaaagttgatttgggtgataacgtggcataggaaatttcatttccaaggatgagcagatgtttttacaaatgttatcattgagattatgattggaaattaacggtcacataaatatttatatatgttacatgaaaagaattttagaacctatggtcacatataggttctatatgtttttcctatttaaattaaatgaagacattgcagacattataggtgaaactaaagccctctctgacaccccccatacctctccccatttccttgtcttccaagaggtgtccactttcaccactttcatatttcatgtagttttccaaacattgtccatgaatttacacacacacatatgaacccacaaacatatatgtatgtttttgttggccttttaacataaatgatactgtgctgtattcctttgcaacctgtagaccagtccatgtcagtatttaagatcctcctgtttttctttttgctttgttgcacagtatttcacaatatgccaaagttaattgaaccatttccctatcagtttacatttagattattcactgtttcacattctaaaggacatttgtaatctatgtaatctgtttgtgtagctggttctaacaaaaatgcactttgcatacattaggaattcccagaccaggtatttaaatgctactaggcatgatagataaaactcagtggggattatctaccagctttaaccaggacaaataaatccaaaaaagcaaaatcctaaaggaaatgtgtgttgtggggaagcctggagaagagatccagagcagggtttgcacatgtttctgaatttagaagaacaggaatgagattgggaaggggtggaagaattgtacttatgtgaggatcagcctgaaaaagtaatgcttggggaccatgcaaactctagttataccattttcaattctgtt

SEQ ID NO: 2793 - DNA, 4001 bp, Homo sapiens
ttatttccatactttattaaagtactttattcattttaacataaattaacaaagaaagtggtattaaaggttttaaattaaagttggttgttttggtgggggaggggagtaaactgttctttctagagtcaaattttcaatttctattgtaatttttctgtgtttttctcctcctgttttcttctactttctattcaattatttttgccacccttccaaacaacacatgcttttcatgccattacaaagaaactcaaaagttttcaccttttataaattacctcatattttaaaaacataaaacgtaacataaaaagctccaagtcttagaaagtgccccctctatgggactcctgacagattgttggatattcatttacaaattcgtattttcactttttaagctttttagaacttctgatctctagattaattttataaactttttgaaaccaaaaacacacagaagcagatatttgttctaaaaatatagatatatacatagtatatatacatatatacctgtatgtatgtgtctatatatgaaagtaatagaaaaggttaatgaatgtccaaagttttaaaagcttgagtttgatgttacatggttgagttgatgaaaatctacagtggcttattttaaaggagtacatgtctgtatttgaaattgcaaccctcaagattaaagatttaatagaggaatcaatttaaatattttcttatatactacaacagctatgcatttttgcttaaccataccatataacccaactgtaacatatgaaaattgcataggaaaaaaatgtggtcaccaggcaagatttatctttaaaaaaaaaaaaaaaaaaaagcttgggtctaaggggtaatgtccatgcaaatattccatgccaaataagatatatacaagacatgctgatttcctgccttccgccatccaaccgggaaccaccactgtcctgttaatcaagccagtagggtgggaaaataccactgtttaagaaatctggcttctatcagcctctgtcatggagaaacaaacgagactgcctcccagtaagcaaaagtgatcacattttcacaaatgaaaatggtaaaaagaagtttaaattgttaaagaggaaagaatgaggagccaaagacaaagaaaaatcaaagctatcagagttgctgcagaggttttactaaacaaagaattttatgaagcagctgaagttcagtacaaaaagactccaccctacccagcttctgccgcgacttttccttgctctgaaaactccagcccacagaacagagctcctctaactaaaatgcctttagtgctccgttttaagcattcactcttttcttattttaaacgtcccactctcacactcagccaaaaggacttattgtaggctttcccagaaaaatttagtagtgtactctctccaacggtggatctagaagctccggatttacaaacatcccaattgtctttcaagtcgttttccaggtgcaaatccgtcagcccccttctcaaacttcaaaccagaacctcctcttcacgctcttcctgaggcttaacattccacctatttcccaaaccgtgcaataaacactacaagcaaagcaaatggcaaactcaccatcctcgtcttcttcctgggcttttattgagacaaattgccctaataaaacaataagaatgaggagaggtcttgcttccgcccagtttgccatcatgtctaaatattagacatgtgggttctcctgagagtgaaaagtagattctgaggttattgtagcaccatgaagtcagctgtgggctcttctttcagcaccagccccagggcagcctctgcaaaccccctttttcagcaccagctccagcacagtctgcgaaaacttttttcaagcgatgcagctttaaataggaagaatgctgcctccacttcttttcctgccccttttcagcttgttcaggctcataaccatccagtgtctgccaagcaacggtctgattgatggtaaacaaccaaatcagaacacgcgtctctgtgcctgaactttccctatttcatttaacttttaagcatagatggggcttaataacagaaacaaacatttgtttctcttttcttttattttttaagaaaggctgttagaagaaaagggttctattttcccctccctaacccttccccccagacacacaccctttaacttttcccctataagctgaaaaagacattccgaaggaaatccagccttttaccctagtttttttacatttagataattcaagactctcttctccaccttaaatctttaaacaatcacattttaaccctttcttttgactgaatagggagtattcttatccccttctcagattcggtttcttttcccatactctggaaggagattattagaatgttgcccaggtaaagtccaggttagaaaaccattttggataaatgaatttgtgatacattgtaatttgaattaagaaagcatgtcctttcctaatttctccacatctcttgttaaggggccacatcttcaggttcctcttgtcccagagagttttaccatgttgaaaaatagtctactaagcagtgcagaggaatgggaagtactctacctttggatgaaaaaaggcttgcttctgccttttgtgagtggttctgccactcaataattttgtaaatgtgcatatagtcctttatctctgtgcactccaattttctcatttgagaaaagggctttaccctgaccagtgtacagggtttagtgacactaaaatgagtaatgtattattaatgaagctccaaattgcaaagagctacataaaagcagatggtggtattattagctttaagccagctttgcagggaatatgatagccccagttgaacatgcattttaaggaaaattatcgatgaacttttgtgccaccctcacacttgccaagatcttaatgacctcagagagttctatacaatctaatgtatttgccaccttgagtctccctagaatcaggatggatgttctatacaatacaagtgagtcaattgtttataattattgggcaacaggtgccttgcactgtgctaagcactgggcagaaaggatgacataaaagaaataaaagacatacccatcaccttcaaggaacatatgtaggtgttgagaaactaaatttacaagaaataaagatatataagccagagcatataaatatgtgagggatgcattaagcccggagaaaggagaaattatcaaatgagattaggcaagcaagacattattactgttcttaatagaagaaatccaagaacctttgcattttagctttggaactagactctggataaatattccagtggaggtcaattttcccggttgtttccagcttctaaccctgtacctctcagtttatcttttcatttagacatgtcccatttcaatgacttctgtcaccaccacactgttctcaggggtgcccttccacttaatgaatgggctaagtaaggaccaaaaatcacctttcagttaattctttctagaatatcttagagaggctaggacttgaaatccatctgactatatattcaaagataacaggaagataagtaaatgtgggggggaggaattaacctttctctgagcttgccagtcctattctaccatgaggcaattttagaccaataccaccctgataccgaagggctggcacaattttcaggcaccttgtgcagcatttttactgaagtgcaagacggcagacatttatggagaatctacaactctcagatcctatgctggagataaaacaatgattaggcaagattgcaggacttgtagcagagtcagtgtatggaacactcagtggctgctcagatcagtagtttagtatctgttatctgtttgttaataaagttgttttaaatttaactataaacatggcttatataagaaaggttaaaaccaccatgcagtctctcatggttgccacc

SEQ ID NO: 2794 - DNA, 4001 bp, Homo sapiens
agaagagcatacaggtcccctccttcagcgccctccacccccaggaggtggcctgagcagggcggccagccccggtattccggtcacggaaccgatgcccccgccccacggtccacctcccttctttctcggttcattggtagagtcttagtgagcccaaagcagttttcccaacgagatgtgagttatttgggatcctccgtcactggcttgtctgctctccttcaatggggaaggatttcactgccatctcaggcactcgctccctggcctgggcaaggaattccgcatctcagagcccctggttgctcattttgaaaaccaggaaactactgcatcagtggcttctgaccaaaaatctcttccattatctttagcccaacaaaaacctcagaagtcccagtaatgtcatcaacggccacccactcagttttcaatatagttttgcttaggagcaatgtaactttgattttaaagccatttcggttgttttttacagcattaagaatgggaccctggggagctgggggatcccaggttgagcatccaccatccccgtgagctctgagcaccctgcagctctagcaccctgtggtcctcgccggggtgagctgtatgtggggagagaagccagtcagccggggccacagccctgcctccccatccagcacagcagactcccctgtgctcagaggggtttgctcctggggtctgcaccggcctcgaaactggctcctggggcttcctgtggaagcagatttttctttaaccactccctagtccctcccagtgaccccacccatacttcaatacccgttcattatccaacatagtaggccccttgaaacaggttccccaaacaggctggccactgtcagcgaacgtgtccatcctcagcaagagagggcccgagccccaccctgcatcctccgggccagagaacagccctcggggcctcccagctcggcactggcctcacctctgtgcagcatgggctggccctgcagccccaggggccctgccttagacactcagcatgctgcccaaatgcccaattccttcttctcctctgacccctgcaactcctttaagcaaccccaagggacaaagtctccaatagagacttcaggttcctggaaagacgaaagcttgacggcaatgactgagcgaccctttacttggccctgatcctgagcaccagagttactccaatcttgtgaaagcagcaaatgtgctccaccaggaccttcccatgggcggccctgggcagaaaacccatgcaggttgttgcaccctgacctagtgtcaccacccagagagctcagagaacatctcccagcggagccgcccggcagggagctatgctagtcctcagcaaagacgcttctgcaaacaaagcggatcccgaatgggttttagaaggcggcagtaacttaaataaatcatgggccgaaacacactgccgcccggaatgcacagggcgcgtgtagcagccacagacacgcggtggaaaagtgctcacactcttaggcaatcatgaccttaaccaatttaaggaaatcccattgccataaagtgagaaagaaaaatcagcggaatcttccagagacctaaaacatgtacagaaaactggcgatcagcatgaacgtaagagccactaacgctacctagaaaggatcacttcaggttaagagcatttccttctagccccaaacctggaaaaacagaagagaaatcacacttacccctgagcaaacctgaaggcgtgtgtccctgggctcctcgattcaattaggtttgaataggatgcatacttttcccactcactgcgtctctttttctttttgcagcctttctccaccaaaaaagtggagactcagagctgcggaggaaaactcttgcagtccttgcaggaggctggagcccaggagaactgaacggcctttggtggaagactgagctccaaactggactggggccagggataccagtcagggcttcctccagctcctcctcctcctcctcctccctcccggacccctcctctccccctcctcactgcagaactgacccaaaactgtaaatgaaaccagactcctccactctgtttcttctggcccccgctcaggctgatgtcaccctctgaattctgtcttcaccctacaagcgtttagctggactcctgcaagccccaactcttaaaaaaaaaaattgaccactcctactcgtcaccttttgggctgggcccttggcgtcaaaaagaataaattttggaatttcttcgtgggtatccatggttttcctgcaatgttttccaacaccatctgaaaggaaaacaggaaatgcagtcccccgcttaccctcaccacaccctcccatttcttcttgaagtttctgaattgagacttctactaataacttcccccttcaaatagaaaaaccagcaattaaaatcgccttggttttctgttaaccaaagctctgttcaccggcaaaaaaaaggaggctacatttctcttaatttctatatctaatgattctgattgtggcgcttataggcccattctaggcacagacggggtaataaaaatggttatcttgccaaagcttcgggaaaatacttgagtaagaacttctgtttctagaaagctttgcacatttcaaaacacttcaatatacattctctcctttatcacaaacatcaacaccctaagcccttttaaatagaaagatgtcttcttttattaggtgaaattgtggtcccattttacagatgaaagaaacaggctgggcacggtggcttatgcctgtaatctcagcacttcgggaggctaaggcaggcagatcacaaggtcaggagttggagaccagcctggccaacatggtgaaacccctactaaatctctactaaaaatataaaaattagccaggcatggtggcaggcgcttgtagtcccagctatttgggaggctgaggcaggacaattgcttgaacccaggaggcagaggttgcagtgagccgagatggcgccactgcactctagcctgggcaacagagtgagactccaaaaaagagaaaaaggaaagaaagaaaagaaatgaaaagaaaagaagagaagagaagagaagagaagagaagagaagagaaaaaagaaaaaaagaaaagaaaagaagaaaagaaaagaagttccgagagagtaagtgacatcgtcattgtccagtctgggttagtaacagagctcaaatgacaacccagctttggccatccccaaacttctcactgctctcccatcatgtggtccttatgaaaagtccattaatgtgaaatatcaagagacatccgaaaggttctttttgactgagagatccttccaaaccaagtttgaagagcaaagaaatcattaactcctttccatggattatctccctccaatttagggaagaaaggagacagcaccccagagagaatgcctgctcccctctgcagctccagggctcccttcctctcccataaagaagcccaacccatctctaaaccaaagggctcacttgcagagcactggagtagggaacaaggatggaacctgaattatggggttcttaggtgaagacacgctgagcagaggctccgagtatagaaccgcgctgcctgcatgacatgtagaaggacaacacgcccctccagcggcatccaattctctgccctcatcctctctgcacagtgcaggcgttgactcaagcccctacagagaccggggatacttgctgccacccccttggttagagtctgcaacttcagcactaaggaggactatttctcccagaacattgtctgctgcgaagaagacaatctttgattacaaccccatgctccaagcagctcagcaaactgaggttaactgaacaagcacgttttaggtgtttccactccacggtttctttcaaatacaaatacactctttttcgcaaaatcgctaggcagatgcattccttggtattgaa

SEQ ID NO: 2795 - DNA, 4001 bp, Homo sapiens
aattccattttgtaaacggagaagccacagctacccccaggacctctttaagaacaacatccttatctcccagccagggcccaagacgctcagggccctcccatcaatggaaggggcagacttgacaagcaggggagagggggttaaacgtggaatcctgagaggaaatacatgttatgaatgaaataaacaatggggccaggcccagtggctcatgcctataatcctagcattttgggaggccaaggtgggcagatcacctggttaggagttcgagagcagcctggccaacatggtgaaacccccctctccactaaaaagtacaaaaattagccaggtgccatgatgcacacctgtaatcccagctactcaggaagctgaggcaggataatcgcttgaacctgggaggcggaggttgcagtgagccaagacggtgccattgcactccagcctgggtgacagagccagagtccatctcaaaaaaaaaaaaaaaaatgaaatagacaatgagaaaaaatcatggcttcagttgccaaacatgctattctactttttcattaagtatctacagcaaggcccagcatcttacaggcaccacaaatacctcctaagaaccacatccctgaagcatgaggaggttcctctcactggggactgccccagccccaccgcggtgtttccctccctacagtgacagagcaccttctggggcagcctggattccacccacaacagcacacgctcctcttagcttcttaccaagagcacagagtaagaaggcacctatcctctcttatcttcccccagcggtcagcacattaccggtgtgctctcttctacggtacatggatttttcaaaattgtaaacaaaatcgaatagctgtgaaagattggggcagtgctctgcctaccacaggcaaagtgcttcccatcaaaccaaaattccagctatgcacatgagatggctttaaacgttcatctttaaattgagaacgaccacatcacctcagctctaaaaagaccgccagttcctagcgcaaggcatccaggtaggaggcagcggccctaggaaactttcctcctttccaattttggagacaagatgaccccacttggttttagatgaccccatctgaactcaaagtctttccctggaaagttgccaaagcaaggcccacctttcccccacctctctgatccccgttcctgagcccaacacagagccactggtccctgggggcagtcgtggctgctgtccgcctggcccgtcagacgctgctcaggctcaggaacaatcgtcaggttgtgagaccaggtactgcactgcggtttggaattagcgaagactgtttagccccctgggccttgggctgtttgaaatctgccacccaagagggtgactccatcatccagcacctctcatgggtcggatcccatctcatcaataggctccacgaatttccgccatgaactaatcaaactttggaactctggtgccagatttattgagactcaatcttttgcctggatctagggacagattcccatcctcctcgctcagcaggagcccacctcgcgcccagtttggaagcctgcctgcctcccctctgcactgtcatagccccgtgaaaccctcagctgcagccccgggcagagtctcctacctgagcacgcgctaggcgaacggggcgtcctgcccgtcgctggcccgcgaggacactgcccccaggcgcctcatggctgctatttagagaggcggccgcagtcccaggcgcagggagaagcctcggcccgggccatcagacagcccagcaaatcaggccgcccggccgcagcgttatctcggggagcttcctgtctgcgctgcgtccaccgtcctgcctggggagtgtgggaacgcctggaactccctgaggccggctttggggtggggggcaggaccctcctggagatgcccctgctaactctccaacccgaacatcccaattttgtttcttttttggctttctcttctttcttttcgttttttgaaaaaataagcatgactactgtggaaattcaaaagagcataaagaggagggacgctcatcacctggcaccaatcagacagaaacgagggcagctgactgatctcctttcctttgttcatatgggatttcgcttcaaaagtcagcaagagcttgaccacggcctgtggagacctggccacacgtgagtccggaaactcactctacgcatttaagtttcatttaaaggcaagtttcatttaatgccagaaacaaatgttagtcaggggctggacagatccagcttctatgcagcccgaatcttgcatgttttgggggatagcggaaccttctttaagaaaaagatacatataaaattacaatcataagaagctaggttcaaaggtgaatatttatttagactgagaaatcataaaataaaactgtaaaaacacaaattccacacacataataaaattaaggaaaaataatggattctttatttaaaacgtattattgaagttatacataaatttgacaacttagacaaaatgaaccacttcttgaaaacacgaactacaacatgcccagcatgaaacagataattcaacagccctatgccaaggaagggaattgaacttgcaatttaaacgctccccagaaagacatttcagggccagatggtttcacaggagggtctacaaaacgtttaaagaaaaattaacaccaattctacacatcctcttccagaaaatagaagaggagggaatatttaccaattcattttataaagttgattattaccctgataccaaaaccagacaaagacagaacaaaaacactatagaccaataaccctcatgaatatagatgagaaaatccttaataaaatattaacagacagaattcagcaatatagaaaaagatttatcaactatgaccaaatggggtttcatccaggaatgtgaggctatgtcaatattcaaagctcctttgataaaaacccattaacaagctaacaaagaaaatcaaatgaatatctcaatttatatagaaacagcatttggcataaaccaacacctttcatgataaaaactctcagaaaaataggtgcaggggaccttcctcaacttgataaagagcatctgtcaaaggcaaagccacagctaacatcatacttcatgggcaaaaatggaatgtttccttcctgagatcaagacaaggcaagggtgtccactcttacctcttactcaatgcagtgctaaagttctaggcacaccagcagggcccgaaaaggaaataaacagcatgtagattcgaaaaataaaataactctgtcccttgttgcagatgacatggttgtctacttagaaaatcccagagtctacaaaagagctcctggaaactattaaatcagtgtgacaggtgacaggatacaaggcaaacatttaaaaaaccaagtaggccaggcgtggtggctcacacctgtaatcccagcacttcgggaggccaaggtgggaggatcacctgaggtcaggagttagagaccagcctggccaacaaggcaaaaccccatctctactaaaaatacaaaaatcagccaggcatggtggtacatgcctgcaatcccagctactcgggaggctgacgcaggagaatcacttgactccgggaggcagagggtgcagtgagttgaggttgtgccattgcactccagcctgggtgacagagcgagactctgtctcaaaaaaataataaacaatgaaaaaccaagcagatttctataaaataacaatgaactcatagacaccaaaattcaaaataatatcatttacaattgctttaaaaaaggaatacttaggtgtaaatctaacaaaacatatatagaacttacatgctgaaaactacaaaatgctgctgaaaacctcaaaaaagatctgaataaacagagaaacacgtcgtcttcatagattaggagactcaccccaagcacag

SEQ ID NO: 2796 - DNA, 4001 bp, Homo sapiens
aggaaacagccaaggcgcctgaggagccccaagcttagcggctccattcacagacaaggaatccacgcccccacatctccttaggtggcaggagacaggcacctggccttcctcggtgagatcagtaaggagagaggagccccggccttaggaacccaggggcctggggaggtgggggccgagcccataggaagaggggtgtcatggacatctgaccatcccaggaggggcgggtacgtgctgacctctttgtttcttcatcgtgaagggcgttacaacttggaaaacaagaccaggcgcagtggctcacacctgtaattccagcactttgggaggctgaggtgggcagatcacctaaagtcgggagttcgagaccagtctggacaacatggtgaaaccgcatgtcttctaaaaatacaaaaattagctgggtgtggtggcgggcacctctaatcccagctacttgggaggctgaggcaggagaactgcttgaacccaggaggcggaggttgcagtgacctgagatcacgccactacactccagcctgcatgacagcgagactccgtcccaaaaaaaaataaaatataataaataaataaaactcggaaaacaaagagggcaatggaaactactcaacttgaagggagaggcccgggaaacagagggaaagggacaggaggggagagagggacaggccagaagggcagagtgcggacagcagccctggagcacagctgataaagagccgtggcgagctgggactggggctccgcagagcatggaagccacaggagcatctgtccatcccaaaggccatgcttccggatacttcctggcagcctttcgtttggttaatcattcgttcagaaacatttgtggatgccgaccaaatgtcaggcacagctctaggcaccaggagtagagcaagaacatttatgtttttattcctattggaagagacagacagacagacagacagagacagacagaggcaggggtaagcgccgtggggaagagtgaggcagagtccagtggccgggacacatgctgctgttcaggatggttgccagggaagcctcgctgacaggtgggtgagggcggctcagagaaagccttgaggcagtgcatgccggacagtgcggggagaggtgggctggcctggtgggcacagaggacaggagacaggagccggcgcccagcagctttgggggttgctctgtatgagacagagggtctggatcagcgagcggctttacaaaagggtctccctgctcttgagacgggacttaggggaacagcaacggaagcaaggagaccaagccagggtgaccacaacagcacagcgggcgaggatggcagctggaccccacgtgtgggtggaggtgatgacagaggtatgggatgcagtctggaagcaaagctgacaggttttgctgatcagttatgtgggaaatgacagagagaaatcaaagattaaagcttttgttctgagcagccaggtgaacagtgcagccagctgctgagaaacagaactgaggaggtgaagtgaagtcaggggctcgggttcaactttccgagtctgagacactatagactcctatgtgacccagtgggtggagcaatggttcggtttgcaaggcttgggggtcagggtaccctccattttctctcccacaattccaagccagctggccctctcaggtccaaaatgaaggtcaccttagctgctagagaaaggccatctgtggtggggggcttcccacatcaacagccccgtgagagccctgctacaaaagccaggggagggtggtccggacagatcccgaaagccagggccccatggagtctacagagaccccgcctctggctggcgagagcccacctttgccacctgatgtcctgctgcacgaggagttctcccagaaatgtgtggaggtcaagatgcccaagatagccctgcagctcgaagggaagtcatttgaaatccttctcccaaatctgaaaaaaatcgcctccaatggtcacagacaaaaagatgacgtggagacggctagggttactgccatgaacattccatgttaaatgtccgtttccactgaggcaagggttgatgaaggggcggggcgggaagggagagaggattagagttagggcggagccagggcttgggcacgcgcgtgggagagcttcacttgccgaagatgacagaacttaaatcctacctctgtgaaaacctacagaccttaaagctgaagccgtctctcatcccggatgtccaagaatggctcgggggaaaaaaggtactataaagcacaaagtcacagtggctcacgcctgtaatcccagcactttggaaggccaaggccagcagattgcttgagtccaggagtttgagatcagcctgggcaacatggctaaaccccatctctacaaaaaagcagccaggtgtagtgtcacgcacctgtagtcccagctactggagaggctgaagtgggagcatcacctgagcctgggaagttgaggctgcagtgagcggtgatcacaccactgcactccaacccgggcagtcagagtgagaccctgtctcaaaaaaaataataataataaagaaaaatccaaaagctcaaagtcacaaaaagtaaacccatgagctttggctacactatgatggtctacatggtccgcacaccaccctgtccacggcgaccctactcaaatcccggctccactgccaccacgccgaggccccctgcccgtgtgggaagggtggtggaaaaaggggttaattcagaaactgcccacatccccctttcttcaaacatcctacaagaatccacgaggaatcagaagtagagatgacttcacaaagcacaggagtggaaaggccaagaggaaagtgggggctcccgactcttctgagaaggggcgtggatgggagcccgccccgtgcagtgacacagccatcacggggccgggcattgtcctgctgaggctctcatcattcttaacatttataatggaaaatgtcagatacacacaaaagcagtaccatgaacttccatatacccattgcccagcttcaacaattattaatacctcaaggtgtcatttttgatgttcactttctagttcattaggagttaatgtgtgtatacaactacacaatgacgaggtctaaccacacagcagacactggtgagtgcacctgcctcaccggccccaaagccccagccccgctcccatccacgcgccctcccctgggggacgccatcctgaatgcgaacttctcctctggcggggtttaagcaggattcctacacattatgcgttcttaaaccatattctgtcacgttttgcttgtgtttggttttgggacaggactggagtgcagtagtgcatcttggctcactgcagcctcaatttcctgggctcaggggatcctcccacctcagcctccctggtagctgagactacaggcatgtaccaccatgtctgggcaatttttgtcttttttgtagagacaggttctcaccatgttgcccaggctggtctcaaactcctgggctgaagtgatctgcctctctcggcctcccaagctgctgggactacaggtgtgagccactgtgcccagccttgcttgcttttgagttttgctttttttttttttttttgagacagagtctcgcactgtcacccaggctggggtgcagtggctcgatctcagctcactgcaagctctgcctcccgggttcacgccattctcccgcctcagcttcgcaagtagctgggactacagctgcccgccaccacgcctggctaattttgtgtatttttagtagagaaggggtttcaccgtgttggctagaatggtctccatctcctgacctcatgatccacccacctcggcctcccaaagtgctgcgattacaggcttgagccaccgtgcctggccgcttttgagttttataagatatcacagcacagtatccatagtcttcag

SEQ ID NO: 2797 - DNA, 4001 bp, Homo sapiens
cgtggacagtgcttgactgtcacgccacctgcttacaagctgaacaaactcgtgtgccagcgacttcacatccctgctggccacaacaagtgccacggcaccccagggccatgggaagtcagagaggagaaagccaggacctcagcctgcctggcttgttctacacaaggggagacggcacagacaggccgtcaggtgtcagaagagcaaacctcccacagcgcatgttattcaggccccattactggttttatcaatgttgttttaaagaatggcagtaaatgattttaaaattaatttgataggccaggtatgttggctcacacctgtaatcccagcactttgggaagccaaagcgggtggattacgtgaggtcaggagttcgagaccagcctggataacatggtgaaaccccgtctctactaaaaatacaaaaattagccgggcgttgatggtgcgcgcctatagtcccagctacttgggaggctgaggcaggagaatcacttgaacctgagaggcggaggctgcagtgagccaaggtcgcaccattgcactccagcctgggcaacaagagagaaactccatctcaaaaaaaaaaaaaaagcaaaaaaaaaattcatttgataaagcctataagaagaactatgacctttcatatttctgggaaacacatttgttaatacagataaatgttttctcacctacagccatttttttaaccattaaaaaaagacttttttcccattaaaaggagttgtcattctctctaaatgtaaagacaatatattattccctctaaatgtaaagataatatattattattatctgaaatggcctggaatggcaaataaatgtcatctcaagcaccaccagcagtcagcggcagcctgactcgtgtgctcaggaagattctccagccaaatgtggagttggcagaggtttcaggatccaaaacacagggggttgtgggggttgggggggcggcgcgtgctgtgtttctcagaccagatgccaccccgtgtccggggccgaacggcgggactgtgaggagacaggccgcggcttcttcatcccagccctgagcctgcctggtggattctcaacggacgcttgtctaatgaatggtgactgcgtgtgtgtctgtttccttagaagctggcactgtgccgcacgctgcctctcctctttgacctccagcgaccctggggggctacggcacatgctggggccggcagggatgaagtctgctggcacacaccattttctccattgagtaacccaattcctgacatgctgggtatcctgaatccttctaaaccgctccttgcccctggtgctcgcctctcgcttgcggactcgcggggcacgtgctggacggacacctgatctgctccctggtcgggctcgctgcctgcacagggttagtgctttgtaagtcactgtcccagagcaaggagcaggggctgggtccccggtcactgtgtgcccactcctggtgccaccactgcatccccacagagccccaagctggcatcgcctccccaacctcacggaccaggaggccgaggcttgggaggacaggtgacccgtcacgcaggacggctgacccacagcaccctcagacctgccctacttcccagcctgcaaaggttgagaagggaccctacccatgtgggaaatgacagcacatccaggggacccaggacgtggacagctgggaaggaccctcccaacagcacctgggaaaggcggcgcccagaaaggaccctggagcccaccccacggcccccaccagtgcaggctactgacctggcagggcgcagggaagacaaccgtagggactcggaggcacccaccacattgggcagggacgtgacctccacagccaaaagtccagctctccacagccaccgtttccaacctaaagctgaaggttccactcacaaacccacacacgctaccacaaagtcagggccaaagccactttcaccaaaacttctgagagagccgtaggcatccaacagtttaagttgcttccaacataattaaacattttctaaagcaggtacatttatcacaattaaaagcacaaaggccactgggcttgtctgggctgcaggacagtccacttggtttccaacagcagggctaacacagccggaaaaaagcccccagccagagctgcacagcctggcagggtggccccgagctgtccggaccctgtgccccgggagagggctgaccttttcattttgtacaacacgggctgagcagggtttgtctttcgtggtgactgttttgatcatgggtttgaatctacttttctctaatgtttcaataaaaagagccgcagacgctccacaggagaagctgaaggcccaagcggaccgcggatgaggagggggcggaccggattcaggttgcaaaaggtcaatgtgcccctccccctcctcaggacccacgtgactcccctcccctcctcagcacccacgtgactcccctccccctcatcaaccacgtgactcccctcccccgcctcctcagcacccacgtggccgcccctccccctcctcagcacccacgtgactcccctcccctcctcggcacccacgtgactcccctcccctcctcggcacccacgtgactcccctccccctcctcggcacccacgtgactcccccgccccctcctcggcacccacgtgactcccccgccccctcctcggcacccacgtgactcccccgccccctcctcggcacccacgtgactcccctcagcggcggcctggactctgctgcggccggtgcagccccggccctgccacccgacactggcacacactctgctgtcccttcttgggttctgtaattttgaacaaggggcccacattttcatttcacaccgggctcccccaggcttggggacctgttgcctctgctttgtagaagctggtcattttcttacttgaagatgctgctctggaggcttcagataccgcagcctcagggactttctcacccatgcctcacctgcagaactatctctatccgggagcagattacagacaaagcaacaagaaaaaaaaaagttcctgtcttttttttttcccctaaccactagaccaccagggattttttaatttttaaaataaaatattaagagctctcaggaagcaatgtagaagcacactttgggaacttaacacaagttgcaaattttctctgaccctcaaatttccttatctgtaaaatggtccacatgagatcatctcatggggaggatcacacgaggccatgtgtgcagggtctgacggaaagccaggtgccttccagcaaggtccccccggagagggctgagttgcaaataaattgccatcttcagaattaggaattccatggccgaagacagtttagacatcatgtcacccaacccttgatttccagatggggaaactgagacccaatggggtaagcagatttgctggggctttgtgcttttccgtggaactgcgcagttgcatgggagtctctcagctggcccggaggccactgcccagcagcccagagtccagggagcggttacctttgaggccagggacgaggatctgcacagagcaggcgtcatcgccagccggctgaggatgtccagatggcagcagtgacaggaaggccaggctgattagaacgcccaccagggccagattccccctcatcctgagcgcaggcaggacaccaactcctacacagaggaaggaataaacagtgatgggaactgcaacagccgggcagccagtgacagtgagcaggcctcggaggcaaggggtgtagccctcctggtgcctggaagggctgtctgggcccccatggcgggtgctcctcactcactcaagcaccaatcatgagcctccactgagaagcttccacagcagccccagggtcagcaccaggcaccaagtgcatgccagccctggtcagtgagccttgattgaaggcctacggctc

SEQ ID NO: 2798 - DNA, 4001 bp, Homo sapiens
tccctgggtatcctgctgttttatctcctaacaaaacaaatgaatcaaaatgtcgtccacctagagaggagaagtagcccccaatgtttggagattctaaagcattacctacacatgtgctgttgtctcttcttagcctgcagaagagatataggcctcatccccataggagaccaaacacctcaaaaacccagatgtcaaattttctaggaaactctcttggactgctcaaagagtaaaatttgatagaaataggaagcatttggccgggccgggtggctcacgcctgtaatcctggcactccgggaggccgaggcaggcggataacgaagtcaggagatcaaaaccatcctggccaacatagtgaaacccagtctctactaaaaatacaaaaattagctgggtgtggtggcgcatgcctgtaaccccagctactcgggaggctgaggcaggagaatggctcgaaccccaggaggtggagattgcagtgagccgagatcgggccactgcactccagcctggcaacaaagcaaaactcgtctcaaaaaaagaaaaaacaaaagaaatagaaagcattcactagtgatttatgactgatatcaactaagattacttagaatgtctaggatcacacctgagatattactccttacatttccatgagacaatccatttactgtgtgaaatatttgttttcatttgctttttttctggattcaaatcctgtaggcaaaatcagtttaaaaaaatacagaagtgccttttaaagaataaacagctttgaaaaaatagcaaattcaaaaggatagtggattaaatttcaacactgactttaatcaaaatgaattttaggctgtttagattccctggacctgtttcttaaatctttaccatgggtgtccactatataaggtttttttttcaagaaacaaatgaaacaacatgtaaaacatctcagtacgttcctaacacataggagacctataaaagtcagtaatttttttacagtttgtctctagagtacattgacactacattcctataactagttctcggtctaaatagagttgtccaatatgatggttattagccatatgtgactactgagcacttaaatttggcaagtccgagatatgtgctttaagtgtaaaatactggatttcgaagatttagtgaaaaaagtaacaaaaaatcttgtcaatattctgtatattgattacatgtgaagtgataatactttggctattctggattaaataagatatattactaaaatattaatttcacctttttggctcacatatttctattggacgatctagtctatactttgacttcaagctggtaattatgctcttttaaccacgcagtggactgcttgacagatgtcactcgggctaagccaccccttatccagcagacactggctcattttaacgctcccaacttccacaaccggggaaagctagcgacctaaaactcttaattttaaaaacaccagatcccacagatctgctgaggaaacgcgactgttaccaagagacagaaatgtcttgaaggaaaaacccctgtgggtgtcagtctaccgggggactgggaacttcagcagaaaaagtcccccttaggaaagagagaaggggcgacagaacgagcaaatctgaaggagcccgatgtggagcccacggagtggaggtctgagagggaaaagcctttcggcttgtgaggacaggggaaggcaagggggggagagtctgaagccagcggccaaggggttctgctccaagccggagactacagaaaagagcagtaccttaagaatccccctcatctttgccagaaaggggcggaactcctcgggtggcacctctggatatagctggctccgtagcagctcctctgtgatgccggggtacccgtggaaagtgtcctgggccagcgcattcagcagcccgctcaggggtttgccaccctcaagctcgcccgccgccatgctctgcgaaggccccgccccgcaacagctgagccgtgccccgccacggcggccgagatgtgcctaaatagcctgtgcaaaaccaccacggggaacctcggggaacctggaggcaaggcttccccaggggtcagagttggcagcttacagctttgctctgcaacacccatccccttaggatacctccacggaaatatccgtttggttccagtagggtcactttgcttcccctgatccccttcatcactgcagagcctactggaaagaaagattgctcgcagagattactggagatggggtagcagcctataagtttggcagtttaatttttagatggctgtatctcattccaggacttgccaacccattaactgaataggatcgatcactcagatttaatctctgcctaatccttacctgtcatcctttttttcaggaagtttaactatctcctgattacataatgtttttctttgggttgttaattgcctttttatatacacttgtctttccagctagatcagtggctctgatccaatgttcttttatatgacaaatattttaacaccttatttactatcctgaaatgaaatgcatagctaatataacttcccacccatataattttttaaaatcaatatattattcagccataaaatggaataaagtactgatacatgctacaacgtgaatgagacttaaaaacaggattagtaaaagaagccagatataaaaggccaaatattggacatccatttatatgaaatgtccaggatagacaaatccatggagactgaaagtaatgtaatagttggcagaatctggagaaggggacgaatgggtagtgactgtttataggtacagagtttctttggggcatgatgaaaacattccggaagtggaagcacaaccttgttaatatactaaaacccactgaattgtacactttaaaagattagtttcacagtatgtgaatatctcaattgaaaaatcaatttaatgacctaattgtaatttatcataaaatgaaaaggaatttataatataatatgtgtgtttgggtacacctatactagttgactaaaagacatacaaagtagccagatgtctgcatctttacatctttatgtagaaccacctgtgacttctacaaatgcaaattgatacaggtgtgtggtattggtgactccagagggagggcagttgcttctggtaacatgatgttctgaaatgttaagaactgatgttctgaaatgtgaacaacagttggtaaagtttacaacaaaaaacactctttcctcactctacagtcattgcaaagctggaatattctgtatatattaatgctaaactaaaaatacattgtgttgccgggcacggtggctcacgcctctaatcccagcactttggaaggccgaggcagacggatcacgaggtcaggagatcaagaccatcctggctaacacggtgaaaccccatctctactaaaaatacaaaaaaattagccgggcctagtggcgggcgcctgtagtcccagctactcgggaggctggggcaggagaatggcatgaacctgggaggtggagcttgcagtgagccgagatcacgccactgcactctgtcgcctgggtgaaagagggagactccgtctcaaaaaaataaaataataataataatacattgtgtttctatataaaatagagtttgactttaggcttagataataacaaacaggtttttcacctttatgaacgtaccctgcatgggaagatgtcttatatatctgacctctctcccacctattccattcctacccttccttcaaagtgacaactgaggtcgggcatggtggctcacgcctgtaaccccagcactttgggaggctgaggtgggtggatcacctgaggtcaggagatcgagaccagcctggccaacatggtgaaactgaaaatacaaaaattagccaggcatggtagcacatgtctgtagtcccagctactcgggaggctga

SEQ ID NO: 2799 - DNA, 4001 bp, Homo sapiens
tctgcaaagcatatatcaaagaactccatatccagactgtaaagaactacaaatcaataagaagacagcccaatttttaaaagttgggaaaagaacaggcacttcacgaaagaggacgttcaactagccaacaagcacattgaaaggtgctcaacatcaggaaaaatgcaaataaataccttaatgagataccacattcagccagaacggctacaattaagaagactgacaacaaaactcttgtgttgacaaggataagaggcacctagaactctctcatattgctggcaaaggcgtaaattggtacaatcattttgaaaaactggcaatgtctactatcactgatcatgtgcataccctccctacacactagcaattcctctcctagaaatgtgtgcaagtgtctacaaaaagaaacatgtaagaatgctcactacggctttgctaataatagtccaaaaaataacaacccaaatgcccgccaacagtggaaaagataaattgtggtataaacatacaacagaatactattcagcaattaaaaggctacacacaacatggatgaatttcacaaaaatactgataaagtaaaaaagccagacacatactgtacatactgtattattatatttaactggaattcaagaacagagaaaactgatctatggtgatacagtcagaagagtgattatctcaatatgtaaggatgtaatactgattgggagggagcactaagtgtgctagaaatgttctatatcttgatttgggtagtggcgacaggggtgtatacctatgtgaaaattgttcccatactgtatgttacacctcattaacaaaaaaaaaacttttttaacatggaaaaaaaattcaagttcaaatgccaccttgtccattaaagttttgccagctgcaatgaaccttttcatcagggcctccttagcattctgatgtcatttctttatgccattttatcacactccatcttgaatctcagtggagtctccttatttccctaaatatatgttcatcttcctggtggcagtgaccatgtccttcaccttttacccactcagtgcctgacaaataacaggctgaaaagatatttgttgaattacatggaagaaaaaattgggtgagttcccagatgggtgaaagtggggacaggcagaggaaggaaggccaagagaaggacagaggaggtttccaaggaaaccgtggctcacactgtaattttacctacttcctgaaatcacattaaatgtcaccttgagtggcaaaaaacaaaacaccaaatcctacctaggctgaaaataaataaatatcacactccctcactcgcaagaaatccaccaaataaatgctacctaattctgggtgtttcaacagtggataggaaaaccgttcaaggagaataattcacattgccatgctgctaaaaatatcacctccttagtgtggtgcaaagagtccagactgcaagtcagccgacttagggctgaattctaactctgcccgaacttgctgtgatctgtggccaatcccttcgcctctctgggcctcaatttcctcatacgtaacaacaggggatagattagcaaagtccctttatgttttgatattctgagtatacaatccatagctctcccggtgcaaaccaggaatacagcaaaaaaccctgaaatacatgtaaaaggcgcctcagaccaacaaacaagcacgatttgaagaagtcattttgttctctttcacggtttaatcagtgtttttgtttgttgtttgcagccttaccatgatttgcagatgtctgagttccatgtaaacagaagttaactctctgcgggctgtcatcttcttttgagggtgagaagggtcttcccgttgggtttcaagtctcgggattccgaaacgaccaactcagcgggcgggtttgtgaatttgcgcacactgcgcggcacactggagtctaagttacagaggaaccgagtgcaggggatgctgggatttgtagtccccgggcctctttgtggtgcgctgggatctgtggtcccccgagtgcgccgctggaatgctgggaaatgtagtctctgtcgcgtcgcacagtgcaactcagctgccgtctcagacggctagtgtgctcagtggctggagcaggtccctaaagcctctgcagatccgaagccaaccctccgctgggacaaactctaggcaacaacaccagatgaatattgtgtcctatgggacttcccggggagggcccttcccattgacgttaacagtccccctgcgaagccgctgcgcgctcctactggctggttgagatgccaatcgccaaggctggctttccattggttccaggagggcactgcgaggctagggggaaggagaagggatcagaagcgggagctgaggggagagagaggccggtcctggtctggccgctgcggctgctagcccgaggtctccaagccgggctgcggctccatcctcggctcctgggcaccgtctgcgaggctccgccgaccagagtgagaaagccgcgggcggcgaccgccgcatcatgtcagccaaggacgagcgggccagggagatcctgaggggcttcaaactgtatccgtccgggagcggggcggggccgggaggacttgggaggcggccgctcactgaggagactggccgggggcgggggccgcgccaggtgggccccacagaagaagggccgcgggaggggagaggaaaggaacagcgtgccgagcacccggcgggacccggcgcgagaggcgccccaaggggcgtcctgagggaggaaggggacgttgacgggagcgccggggggtggcgggtggagacgggggagcctgggggacggggctgcgagaggtgccgggcgtcggaaacgctgtcggagaagccggctgggttccgatccccggccgggacccagaggccgggatggggctgcggcccgcggagaagggctgagggggcgcggtgggctgatctcgaagcctagaagcctctttggctataagcctacccggggagcggggaacagtgacttggagcgggcgaccttgtgtgggacaaataccagtgcttttaaaactctctcaggtcccccaccgcaccgcaccgcaccccacccccgtctggtttccacaacttctcttccaaacttgtggcttcttccaggactggagtagttgggggaggtggggaaagagaagtccaagatcgacctcgtcttaacactcttggccttctcaggcattggtcactgcttccccctcagcgcctcagttttctttccagcaagatgaggaccataggcttaggtgtggggtgcctcgcgctgggactcctagccgaggtgtctttgctcgctcctgtcggtgcggttatgcctagctgtggtggagctgtccagcaatggtgtgatgtcgctggggccacggtaggatagagtggggtagagaaatcattgcctcgggcctgttgtggtgccccttttgcatcctctccgtaaggaagctttgtgttttcgtggagtgtgttagtctgtcaccatatgatgcagatgaaaaaatgcaaacttggatattcaaattttccattctcctgccaactttaatctcttcatgcatcctatctgtaatctatagtacgaacgttcttaaattgctccctcagtgaaaaggtagtcaccacttcagggctcctcccttggaggtttagtaaagcactgttttcttggtattctgttgcgttttcacaatgtccatgtcacgcttgcaaatttaattgctttgctataatcagaaaccaagttggtaatacattttagaccacagtgcaaaaaggaagttttggatgtacaagtgagatttttcgaatggaaattgatctatgctttttaaaaaaactaaaggctgtatcacctttgcatactaccatctgtgataaactttcagtactttcatgttttggtttagtagcagcctctt

SEQ ID NO: 2800 - DNA, 4001 bp, Homo sapiens
cgggtggatcacctgaggtgaggagttcgagaccagtatgggcaacatggcaaaaccccatctctactaaaaatacaaaaattagctaggctggtggcagatacctgtagtcccagttacttgggaggctgtggcacaagaattgcttgaacccaggaggtggaggttgcagtgagccaagattgtgccactgcactccagcctgggcaacagagcgagactgtctcaaaaaaaaaaaaaaaaaaaacagttcctgagtccagatgcaatgaccaccttatgagatgggtggagttcaacctggagttaaaaggatcttgtcctaaattctggtgtttgaaacacactttgtaaaagtcatttcacttccacctgtccctcctccagaggcaacaccttctaagtccttaaacctgaccaggacctaaagaaaaacacatgagtttctcagcagctgttttatatccacctcgtttatacattctggttaagaaatggaggatactgcctatacacagaggcaccggatgtaagcaaaagcaatcagttacagctcccactgtgtcatcagaatccaatctacagccagacagataaggaaaacaaaaaaccagacaagaaagatgtctcatttaatcaagtcaagtaagcacagataaagggagacatcattttgaaagaaaagtagcgatatattcaaactaagaacatacatgctgtgtaagaccatggggaaaaatccctgtattcggcctcctcctgatacgacattttaaccaaacgtgacttcagaatgtgtaaaaaaaaaaaaacctcaagaaaacgataaaaagatttgggaaaacagtgaaaatattgtatcagcgctccgaagacattaagtacaggagggtccctcaattgtgtaatctaattacacgctgagtgtacaggagttccaggtaagatttctcctccaagaatgatacatattagagcagcgtgacaaaatgaacgaaaaacggtatagtagagtgcagcaaagaacaatttgaagaatagtttggtgcaagaggaactaagttttgtgttggcaggcacacagattagttgccctttcacagtattagagaaacaagtatgtcgcctcacttagggttacctaagaaggtccggccagacacaggaaaaacaatgaagtgctggggaacaacgagtttgaggacggaagggaaagggaaaagagaaggggagaggatacgaggaagaaggaaaggagtagggaagaaaggagggtcggtgacggtaaagagggaaggagcgaaaaggcccttccaagaggacccgtgtgaagagacagatggggatctctgcaaagagtcccaatgttaggaggtgggggtggagagggggtagggaaatggagagaaacttctgtcccttcaaaaaatctcggcttaaggagcaaagcctgtgggcgcagagaatgtaaagagacggagacagtcgctttcttctggagtgggagggccagaggctaggcacagagcggagataaattcccgtcaggggagggcgctatttggatggactggagaggggcaaacgagcagcctttggggatgggagagcgaaagcagccacagcactgaagctgagggtcgcaagctgcagcagacctcacggtgggcggtatgctccaagcagggccgcaggcgtggagtgaggagccgcgggacgcgctccccaaggcgggggcggggcgggcacggccgcgggcttccttggcggcgggctctaagccggatcgtctggccgagcctggagcgccggccccgctcggcccaccctctcgctagctcctacctgtccacgccacctctcggtcctcttagtcgctggctcggcctcccggcgcctgcccgcaggttgtcaagcgtccatgatcaccccggcgtccggcgcttttctgtctccgccgacccgtcgcccgtgcagctcccccggaagcctcccaccgctgcactcgcgttccgcccacacaaggttccacccgccgcgtttacagccttcgacctccggtggggaagtgggagcgagggggcggggaagagtctgcagcccgggaaccaggcggggagggggtggctaggggcccaaggagaggaatgcggcctagacggtactgcagcccaaccgtcgccatcgccatcccgggccccaaatcctccccttaggctgtgctttctctctcaggagctccccatggctactgcgctacccctgggcaccgagatacattaagcctactaactaccacttattgagcgttttaccatgtgccaggtgctgtacatgcattatctcgttgaattctcataactgtggcttgtattattgttcccatttttcaggtgagttaactaagtccaaaagtcagaaagtgacaaagcttgctatctttgtcaaacccaggctatctgaggccgaagacgatgttcttgacctctattcagaaaatgttttaaaataagcaagagatgggttaagccaacaatggttctatgaccaaaatgtcattgatagagttgcatctggtgcttaccaactcccctgggaagatggctaagaaatgccacataattgaacacttaaactgattcctgtatacaccacagtctttcaggtcttgaaaatgagagagaaaaacagccctatttgcctatcgtgcgttagaatgcagaaatgagacaggacaaatgcaaaggagcctagcatcaaccaactcattcatttattcaaaaacatttctttagcacctattatgtcctgaaaagttatatgaagataaaacaaagctcttaccctcaaaagctccaatgtgttaaatgctatggggaagatatgacaacactttggaagcacagaagaggttggggaagaaaaaaacagacaaaaaggggaaaaaaggggggtagtgcccattgtcacagaggctcgcactgtgcagcatatactgatgtcaaaaagaaacccagagtggtttgaccccagggttttcaagagtgagaaatgaggggtacagagctggagtcaggtcatcaaaggtcttggaatccacatgccaggtactggggaattacttaggctttttaagctaaggagaggtatgaataattgccttgttagagtgatcatgctaggtgctataggagtggattggatgtggagagaattggaggcagggaaaacctccggtgaggtgaccgatttattctagataagagattgtgttgccgggcgcggtggctcacgcctgtaatcccagcactttgggaggccaaggtgggcagatcacctgaggtcaggagttcgagaccggcctgggccacatggcaaaactctgtctctactaaaaatacaaaaattagctgggcatggtgatgcactactaatctcagctactctggaggctgaggcatgagaatcgcttgaacccaggaggtggaggttgcagtgagccgaaattgcgccactgcattccagcctgggcaacagactgagactgcatctcaaaaatacaaacaaaaacaaaggtagtggcaattggggatgaaaaagaagggacactgttggagacatttagactatagaatctataagacttggtgaccagttgaatataaggagagggagggagcataacacccaggattctgcgctgggaggccagagctgtctagagctagtgttaagtgaacagggctatggaagaggagggacaaatatgagagtgagaggaagacaagtgagtttagtgtgacttcatagaaattccagcaatgcctctacttcctctagaacaatgtccagactccatggctgcaatttggatttagtattttggtttttttttcccttaagagacagagtcttactctgtcaccgcggctggagtgcagtggcactatcatagctcacctcagccttgaacttctgggctcaagggatcctaccacctc

SEQ ID NO: 2801 - DNA, 4001 bp, Homo sapiens
atgaatttactgacgtaatttgtcataataaattgaaatgttttctagaaagtatatgtaagacaatgacgacctaatcataattcattaacctatgattcaataggaaatagacgttaacaattactgtaataaaaaaggtagctcgttgtgcctatgtttagtggtgctacttcagtgcagaaatatttccatataactttgagaaacctgttgctcttagctttaggttaaacatacttacatgtcattatggagcaaatataaagctagaagctgaccatacactgggggtgtagcaattcctccaggggcctagaaggccaaaaatgaaaacaaaacaaaacaacacaaaattttaaaaacctcatttaccctttaactttcatttttaaaataatattttataaatgctaattttaaaagtaagcctttttagtctaagactataagtaatcttatagtcctattatagatttagaaacagcttagagaagtatcaaacacgaaaattctgagtattaagtttatattcgtcatcagctttgatttatctccctttgggcttcagtttctttatacattcaagaatatgtaagtggatccccttccccagttctcaaattcccatttaaatgatcttactattataagaaacaaattcgacagattcctgaagcattctgattctgcccattacatcaagcgtcctgaataagagacagaaaatcaccacagctgcgttgcaaagacaattctttccattttaactcaactggaaagtatctattatctattagtgagctgctgcttctggatgttgtctcctttatttaattttaaaactaatgatataaaccctttttaagtgtctaagaaaaacattaactttaacagctgcataactttcatctgtcttactgaagacaaaatggcaagctaacttgacaacattacgagaaaggctttgtgagttaaaaaaaggttacaatggtcacatttttcttggtgtgcgtgtgagttgcggtgtgtgtgttagtgtgtgtgtgtataccaagatctttaataaaacccactttactaccctctcccaacccgatactgggaaggaaagatgcctaattaatatgagctcatcggtaggtgctggagcaaagacgcacagggttttcgggctcacaagctgaagacacataacaaaaaggtcccggcgagttcggggagaccgggcccggtcggagcaggttgcggcggtcagggatccacacgtccacctcccacgcccgccccgtgagctcccaaagcccgctagcctcagaccccgttaccctggaaactggtgccgccccagggcctaagactactccgcagtttctcccagcgcgacgcaaagggttacctcgagctcctggttctcgcactgatccagcaactttttgaaactaaaggcgctttccgccatcaccgccactggcatcttcgcggccggcctcgccgctgcaccgtccggacagccaaaccccagactgtccctcaggcgtcgcgcccgcgatgacgtttaaagccgccgttgccgccgagcgcccctgcgtaccagaccgtcagttccggggcgccgtcagacatcgctgcggccgggatagggcgccgccgttctggccggctttctcggtgccctggaggacctggccggctccgcgggaagctgtactcagagcgcgcggccgccctctggcagggaggagttcgttgcacttttgagggttcttcacgaagacatccaatacatagaaaacaagtaacagcaacagtaacgaatttttaaatattaaaattgctggggaacacgacggatcctgcagctgctcggctgtcccggtcgtcagtgacgctagggctccgcaccgtaccctgcataccgtaggtgctcacgaaacgttcgtgagttccctgctctgaggaaacaagcttaaaaactcagaatctaaggtgtgagtctccgcaaacctgcttgttgggcagcgtcccccgcccgggctagccctgcacgccccaccccggagccacgcttctccagccgggacccctgcctccttccaggctattctcggaaccgcagccagagggaatttttttttcctttcctgaaacgtagagcagatctggttactcttctgcacaacgccctaaaatctagggcccttcccatccctcagaatttacatctaattctcagctcccctccggcttgctgtagccatcctggcttttgtttagcacagcacttactgttagtgacattatattgtatattattaacatatttgtgttttacatccctcactagacccccaggaaagaggctttgatgtgttgcctgctgcaaggctggctgcataatttgtggagctcagagaaaagtgcggagcttccttgttcaaaaaacagaaagaaagtgcctctgaggtcataaaatataaaactttctctttcctctcagtttctctcttttcatagtgtttttatgtgttatttaatatcattccaagaaaaatttagatttaaattgttagcatgaagttcaccatccatctttacgttgtgcaatgccagttttaaatactaatataagtgcactgatctcatatgtggaatcacagaaattatgcaatttgtacttcatagcttatacatgcatatagattttgtttttaccagaaccacgctggtaaaaacagatgctgcacaaagtgaacttgcccgttttcatcgcactttacgtgcacgaattctacctctactctcgacctgggactcaccgatgcgtaaggaaggactgaaaagcaaaagaactatggactggccttttggcatgatcaggtgtctaatataaagaagtgcatgaataagaaaatatatgatatgagtgatggttaatactgactgtcaacttgattggattgaaggatgcaaagtattgatcctgggtgtgtctgtgagggtgttgccaaaggagattaacatttgagtcagtgggctgggaaagttcgacccactgttaatctagatggacaccatctaatcagatgccagtgcagctagaaatgtaaagcagacagaaaaatgcgaaaagagagactggcctagcctgccagcctacatctttctcccacgctggatgcttcctgccctcgaacatcagactccaagttcttcagtttgggacttggactggctctccttgttcctcagcttgaagactgcccattgtgggacttgtgatcatgtgagttaatacttaataaactcctctctctctctctatatatatatatataaatatatatatcctattagttctgtccctctagagaaccatgactcatacaatatggtttcttcatgcttcttaagacaccattgccttctttctgccttcgaaacaagtttactctcttaaggggaaaagtgcggccttttggggtgtcagcacccagctccctcagttgtagatacagcacgagtaccttgtgctcactttgagtcttgctggcctcgcaacatcaggggtccacagggaattcagtgtgcatggtgcattatgaatgctgtatggaacatcagtggccacacgtagaggcccgtttccctggctcatgctccattgtcttaatggacctcacttacaaaccacaagtttacagataaaattattaagcatttcaagacagagacagccatccttgattttttttttttttttggcgtaatccacaacatctctgtgtggaaatgattgtttagtaattccctgaatgaaatgtaaagaaaaaaaaaaacacttgtgtgttcctcaaggaactgccaacattaaatagaagggcacataagtagttagcagaactagagagatcttggagtaataaagcaacagagtttcatccacggctgcaaggaagagaaggactgagggcagtatgattctaagatcacttgacaga

SEQ ID NO: 2802 - DNA, 4001 bp, Homo sapiens
tgtatatgtgtatgtgtatacacacacacacatttttttttcttttttttggtagagacaaggttttgccatgttgtccacgctggtttcatgagctcaggcaatcctcccgcctcagcctcccaaagtgttggaattacaggcataagccactgcgcccagtaccattcatctgttgttggacacctacgttgattctgtatcttaactactgtgaacagtgctgaaacctttacttgaaaaaagatgagacctttgcttctaaagaggtgaattgggtatctggttgactttttactatatataaaggttcatgtatttactgggaggcaatacatgaacctttgtaccaggttcatgtattgcctcccagcctacccaaaaaaatacccttacacaatctgattacaagcctaaggaaaacaccagtgtttaaagcaaactaacaggacattttctgatcaatctgcatgctatagttacagtggcctggacagcacatctattttcatgcactgccaggaatactatgtcttaaactacgatatgaagatacacacattcatatatacagttaaaccatgaaatgaatactggacaactggaccacatggagaacagcttttttgtcactcgtcttccagtaccactctctcatatacttaagtataataaaggtcagaatctgatgcttaacattggaaatgaacgcaaactgccgccctcattatcataaacagtatttatcttggaactgaagcctcaatttgatcattaaagcaactgtatttttctcaaaagtaagtgttatttgcaagacaacattttataagagtaatacaaacagatctcaagtatgatggcgttattctgcttgaaactactttttgaggttatttcctaaagcaggagtaattttatgattttgtttgtctcatccaacatttgtctaaagggatttggatttggtaaggttgttggtgtttttaaaaattcttcattgaatctttttttaaaaaaattatttccttgtttccagtagggtcggatcttcatttaatctaaatgtcctggggctcaactagatttgtgttttctctccccacctcgtattttgtacacctgaattcattttaaacacactaactttaattttcaagaatattacaatgttattagtaaaaggaaactaagtcgtacaagtatggtatccgtgtcccgacctccatctccacccccacctaccaaaaaatgaaccaaccaggaaaatcgaaagctgactatgcttcaaggttacaggacctgtaagttacagcagagtgaaaaaatccaagtcccttatgctggctgtatttagttttgtaaacactaaatggcgagggcaaagcactctttcagaaattgggaaaacgcatctgaccatctggcaggtagaaggaaccggagaagggggctcaccgccaaacacaaactcccatacagccagcagccggcaacccttctgcgcaaagttaaaactttccaacagcagtagcaacaagccataggggaggagaccggaagagcccaaaggcaccaatggccaaattgcttccaaagtcgcttcgccgatgattcaccgcctctcacgaggcaaacgagccacgaacacagccttgggcccaaggtgatgcgcgccgctcttgagtccctcagatgccaaacgcaaaaaaaagccttctcctctaaagacacggaaatgcaccgagtccggctctgcctcacccccaaatccttccggtcccccaactcggcagccaaaatcgaaaactactctcgtctcagcgcccccgctgttgattacctgccattccgcacgggcgcctgcgccccggccgctgtcgccgacttcggacggcatcccgagactacccttctcaaggccgtatgaccagtccgagctgccatgatagactctccgaagccggtcgtcacctcccggaccagccctgcagcaccgccctcctctggtcgggcccggagcccggctccggtctcttccagccaatggactggccgcctgcgcagcctgacacgccccttcttcccttccgggttgcacgtcgctgacacacgctgaccgtaaacgttcccgtcagcctgtcggccaatcggagctgcgggcccgccaggacacacctctctctcctgaccgaccaatcgcttttcccgtgcgctcgcgcaatttgcgtaatactcagtgactgctcagtccacgccccgcgcaggagctgttcctggattaaccaactgcctggttctcctggggtccgcttccgggaggctagtcagtgagccccacccccccgggggctgcgggaagccccagggcttgagtgttaattctgtaactgtccgaacccgtgagtgcggagccagacaggccaccactcctggctgcgaagcctggctgtcagcgtcctgcttgttaatgattgtctaatacaatgcctgccttgcctatctcacggggtaattgtgagggcaacataaggtcctgtcattaggaaagactcagttatccagcagcagttccgtctgccttcttcctgcgtgtcccacattttaattggtgttctcgtatgatttgggtttcccttattccatactaatcagacgacttcgctttgatttacttgttttggtgatcagtcatcaagtccagacttcttgttccctcagtttgttttcaggtctttacttaaggtttgtgcaccaatagttttcctgcaaactgtaaagtgaggatgacaatactacctatttaatatagtttgggtgtaaatgagattgttgattaaatgtagtcagatatttgtgtggcacctactagatgctggagaagtgagcaaaagtcttcactgtcacagagcttatatcctagtgggggaaagaaaccaattagtatatagtgcaatggcagcttgttatatgtcccatagactaaacagtacagcagggtaaggagatgaagagggaggaatatggtagggtgctgttttatatagggtggttaggaggggctctaagaggatgacactgaacaaaggcctaaaatgaagtgaggaagtgaactctgattacttgggagaaaatgggccgggcgcggtggctcacgcctgtaatcccagcactttgggaggccgaggcgggcggatcacgaggtcaggagatcgagaccatcctggctaacacggtgaaaccccgtctctactaaaaatacaaaaaattagccgggcgaggtggcgggcgcctgtagtcccagctactcaggaggctgaggcaggagaatggcgtgaaccccagggggcggagcctgcagtgagccgagattgcgccactgcactccagcctgggcgacagcgagactccgtctcaaaaaaaaaaaaaaaaaaaaaaaaagaaaaaagaaaaagaaaatgactttcaggtgtatggaacagcaagtgcagaggccccaggcaggaacaatcttggcatgctttaggaagagcaaggagtttggagcacagtgagaggaggaaagtggtaggaaataaggtcagcgaggtaggcagagcttagtgccacggaagccatagtatgctaccaattttttattgtattctaagcgtgaaggaaagccattagagtttgagtgcagaacagttacttgatctgatttacatttaaagcaatattccagctgttgtgcctatgattattttctcctcttgcttggtttattgcagtcaccccttactagatacattgaaatcatcagctacaaggtttgtcaaacattttgcagtacaacacatgatgtacttgtagattgaggtggttctgtagctgcatggacaattctgtatcaactactttcaaatacacaatccttgtatgtccggaattggtgggttcttggtcttgctgacttcaagaatgaagccacggaccctcacttgtgagtgttacagttttta

SEQ ID NO: 2803 - DNA, 4001 bp, Homo sapiens
ggcatcgctgggcctcgcctttgtgcagccaaaaccagacgacgctggtattgtcctcttcacctaaaagggaaaaaaggtggtttatggtcatccaacctagaaagggagactttcaacatgaatttcttttcctcagacatctctgatacacaagtaagactatggttgatatcttaagagatcagttcaagccctcctcccattcttcagatgaagaaattgaggctctgagttcacctatgagtaaactgaccttgtatcaaggtcactgtaaattctaacaattcccttgcctatgtagaacgcaaagcagggtccgttctggtatgtatccctagtgtctaaaatgatgcctggcatagaagcagtataacaataaatatttgctgggtgggtactccttcatgccgcactcccagtgagccagtcttaccgctgtgctgcgcttctttccagtaaggatgaactatcaggcataatgaggcttgagagtgtcaagacccttagacaaacttaccaacatgcactcacacactgaagatttgaggcagcttacacactattgtaggatatattaagcaagtggataaaaaatagaggtgaggtacttacagatgcagcctactattctcttgttggagatggaggggactaaattagggtcttccctggtgcctgaagctccctttggggccagtacattgtatgggtcctgaagaaaaaacaaaaaacaaaacaaaacaaaaaaaacaagaattgaaccattaggccaaataagccctaccttccagaagctcaggggactgttcctacaagccaagtttcctgtatcaaatactcccagagaggagaccactatgaacacatccaaggccataagttacacagaagacacagaagggagtttctccttaccagtcccttctttgcagccagcatgatctccctctccaacccagtcgcctgctcttcatcagtgggaacaccacctaaaggaagataacgtgaattatgacgctgactgaaatgactgatagaaaaactacaaacagaaatgatcaaggaaaatggtgccccgaaacttctgtataagttttagcgggctcacaagctcctaaaggctactcatatccatggtcccctaagaaccaccaagtacccatccacacaagcggcagcactcgggggagctttttttttcttttttgagacggagttttgctcttgttgcccaggctggagtgcaatggcgcgatgttggctcacgggaacctccgcctcccgggtttaagcgattctcctgcctcagcctcccgagtagctgggactacaggcgcgcgccaccacgcccggctaatttttgtatttttagtagaaacggggttttaccatgttggccaggctggtcttgagctcctgacctcaggggatctgtccgcctcggcctcccaaagtgctgggattacagttgtgagccaccgcgcccggcctatgagcttttctttctccaaccaccgaggcaaatttgtcgacatttgtctaaaagcatgtagaacccactctgcttgaggtgggcgcaggtttgaagggaggccggacccctccccatcccggtggcagccccggtccctcccaaggtcacccggcacctccgtttaggatactttcgcagcggagtgagttcggggagcggcaggagcagcggtccagaattacagggagatgcctgcagagcctgaggcactggggaccgtaaagcggccactgggacctcgagaagctgcacgagccgcgccgctttgccgccctgggaccaccctgggagggcaacactctggtccctggcacgcccggagacccgagtacctccagatgccatggagcgcatcgcggccgcgccactggggccgcgagccctcagggcctgcgcggccagcgttccagctccgcgaagtaaccttgaagccattgcgtccgcgactagcagcaaaacttccgggaacaagctgcagagacaggagggacttccgggggcgggcttctttctcctctcggtcagctttcggcttcctcccagccctcgagcccgcccactcccaagactgtggcgggggcggaaattgcgcatgcccagctctgcctctttctgcaccgcgtagtggctgaggcttgggggcggggttgcctttaataacgctgggaggtgggaaagtctttttggtccctggagttgagcggctgaaccacattggagttcctgtgggtctggccccgtagtcgtgttcagcaaacgtggaggctgctaatggaagctattaggtccccgtctgtgaagagacttactgaaccccaaatgatttgaatttagaagtgggctcctaaagatcactgcgttccttactaggctggttagtggcagggctggttctggcagtgcgtgggccgtcgcgagcgtgtcgcattggacgggacctacctgcagtcctggcccagtttcgtgttagagttgtactgtgtgtgggaggcgcggaggtcccggcctggggaggaggacagggccgggggcgggaccccctaccaggaccaaggccctggtgatgtgaaggaagtggccactctttttcgaggctactaagggaggaggagcaggaaggggagttgataataggaaatggagttagagcctgctgtgactggagttccttgtttgaaacggaaaacatattccgtccatggcttcccgttgcccataggctaagatgtgcaaatttcttagggtgagctttagtcagtatagccctgtgacaggctagctgcatgcggtatctgagtttccctaccagatagaaaaatccccttagagtgggaattaatgctcatcattgaatcttcaatgccttgcagaggtctggtatatagtaggatccagtaattttagtaaatttactacttggatagagtatacaaaaccagtttatagggcttttcctggcccagtgaggtcaattggaggcaacatggggagagttgaaggcttaggtgctcccgcctgtctcatgcaggctacggtattttcaaaaggacgtggtggagcgttgcttcacaggagcacgtctggtcttcctgggtgccccctccaccaattaaaaaaaaaaaaaaaaaaaccctgtattctaaggccaaaatttctttaaaggtggtttttgctttgaatggcttcactgttactcccttctccctcacctccactgcaacccctccaagttgaattgggcgaaaattctgaggatctgtagttaatttgcaactgtggttaaggtcttaggcaggagaaaaaagcattggtctggaaagtagccccaccagctagttcagctactttttatcctttgggccgccatttctacatcagtaaaactgtcgttcaactaggttagtatttcccaaagtgtattgcatggcatccaagtctcaagacatgatctcaagaaaaaggacttggtcaagacagggagggcctgcatttgatgaccacccttttggagatggacactagcataataaaggctctgattaggcttgcagtaaagacctcttatttaatttacctgcagtttaagccagagtttccctgtcttaattgaccacaaaatcctttctgaggaacacctactaacttgcccctcagcaaaccagtgaggtattcagctctgatatgttatgattccctgctgcctgaccagaagtggtttactccaggctataaaatggaaattgagtttaggcttctcactctcatagtaggcttgcctaataataggaaattttcgcaggccctcatccaactcaggaaaacctcagcctcactctgggattatttagattgtgtgagtgagctccaaggtcaggtccaggctccccagatgtccccgcatcccttgctgcttccagctcccaccactgtcaactcacacccagtccctcaggtctcctttgga

SEQ ID NO: 2804 - DNA, 4001 bp, Homo sapiens
actgtgactgtgccattgcactccagcctgggtcagagctggttccatttacatgaagttcaaaaaaaggcaaaactatctatttatgatgataaaagtcagaataagaaggtggcagggattgacagagggtacaagggaacttcctgggatgatgtaacatcttgcatattgagggaggtgtggttatacagtacatgggtttgtccaaactcatcaaactgtaacatttaatatccatacactggagaatacatttcatagaagcagatgatagaaatggccattttctcacataatctgtaaaagaagtgcaacactgctgactattccttccttacaagtcattaccaattcggtttcagtgagaccacactggtttcccttctcatccggactattctttaaacacattctccttctccacccttccctcatgtttctatactctaactataatccaacctttcttccctacaaattaccacctatgggctgaagacacccaagtttattaaactccatattcaaaaatctagctgctaccaagcatgacatatcacaaactcaacatttataaaccctaaactcttccttcccgttcccaccgcaactcccccactaacccccgaaaaaaaaaaaaaaaacttgcccttcttatctgagattagaatcatctgtttttgtttttagagacagggtctcactatgttgccccaggctgatctcaaactcctgggctcaagcgaccctcggcctcggccttccaaagtgctgtgatttacaggcgtgagccacggtaccagacctgaaatctttcttaaacatctgcctcttgggcaagctgcagtgtcccacagaaaaaggaaatgaagcaacagtaatggagtatcctttacacctcatctgggcccctcactactgcagtctaactgcgtatctcaccgacacttcccacacttctctagaggattaggagggaatatactatctcagacagcttctggtgaacagttaacacttatccagaaccaaccacctgcccaaactgctagtcacttgacacacttcatttaatgtgtactaacgccgccctggatgaaactgagctcacaataaattaaataacttggccaaggtcacacaattaaagcggaaaacgccatgatttgaaaaggcacgtctggggctctaaaatccctcatgtttacccccaacacatgctggagagtcaaactccaattggtagaatctgcgtgaaatggaatacttttcagacaacccaaacaacgagcatctgtcaaatattttacaatcgggaaagtgtaacctcgctgcatgcaacttccctccctggacgtgttaagtaacctgttaaatttcccaacccagatcatagccccccaaccccctgcaccatggtttctctaaacgcctttatagccccgcgctctctaatctcgagctcaagtgaggctgcctatggggctctggcagatgacaaacgacaaggaggccgaaagccagatgtcttcgaattgagggagaaggccggacctctgactcgggtcacactggggacccccacaaaccatcccttttagacaagtgaccccgggggtcaccttgacccctgcagtgagccagaccaaacttccacgccaggccagcccccgccaggtgagcaggtacacaaaaagaagcctcagtgaccaccgtacgctggtgtggagaggccccgggaggtgcaaggagaacagagacgaactcgaccgcgggcagaagcctcccctggctccaacgccgcgactgcctgtcgccgaggctagggccgccacttctcatgtccgagctggccaggcgccactcgtacctgcgggctataggcctccgaagcccatgctcctgccaacttctgcgtgaagccactaaacttgtagtacatgacgcccagagtccggcttcccgcatccgctgccaacgcgaccgccccagagaaggaccccgcctccccggctgtggtcccgagactcagcgcaaggacccggtgctgggactagggctgcccgaagatcgcctaacttaaaacctgcacacttaagccgcattggggaaccaaaagccagggttctcaggaccacgaaaggcaaaaccagctctaagagagcacgcaaagtcgctgtggcggagtctgtaggaaatatgaagttccctctttcccccattcagatttgggcagtgccacgacaactcaagaaatgcgcaagcgctccacggactaagcccggcggactaagcccggcagtgtcggagtcaggtggagcatgctttaggaggggcgggctccaggcggggcctgggggggagagggcggtgattggtgggcgtggtctgggtaggggcggggctacatcgaagccggttgggaattccaccatccgagagagtctgtgctgcggagccaccgtctggtcgtcgggttgaaggcgtctcttgctttaccgaactttaactgatcgtagtctcatttatttccttccgacctagagcacctcttatccagaagccaccacctgctgttgctcagtctgcccaggagtatagacttgtcggccaagcttcccctggcaacctgggagttgaagcaaataagaaaatttggaagcacctgctgaaggctgtttagtacccagggctgttgggagatttgccccaataatataaaagtagcctcctgggctttgtgcagaggaaatacacatgcagagtgatctaaagctcaggtaccaggatgtaaatgtcacacggtttctcagaactggtttttattctcacctgagttttaaggtcattgattattcatccttttcctggcctctgctctttgcgataaatgaggtagggggagggtgatcagaaacacttgtaaaatctggaccttgagcctgaaagatctggaactaccactttcagttctggtagtattcgcttcagttcaatttaaatatgtctgttaagcctgtgctgtgtgcaaggtactgtgtaaaaggagtatactagtttcttactctccagggatggactcaggcttttcttagcttcatcatctaaccataggtttacacaagcatattctagatgcacttatgaaatcatgttgcaaattgatggatgatactaacctatatatagcattgccctaaactcatttaatcttcacaacaatcctataaggtaaatgctattatcatctccattttagaatacaggaaaatgacgcctggagaagctaagtaacttgctcaggtcagggataagtggcagagctaggcatttggctcaagacttcctactgttaagcactatgttacaaataaatagatatgaagccattctgaaaagaggaggatcaaggctgagcattccagggtgagggtgtacaccagcatcctggttgcaggcttacgttcaagagccccaagtattcagcaccgccaatatgttgtaaaggtttcagcgaattcatgtaagccagcccaaagttgccacttttacaaagagacactgtgatataatggaaagaacatgcaatttgggtttatgtccatatttctccaaggataagtggtttgggactagtgatttccttttttttttttttttttttaaattctttttgaaacagggtctcactctgtcccaggctggagtacagtggtgtgatctcggctcattgcagccttgacttcccaggctgaggtgattctcctacctcagtctcccgggtagctggaaccacagatgcgcgccaccacgcctggctaattttttgtatttttagtagagatggggtttcaccatgtttcccaggctagtctcaaactcctgggctcaagtgatctgccaaactcaagactcccaaaatgctgggattacaggcatgagccaccgtgccaggcccaccccatgttttgatactgaatagattcaggaagattttt

SEQ ID NO: 2805 - DNA, 4001 bp, Homo sapiens
ttcaataatttaacctgggcttggaatctaattttttaaattaaagttttatgtcatgttcattgtacgatatttgcaaaatgaataatagttgagggaagggagaaaatatcaccaaccaaagataacaattaccattttagtacatatttttattttattttttaaagtactccattagatttatatacagcctctttcctttagcataaaacatacattttcctatgccattaaaaagttttatacttatttttctattgcatgaataatatcccattgtcctatatcacatatcagcatttacataacctaacatagacattcaagttgtttccaaatattagaatatatatattataaataaagttgtatcccagagctgcataaaactctttcagactttagtttatttcctcagtatagatgtccagaggcaggaacactaggccaaaagatttatgttttaaggctcttgatatttttaagcagcataattttttttgtatttcctgtaaaatatgtaagagtcttcatttccaatttatggatgaggaatttcagaaaggaaaataaatgccctatgtacatgaaaccaagtaaactaatggaaaaatgagaaagaaatattcaaacaggtttttgatatcacagagatcctggactctgtaagtatctgaaattgaactgaagataaggaacaagctgaggtcacacaattattgtgggacaaaaattggagtgggtttctatgttatgtgagagcaagttcattgcaagatttctttaaccatgaagcaaaagaggaaataccaattataaccacatatacttcatgagatatgctaaatgagcaaaataatgatttgcatatgaacaagggaaaaacacactttatatggaaactatacacacacacatacacacacacagatttcaatagaatgtatttagagaacttatgattcattaagagtagggagagaccacaaaaatgggcaaatgacattaatgggcaatttataaaatgataaaattagtaataaaatatttactcttataaatcaacaaaatacaaaggaagtcaacaatgtgtattttttacttgtcaatttgccaaacacttaaaaagtgctttcatacactgttattggaagtgtagactgatgtaatctttctagagggtaattgggcaatgtgtagcaagatccttacattttcctcagttactgacccagtaattccacttcttagagaaataattaaagatttgcaaaaagcaaaaaaaattatgtagctggttgctcatcacagcattatttgtaaaaatgaaaaagcaggaattgactaaatgacagaatattattagcaatttcaactgttttaaataaattgctaatgccataggaaaatttctgtaatacaatttaagtgaaatatttcagaaatagtgctgcatacataatcaggtagctatctgaaaacattaatagtacttatctctaggtgaaattatttggtcattttaacatttttcttaataattaggataatgtgatttaccaaatgagatactatgaaaatgaaggatatagaatttgtattacaattttctttttccaatcacaaaacatgacatgtctatttgtatatctcatgcattgtgttaggaaatgtttgctagatatttattcatttattcaaggattattagaggattatgattattcagtgataaatttcagtggtctttattattctcatctcatggtggtatatatgagtagcaaggaaggagaagccagctgcattggtcttaaaaagaaaccattcaatttagacaatctaaattataataatcagttcctcttcccactttacactcacctatcatatcccagccctccaggaaccagcatccccaaaagataaagggtttcaagcagaggcttcattctgccacacagtaagttagaaaattctgggcctctctggcagtggatcaagtgtccttgagaatgaatgcatcaagactgtggctcccacaatcaagatgagataaatcagttagtggatgtctcagcagaaagtcacgggcaattgctttattaactctctcatgtcctcaaacaccttttccagtgtgggaaatgctgtaccatttgatatttcatttcttctctaaaaccaaatttacgtgagctctcaacttcaccagatcctgaaataaatttcctccctatgtaaagtcaccttggagtatttctaggaacccccatcactcgtgctcaggagcaatcattcctgctcttcccctcacacaggttgaatgggaatagtaggctagtctttgtgaatcatgagcctgttcatgagaccagaaagaacactctgctctggtcaaaatggacatggtcattattcagaatctccacttcctccttcaatctaaggctttgattggggtcaaatgccttctctttttctgatgaaccacatcaccagcttcttaaacaaacccagatctcttcaaatctgagcagtgaagacagtttcaatcctttcccatgtggattttaccccacgcccctcttacatgaaggactctgtcagatactccgccatgttttcagacatagccaagttatgcttgaatctcattgaccagtaaaattaaagactcatgttaagaccattgctaatagtctaactgagcaaggcaaactttagcgcagagcaggtagagtatttaaatggagtccttggcatttagggacccagtttaaatcttctgccctgtattcatgtattcattctacaaaaatctcatgagtaccactgtataccagacactatgctagatacttaagatacaagggtgaacaaggcagagtcccttcttttatggaactcacagtagagttgagagaaaaataaacgagtatacaaacaaatgttacagtttcaagtaaagagaatgcagttaaaaaactagaggagataagcgcttccatgctgtctccaggcatgccatccacccagtccctccatgtgtttagcaacccagaggctctccaaactctgttcccttgtgtttttatgaagacttcattacataggtatgattgatcatatcattggtcattggtgattaaataaatctccagtccctctttcctccccagagatgggaggggattactgaataacatggctgattctcctggcaaccagccgctatccttagaaactttccaaaagttacctgttcacttaaacttagacatagtcaaaagggacgtcatgaataacaaaaatggccctttcacctttattgatcttatcactgaggaaattccaagggttttaggagctctgtgtcaggaaccagggacaaagacaaaatatgtatttcctattgtatcacaatatcacgatggtgtttaaagccactgggctagaggagttcatctagggtgtgggtatagacagagaaagacaaagactgagacctgggctgacctaacatttagaggacttggtagaagagaagaatccagcgagggaattgtgaagaacagccagtgaggtagttaaaaaatgggtgactattgtgtcccagaagccaaatgaggaaagcattaaaaacaaaaaaaatgggagttacccactggtcaaacgaggacgaagaactaaccaatcataaccagcaggatagaggctcctggagaccttgaaaagagcaatttcagtagataacgtggtggggacaaacgcctgcctggagctggttaaagaaggaaagggaagtgagaaagtggaggcggtgagtatagaaaactcagcatagcttgcctacgataatggcaccttaaagaaaactgcattgttagcattttgcatccttcccttgggatttagttaattcaaaaatcctgaatttgaattttgctgttcagaatgaggggtaaaatgcaacactcatgccactctcttcctca

SEQ ID NO: 2806 - DNA, 4001 bp, Homo sapiens
ctaaaattgttgccccccaaattcatacgttgaagtcctaactctcactatctcagcatgtggctgctggagaagggtctttaaagaaaagtaaggttagccaagtcaggcatatcacttgaggtcaggagttcaagaccagcctggccaacatggtgaaaccccgtctctactgaaaatacaaaaattagctgggcgtggtggtgtgtgcctgtaatcccagctactctggaggctgaggcaggagaatcgcttgaaccagggagtcagaggttgcagtgagccgagatcgtgccactgcactccagcctggcaacagagcgagactccgtctcaaaaaaaaaaaaaaaaaagaaagaatgataaggttcaatgaagtcataatccactatgatggtgtcgtaagaagaggaaattaggacacagacaacacagactgagggacaaccatgtgaagataggagaagacggcatctacaagccaacaagacaggcctcagatggaatcagtcctgctaacatcttaatcccagacttctatccttcacaactgtggaaaaatacatttctgttgtttcaggccacttgctatggttctttgtgtggcagcctgagtagataaatacaaacaataaatgttaaatacttttcttttgtatcagaaccaaggagggattctctgggttggttctctgacaaaaaggaaggaagaaagagaaggaaagcagggagggagggagggaagggaggggggaaggggggaggggggaggagggagggagggagggaaatattatttccagcaattaaaatctttgggtgtttacaagtcacatgctttgattatatttaaattctaaataattctacttcccttccgtttagacgcatgcttcacatcatcttcagaagtaaactccagataaagacttaaatataagaggtaaaaagctaataaaataaaatgtgggaagtcattgcagtctatgagtagacaaagacattttgaatatgaagctaaatcctcaaatcacagtgtcacaattagatgggtttaacttcatcgaaatgaaagattgtgattcaataaaggatatcctagaaaatgtgaacaaactaaagaaagtatctacaataactaaagtgaaaggagattaatatacagaatataccccacaaacacgggaaaaaaagaaacaaaactctttcaaatcaacaggaaaacaatgcaatcactaatagaaaaataaataaaggaacaggtaaagcccaattgtctaacaggtatatgaaggaaagttcaacaccattagccacagaaaaactaaaagattaaacatcagtgagattctacattattcattagaatggcaaacattagaacactagataataccaagtgttggagaggagatggaaatgacagaaacaattgatatgttggagtgaatactcttggagtgaacaatagatactgttagagggaatataaactagtccagcagttttggaaagcaatctaacaacattggggaaattaagtacagaatctcatatgatccagcaattgactgctgggtgtatgtctcagggatactcacacagattcataaaagcacatgttccaagaatattatttgtagtatggaagttagaaacaatgtccatcattaggggaaaggattagtaaaataagatagaggcatactatgaaaatatacaattaccatcctgccttgcttaacaacagtaatatttaattgcttaaagactgtgagtgggataaatggatagcctttaatcattaaagaaaaaataattgataaaatgtctctcgttttccttttctctcttgtgagttgctccttcaaacacccatcttttaaaacatgagagatatccagcttaagactcaccatgggcctcggctaaatcttcatgaatttgatgaggttaagaaagcaactacatttcctaagaaagcaactattttaaaagagcaaacctgggtgtggggagggattaggagtagagtttgggatggcagcctcagaaggacaaacttaggccaaggagggagggagttggggtggagactgagcttctccagttggaggtctggagctaggactcttcattgaaaccggagagaaggaaaaggagagagtgaggctgactttttaactgaactccaaaattctctgagcaatagaatgggcctaatatgtaccaggtgggatttaattttaaatgaaagaaaaatgtttcagatagcagggactgttaaaacattgaaattgaatgttgtggatctcctgctgtgttggttttcagtattttttagagctttgttatccagtattatagtccaatttaggctaaggaacagaataaatttcctaagagctgtaatttgtgttttcatgtgctttccccaaagtattatcaactgctatttgatatcctgtcctttgggcatatttttgttgttgttgttgttaatgatggtggtgcttttttgtttgtttgttttaagaaatgaaaagaaaagattggcaagtccctggagagacattatccccccaccccccgccaaattttatctattgcgaacagcagaaataccagcatgttcagatctaaaagcagtctgtttcttctccaggttaaaaaaatatatacttcttatgactctggacttaaatttgactttttaaaaataagaaaaattaaagaagggtaggaaatattggtcacatctccgcgtgattctaggtcctcacttctgctacccagtaattaaaataccctgcgttatcctttagaaattacacgcctgtgtctttaacaaactgtaagagagaagggggcgggtctcgggaacggcgaaggctctgattggccctcctggcaggaactgggcggtaaaatagcccttctgttactgtccggggctgcggggtgagaggccagggccgagaagggcttcaggacgcgggaggcgcacttgcttcaagtcgcgggcgtgggaacggggttgcaaaacggggcctctttgtccgggtgggttaagggccctggcagctttttcgcgaaggcgccatgtcctagcagttgggccgcagtgggcccgaggtccactcggaccgccgagacggctcgatggccctggagctggaggaagggggatacctgggcgccgccgccgccctcgcaactcggccgaggcccctatctcaacctagtttctgtttttcccctgttctgcaggcttgcttccggcgtcatggctcaaagggccttcccgaatccttatgctgattataacaaatccctggccgaaggctactttgatgctgccgggagggtgagtttaggatatgtctgcctgcatccctgcctctccccacggtgttcggaaaggtgctcatttttgcctgagagagttgagcatccccctttaaaaaaatacatgattcgacgataaatacgtaaattatttaaaaatacatgttaatatatacaaattgagctctaacataatgttaaatgtgtcattgttaacattattaattgaaataaactcaattattgatagtataaattttaaaaattggcaaatatgtagtttactatgtaattggcattttttaatgtattttggtttgcttcttaaaaagaggtgaagaatcctaacggtattcacatgtgccgtgttactcctttgtgattatacacaagtgcgttcagggtaatgatgagagcaaacggtggtgtatggtaaggacgtctttaaactgttagtgcttagagaatttggggacctaggaaacctgaagttctttgtaccggtgtcactccacagggcatatccacagctggaaaacaaaaaaaaagaaacttgtaaattaaactggttagcatgtcacaaatcactgtgcaaaagagaacctggatgtaaaatactaggggcctgtgttttctcatgcctcattgggtga

SEQ ID NO: 2807 - DNA, 4001 bp, Homo sapiens
atgtaatatatagggaaaaagactaataacttaaaacatctctgatttcaatgtgacttccaaagtttattaaggtttttctcttaagtaaaaaatttttggcagaggtttacattttatttaaacatatataaatatccaaaaatatatacatatatgtaaatatatctatgtgtggtattttttcaaatacacatatatccttctaaattttaaataatgatatgaatgtgtagtttatgaaggaaatgggtaaaaactttatcacactaacatacatattcaaattaaggatttaagtgttatattcttgtccatttgctttttagaggtaaaataatactcagtacatgatgttgaataacagttattctagttgaaacaaaaagaattctatcatctataatgattctgtagtctgaaatgtatctcatgtttacatagagctatggctttttggataatgggaaataaattctaaactaaacactattctttgttatgttattacaaatactctggaagaagtaaactttaaaagacattattttaaatcaaaacatgagaagttccactagacatcatcaagaaggaaccaaataattagttacaaaatgacagtctattacaatattaccagtcatcttttattaaacactagtatgccttacatcacttagtttttaaaaatcttcatgtgatagggacaatccaaaattcataaaccaaaaataagcccacatactgacctcaacccgagatgcaactagtgctggcttcggtaagactgatgtaatggtggtagcttttcctttctttatcagtgagaaaaaggaatcaaacaggtactagaaaaaaatacaaccaactagttagaagcttcaaaattcctaagttcaccagataaaacacaatatacccagttaaatttgaacttcagataagcaacaaataatttttattatagcatttcagctttttttgcttttttgtcaataactaaatatctgttagtgtgagaatttaatcaaataaacacttctgttcacttcaagtcttataaaaaagaagtttccaacaagcagtaaacatatcagataccttctgagaatgccaagtttttagtaaattgtatatcatttgtttcttctaaatcaaattctaggtggatataacaattgaagctatatcacttatgatatagaaaattagaaatactaatttaaatttaaatttctatcggctctaaaaaacagtttctgaagattattcttaatctttgccaaaggatttacttctgttgtttcactagatatgacaaattacaacaaagaatattcattttgcaattattggaaagacaaaaaaggagaattatgtgacagtggatattattacatcttaattgcaatgttcctaatccgaagtactaatatatgctaatttaaattttaaattaaaaaactacttagcatgtgttagatgatacacataactaaatttgatttatgagtttcatcatgggttggtaatataatactgattttggctattaagaaccaatatttcctaataatattaaaacaagaacaaaatataaatatctaaaacggcaattcagacatgagagagtagagcagagcttgcagaaagaaagctcttattctcttccccattttacctcgaagtcttttctgagagttctgacaatgaagatttgctactggaggcccctgggtgtggggaagtcacaatagacttcagatttttctggatatcaccagaagaatttatttggaaagatgggtttgaacaatgaactaagagctcacacacaaaaaagtaaaaatatttagattaaatacaaaactcctctaagcattccttgtggttcttttctgaagccgtctgaatcatctatgtatgtgcatgcatgccctctctcccctccaacacccttcccctccttctcctgctgctgtttattctcccttagtggctacacaaccagttgccatagggatttttgtgaagtcacagatgggggattaaaatttcatttcagtcatgagaacgagagagagcaaaagggaattcatttgcatagtacaacaattgtaaatttcagaactaaatatattagaatgataatgggtttaaataaaaataccatcgcttcgggtttcttaagggctttcccactttaaattttaaaaaagataaaaatttcctctgtgacattcatggggagattttaatacaaaatgtgtgttaccaaagcactcttcttgagaatgttctgctcaagatcatctggggtgattattttggtttctcgaatttccacacaaatacattttttttttgcatacataataggcctcatctttttgacgtacctcagtgtctattggccccggggtgacctctgggtggaactgcacagcgaagaagggtttgctctcatgcataatcccctaaaggaataagaaacaggaagaaattccttctgtaacaatgaatgtcaagtgtggctatgtattattcagggaacaataaagctcaaatttaaaaactgagttagatgcttaacaaaatttttgtaactaacagtactattaagtaacatggtccgatatcttaaggacttacatatctgacctttttgattaagtatggaaaatgggtcaatgaagactcaactgaatgtgttttcctttaaaataaataaataaataaaaaatttggtctatagtctttgggacccctctgggttctgttcagagtaaactcaagtcctcatcttatccccaagtccgaaattacttttccaagggtcttctcaaacactacaccagtgccaagtaagtcccagagacccacccagatggggctcaaacagatttggaccaacagcccactaacattgaatatatgagatagttgttgattaataactcaaatagtgaatcttaacaagtcaactgatgagagaataagagagagaaatgacgttttaaaacacagagggctatgggagaaaacctatagctgtttttcaacactcaaccccaaaaaaatcacaaacaaacaggagaaaggtatttgcatcatagtgtatttaaaaactctgggtgaatattctgagtgaataatttattgcatatttcaaaacagctagaagagaagatttgaaatgttctcaatacaaagaaataaaaaatgaggtgatggttatcctagtgtgatttgatcattacatatgatatgcatgtatcaaaatatcacatgtatctcataaatatatacaatgcttatgtatcaattatttttaaaagccctgcgtttctcatcaccaactgaacaggtttattgacatcatttacctcatttgtttgatcgttgacattcacaaaaagtggtttccagccagcagggagggtgttgtccaaggcatagccatgattctgagcagtaatgaaagcctgtttgtttgtgatattcaaaacaggctgattctgccctctggagagaaaaggagaaaaagaatagggaaaaggaaaagtgaagagaataatataaatgtattccttataaagtagtgaacaagtaaagcctattaaaattcaaaatttcaattgcttagtgaaaatcactctgtgagaaaagtcacagattgttaatcccagtaattttcccaacaaaaatcaattcaggaagctttgttgtgtgttaaatacgcaggtctattaaattctataatcggttttagaaaggggggcattgcactcataacaaaaagggttgctcaccggcttaacagaaactaagaaatataagtgacttactttaagagaactacaataattttaaagcccgagagttatagggagataacaaagagatgactgctcagacctgaattataatttatgtagagggtgggccatgggaaaaagcctgatgtttaataaattaatattgtttgaggcaaaaaagag

SEQ ID NO: 2808 - DNA, 4001 bp, Homo sapiens
gagtgagaagaagatattccaagtcacccaactttgaagtattagatggcacatataatcataggggataactttcattactattgattttctctgaactgatacatgagtaccttgaggtattactaacaataaattctcatagtttacatctagttacaatgtctttgatgttagtttagaatattctcctttcccattcttttgctataattaagctaaattcaagaaaatatatataactagacataatgccactaacctttagtgactgctcccagtgccctttatggccattatgtaactacatcctaatgattttaactatctttaaaacatgatgtccatttaaaaagagtaaaattggatacattggaatatgtaacaacataaaagacattttcctttctggttttcttaatttaaaatggtaatttcctatactcttgttagaatcttctcaatgttaaaggctgaagttgttaacacaccactaaggctactatatgtatttcctcttttctcctgggatcttgagctagtttctctctctttctctctctctctccctcccatccctcacacttctccccttcccctccccctgtctccatctctcttccttttcttttactcccattcctttcccatccctatccctggcagccacaggaatctatgaatattccttggccttgcaggtgtcaggaccaaaaccccactgaatcctgacttgagcaactgaaacaatagaagcttagtcaactcaatgagcatgcaaagtataagcagaacactccaaactgtgagttcccattttcacatcaacagacagaggttttcttttgttttttctatttcaaattttacagcttttgctgctaaagaagcaatatatctaaagctaatataattacttaaacttatagtcactaaagattattttcattggcaaagttcctatggagtaacttcaggcttctctgataatgaacgtcttcataaagttgcaggaaggagcagaggttcctacaggaatttcataattcaatgctggggggcaggaagaagggcaattaatgtttctttcctgggcttgccctctcaattatagatacctgtggagggacagaattatcagctgctatctgcctctatgtattactctacaaaatgaaaataataagtttagcctgcccaaaaaaacagccagaaggaaaaggaaaaagctaaagcagtgtctacatgatgacctgcaaatctcaaaaacacatattttctaattatgtttttaaaatgtttaaatgatatttcaaaagagaacttttcagtaagccctatttatagaacagaccttaacacactgtgtaccataatgtggctcacacacatataagcagctccattttttaaatccaaactgtaagcaatagtatctagtcacagaaagctatctatgaaagaaaagatgtttctttttcaagcagtgtacttacattttacatgttcacaagaattgtcatcattctttatgttgggtaaaaattactgtcatgttactcagataagataaaaattagcatttgctaagtcagtaggttccacagtaaaggaaacattaatacattagtacttcagagctacattcaaaactgtatttgccttgtaagggacacctttgcttcactgctaaactataccccatagtattttatcagaaacaatcaatatgggtattaccttgacagaaaggagcctgatgccaggtcttgaaaatttccatttttggtgtgcagtcacattggtaaagccaaaaccagtcttcagtgtcctcaccactttgaaagctgtcaaaatcctcgtcattttgatgatttgtggctaaaattaaatgaaattacataaattttatgagattgtgtgataagactttttagttaatgtaaaagaaatctgggaggggtgcagtcagtgtttaaggctgactgcacagcgatctttgaatttccattcattctgccattaaatgtcttcagccacagctcctccttctcttaacccctcctcctgaggtaatgtccagagatgttccatgggcatgtaacacaaattgcaacacatcaaatactaccttctcctgctaaaataatgctggggttgtagaaaaccagccatccatcaaaggaattgtttatgcagctgaatggaatgacctagacatcatggacaaccttatcctaaagagtagcaactttccaacatgctaaggatcacaggcttttgcttatgtcacatgtgatacctaatatgcctcataagagattttggattcccaaagaaagctgaacgcttgccattttctgttggggtaaaaagacaatgttctttttacaaaaagtaaaaatcagagcatcctacaaatagcatttttactatttgtaaaaagaacgttagaataaacttttctccacaaatatacaataaacctatctatattatgttttgggttaatagagtagtatactacattcttactatagcattgttctgtgtttcaaagttaaagcaatcagtaatatcaagtaaaacacaactaaagcaaagtggactattatatccctcttaagcctcttagatttgtaaaaacttcatgaaacaatgacaaacactgattttaatataagcactattcctaagtcaagtttttttagttattaaaatgttatatataaaattttccaaacttcagcattcatatttcaacatgaataaaaagtgattcacttaacccttcagtcccatgtttaaccaggctctcaaggggcctcactggctggcagatgctcttgcttaagtcacatgactatgtagaacaggaagtactgcagcagtgttctttgatacccttgcaaagaaggccaaggaataaaggcaatagactcatacctaggtcttctcataacagaaaagatgacagaaaatgacataaagattgtaagcttcaataacatagaatcagtgctagagttggggtaaggatttttttaaagaggaacaaagtttaatttaagtcctcacgcttacttaatatattcaagtacaaacagtatttgatttcaaagtgcttcatggctcctggtgatagaaagctaaacaaaataggctcatactagtttatacaaataattaataaaataactggtgccatgaaagttgcccaaatgcaatgggaaaataaataaaatggggaaaataagaaagaaagatcaagttccttgtgcattttcagtaaagtttaagcatagaattatgttgagctgtgttatactgaaggatgcaaattcaccaagtagataaagaggggaaaaaacccagaagggatgccgtggcatgagcaatagcctagaggcatgaagtcatgtggtatattttttaaaagcctagatgcagggtatagaatgggaaaatgaaaaggtaccatatcatgggagacttagtatgccttaaaatgttcagccttcatccataaatagtattcataatagtcatggaagtattttgaacaagaaataaaggcgaaatttgtgttgaagatcattgaaaaatgaattggaggagaatgaaaatagcaaaaggaaaactcccaacctagagaactgaggactgagaagcagtacttactggcttagtccaatactagtttacgccttgatctcacctcttgtctttttatgtgtgtgtgtgtgtgtgtgtgtgtgtgtgtagtgagggttgtctttccttaattaagaaaacgatataaactcaatcctcattatggaaacttttctttttaagtttttttttcttttattattatactttaagttttagggtacatgtgcacattgtgcaggttagttacatatgtatacatgtgccatgctggtgtgctgcacccactaatggaaactttttaggatgcaaaataaatttaaatcagtcatagtcccattacccta

SEQ ID NO: 2809 - DNA, 4001 bp, Homo sapiens
catttgcatactctctcacactcacatcactcactacaggctctcgtcagctagacttagaatctttcaatatctcactgaatctgctctactcaatccatgcttttattcatccatgcttttattcatctgctacactgctgccaggagagattttcctaaaacataattcccacaatatccatgcttgcttaatagccttcgctggctccctgtaattgacttgataaaggtccaaactcctgtgtatacgaggtgcttcctaaactggacctcaactgcctgtcgcttcatctgctaactcaactctttagctacagccatgaggaatctggccacaagctgtgaccactctcactttcatatgtgccacttccactgcctagaacatcctgggccccccagtctttaactcctactcattctttaggactcagctcaggcatcacatttttcaggatccacgaggtatccttttttcctcaatctgtcagaaatcccttttccatactttcacagtgctcagtgcaatgcctgcctgcgttcttagattagctattatttacaaagcacctaccgcgatgttcactcttcaagttttatcttatttccatatgagaaaacgggttcagtgagattgttgtcctactaattggtcaagtagataatggacttcaggtctgacttcaaagtaatagtctcctattattccaaagtatctctccaatatttcccactgtgcactgtaattctctccaaaagagcgagagcaattaactgggccctctgttgcgtctatatccccatgtgtggtgcttgacacttgctcagtgtttgctcatcacaggaagacatgacaggtgtgaactaagcagaaggaaacggactatgtcccaagcaggtgctcaatgaagccttactgaatgattgtgtaaaggagatactttctaccttttggaaagcgtatattcatgttgtgccaactagtatctaacaataaacatgttgtgggttcgaaatgctcatctgtaggaattcaagttctctacatttgcatctccccttcagcagcattcccgactgatgaggatcgtgtccactgaaaggccactctccttatggacagtcgagggctgagtttttgtccctaacacctctgcactttctcttctccagctttacaccttccttattctactagggcctgagctgagaagatcgaaactcacggcaagtccctaatattttctaacttctggcacatgtgaagccctggtgttaagaaacagacttaattcttccctgcacggctgtagcctcattcaggtcctcctctcatcctgtcggtcataagcttcaccggctccctcacagcttgccctgacgcgcagagatccgtgcttgtgctaagtgaaaacgcttcttagcgtgtacgaaagcgagcggtggccccgtaaaacttttttttttccgactccaacataccctcccctgaaactgatgaaaaagcaaaatcccgttcactctatagcaggccccttccgatcaacggtcctccaacccctcgagcctgagaagcctggcccgcaagcgcggaccaaaggcaggctgccggggtaggtgggagcgcgggcgacggaggaggccagtctccggttacccctcgcgcccctcacagcccgtggcttcattccctctctcgctggtcccttacaggggtcggatcagcagctggtcgctctcctcagcaggaatcgcagacatcccgaaagtgtgagggcgaagcgggggtgaggaacaggtcgccggggtcttcctaaattggaagcacagccaccggtaaataaaaaaggaagaaccccattcaccaagagcacaacttccgtcactccggagcccgcggcactagactcctcccctcgacttccggtcgggggacgccgctcgcgaggcttcccaccacttggggtcttggaaccgggggtaggacgtcaggactgcgcctgcgcatagtcttggaggcgcggcccggcggacgtgggcaggagggctggaaaagccggcgctggagcgggaacgggagtagctgcctgggcgccaaaggccgcggcactcccacgcggaccccgaagtccgcaacccggggatgggcccgcggctgcgaggtgagcgcccagccctcgtcccgcttggggccgagctcgcggaggcctgacgggaacacggtcccgagagcggcgcggacggccaggaaggatgggtggggccgcggggcgggcggaggagggatgcctgggctcgggcttggttccgggcggggccgcgctcccggggcgcgggtggaggagcttggaaccacgcagatcgggcgtgggcttgcggactgcagcttcccgagccgctgtcgccccggaggggcggcaaggcgggcggccgcgggccgtttccttgcctcttcctctgccccgcttcggccgcctcccgcctctcagggtcggggttgtctgtccccttcgctgtcacatcctccgcacccagcgcttggaaggtgctccatcacggtgacagacaggtgccaagcaggctggcgtctgggaggaacttcggagccggctctccctaggccccgagcttggccgcatccgtccttactctggtgaccctgggcaggtcactgactcttcgggcgctttggcatcctcgtttgaaaggggctgttatcctgcagccttgctggtcggtgagggtgagggtgagagggatctgtgcacctagcaccgtgcatggcacgtggtaggcgtttggtacatgggaatcgctgttggggtgtcacctccccagaaagttctcggcttcagtaagcgcgtcccctgccaggcgccctggcaatgcagaggagtcaccgagctccgcctttgaccagcgtgcagctgggagagtgagatcagagaccacagcagatcgtggcgctgtgatcagggggtacactcaagctgtgggtcccttaccccagccttgagatcccaggaaggcctgcagcctgaaacgggccttgaaaggtaagaagtagccaagtgcctgacaggtgaaggacgtcccgggcggtgcaaagcaggggcgcgtggagcatcgcgctgagaaccaggagcagctttgccttgctgagatcaatgaactgtgcccgggttgtggaggatggaagtggaaaggtgattaggagctgggtcctggaggacctggcgtgtcgtgctgaagaacgttgactttggtctctgactttggagaaccagtgaaagattttcagcaggctagtggcattagattcatgtttgaaagaaatcattttaatcgttttggctgcagtgtgggggtagatttaaagtgttagggaatccagtaggacaaggtcccttatccacgaaatatccttgggtttgtgaattccttaaattcatgccaaactttgtatggatgtgcatttttatagggtgaggatccatcacattcatcagtttctaaaaaaatagtgtctgtgcccatggtttaggatgacgggggccctggtggagagctggctcagagagctcttcaggtggggtatacagtgggtcttggtgccagattggatgtggggcctgaaggacagcaaggaaatcatgattttctggcttcctccagcaataatagaatctcctgacagggagaggagaggagaggagcagatctggaggggaggatgatgggttcagcttgagacatctttgcatttgatgagcctgcggagcatccaatcgccaatcaggatcattggcctcattttgatgcatgaataattttttttttttttttttgagacggagtctcgctctttcgtccaggctggagtgcagtggcgcgatctcggctcactgcaagctccgcctcccgggttcacgccattctcctgcctcaggctcctgagtagctgggactacaggcgcccaccaccacgcacagccaat

SEQ ID NO: 2810 - DNA, 4001 bp, Homo sapiens
tgacaaattgccaatgtggtcttttaaagagaagcaatacagcaaagcacgttttggaaaagtgactagaatacagaaaaataagacagtgcttctgctgccaatcaatatttgttcttaaccagaaggtttgtacgtatcaatcacaatgcaatcatacagtgacagacaagtatttttaaaacaaacttgttcgtcttttgcaccacctaaaataactgttcggggctttacttttaaatcacgaaatgagccataaatgtaaaagatttcaataggcagcaatcaaaagtatcttctactaaaccttcagaagttagacgccagctgaggttagaattataacttgagatggtattacaaacttaaataggtcataccgcacgtccttcaaaaactgtcttttaatttttaatgtgtcaatgacttttctgctgtcctcttttcccaacaggcgaagaaaaaatacagcttgtggcttaaattgtcaatctcaagacgggggttacctactgcatgagacaaataatggatactttaatgtctatttttagtagtagtattaaatcaatctctcattaaagttcacacagaaattcgtgggaaatatggtagggggagtgggacggagggtgaggggagatccagatgacccaaacgcggttggcaaggttgcaccccgcgaaatgatgtaaaacaagagtacatcggctgatactcgttccaacgaagtgtttcagaatgatagatctcaagtgatgattaccttattaaaaagggttaaaaccgaaactgttttcaaacaccagcttcccttttataagatcccaacagtttaaaaagttattataaatgtttttcttagcaccctttctcccaaaaagcatgcatttccatgactgactttaaaaaaaaaaaaaaagcaaaggggtgagggagtcaaaaattccccccaaaagcacaagctctcatctctcaactaagcaacacagggcagaaagcagcatttcctcaacggtgtaggagcgggggggaaagggcacgaataaaatacagcacgagaggaaaccttgggtttcgaactttattgcacaaagagtggagagaagagtaggtcagacgttgcagctcttccccttgcgaagcgggcatggcaggcaccgaagccaccgggaaggcagcaggcaccttcacctcctctgccctcaactgtcgccttcttcctcctccatcccccaccggcacctaggcggcggctgccccggaggcccggccgggtcgggccgggggcgaggcgggcggcgggggccggacgagcgagcggcgcggggggcagcgccgggccgagcgggcggcctcccccggggcggctccgggttcccggctccgcgcccggcccggcggcggcggcgggaacgcgggcgccagctcgccgcggccggccgcccgcacacacccccggccgccggctcccaccccgcccgccgcccgccgcccgccgccccccgccatgagcgccgccgctggctgcaggcagagtcgctgccgccccggccgccgctggctccagtccgccgccattattctttgttcgctgcgagcggcggcgatgttgtggggctcgggcggaggctccatctttaccgcggcccctcctgcgaggggaaggccccaagcgcgggtgtccggcgcctccccgtcccccctccgtccccccggctctctctggctcctgcctcctcctcctgctcctcttaccggtggtacaagctcctccgtcactgctttcgttcacggcccggatctcgctggagttttattctctcccccacgtaacacaccgcgtcaaactacacctccgccgcgtcactcaccaacactccgcttctcccagccgcccgggccacaggcagcagcagccgccgccgactgaggagccgcagccagggagccagccagcgccgcccagtgccgagtgcgcagcggccgcgcacggaaacagccgagctaggcccggagcagctcgagcggccccgcccccgcgctggggacggaacttgccgaagaccttcgggtttcttcgggcgacgagaaggggttccgcggggagagggaaggcgaaggcgggctgagcccggcgccgggaggagtggtctaaactccaccgcggctttcgcatcggtaaagccggcagcggaaatttgaaggaggaagcggggtttgtgtgtggcccagtgggggaattcccgaggggtgtcggcgacttggtggaaacccccgctcaggcctgcccctgcggcggtgagcggcgggctagaaggcggctgcggctgccctggctctgctcttgaccgccgccagccccgggaactttccgacgccgccgggagacgggggacgggcagcccgggctgggacgcggccggaccgctggagccgtgcgggctggggaagaaggtctgctgcgcctctgccaacgtcccggggcctgggacccgggggcgtcgtgggacccccgtggggacgggttttcctttccgagactccgcggagaaacctggcggccgccagcggagcatgcttttccggggggcgctggccccgatactgtggcaccttgcggggctctgcccggaccatggctgacgtcgacggccctcggaggcctccaagccacacaacctgcccggacccctggaaatatgccccatcctacctccccgcctttctccagacaacatcctgtgtcgctttctttcctcagcctgttttctacagcagggattcgcacccactgcaccctaaacccagcagggggacttccgtggctggaaactactgaattgttctttcagaggtctctcaggacggcaccactaggtccccattctccttgatagtgaactctgcagccctctccttggggtttcaagtctttttttttttttttttttttttaatgagacggagtctagcccttgtcgcccaggctggagtgcagtggcacgatctcggctcactgcaacctccgcctcccggtttcgagcgattctcctgcctcagcctccctagtagctgggattacaggcacctgccaccacacctggctaatttttgtgttgttagtagagacggggtttcaccatgttggccaggctggtatggaactcctgacctcaggtaatccacccgcctcggcctcctaaagtggtggggttacacgtatgagccaccgcgcccggcctcaagtcttaatcattctttttctgtcctttaaaggagacgtgtctttaggaagcagagagggttcgattctggactccgcccatgactcacttctcttgtaaagaaagagttgtccttcctggtactccaggtaccctactgttttcttatggactttgcccttaacgagtctcctttccttctgttactctcaacctttccttctctaccggctctttcttactggtatttaaacatgcttaagtctttcaattctttaaaaagatttctcttctccctaaattgctctccaacaactgcagctgtctcttaccccatggacagtctttcatgtcccacctcccagccctctccagtgtccccaccgctcacctgaagtggctctgaattgtccacagacaagcttcatgactgtaaatgcagcggatcattttcagtcctcattttacaagccctcatcccagtatttgacgcgattgaccacagttgcttccaaataccctcttccctctggtcttatgtcccaggtttcctccctacctgagtttgctctttaacaaccagctcctccttgatctacctcttacacattggaatcatgctgagctgaaccctggccctcttactgagtctccccatacactttcctaggtggtcttatgctctcccagcagcatcaaataccctctgtcaaagactcttcaatccataactcaagcctagatcttgctctggaatcctacattcatagttcc

SEQ ID NO: 2811 - DNA, 4001 bp, Homo sapiens
ttttcccaaatccttccagtcaagcatcccaattttccatgattttatccctaacaaagtgcaccttgttgttacttgctcagaattcaggggttgtctttgtccttgaaatgttgcatgataatggtgtgtagaattataaaaggcagggctttaatttttcaggaacatgaaacgttaaggaatcttccaaaatggtgatataactttgttcatatatcccatttttcagcttgtcatagctgcccagagtcatgctttgcatccatggcagtacattgtgtaaatgctgtctgaatttattgtttaaatcaaatgtcaataaggattagaaagaggaactcctaacaaagctaagagaagggatattgaaagtcaaaatatctctaatacattggcacgagactatttaatttcttgaaaagatttgtgttttcaactaagatcagtgtcatctttaacctttatgtctttttaagatgtgtcttaggagtgcaagatacagctgtgaaaaatcatctaggtgttgagaatatccaactggatctgcatttgacactgaagaggttaagaccattgccaaactcgaaataaagttgccatttaggtagtttttaagcaaaaaaggaccttaaaaactaaacctaattttatagacgaggaaagcaaagtggagaagccagtgacttggccacagtcttggtgagacccagagctggggcaagaacctggccaatgtcctatgccttccataaaatattatttctcttttttgtaggaagtaaagaggagttcacattactgccttgtagctctttcatctctcttaaaacccccaaaagccttctggaggcatggaagttacatctgcattacttatccatgtcattctaggtggaatcatgtctaacaggtgagtaaagcatttgcgaactgaacaattaaaagtgcagcgaatagctcattccagcatttacacactttgcataataagcctcctttccagaaaaaatcgtgaactccattttcttaaatgcagatttccatcgaagccctcgtgctctctctctccccatccctgcttcagctccaggtcagaaggtgatggggagttcaggtctatgggtttgtgccctgcgctgggaagggctgtccccgcctactctgcgattccaaaggcgtctgtggctgctctggtctaggtctcggtcggacgctggttaggtgtccctctctctgcctggccacctcaaggtggggattcggtacccaaccctacctggcaggaaacctggttatccatgtccctctccgaccctcccccgacttcgccaggctcacggaggcaccatcgccttccattatgtacagtgtcgagggtcccatccagggcaccgggcacgtctggtggacccggatctcagtcccgagcggtcgcgagcacgtccctgtccccgtcccccggccgccgcctgaatgccaggccccctcgcgctccccgccgggcgctcaccttcttgtgggtggacacggtggccaggcagccccagacgctggcatgggccagggagcgggcggtggcggcgcgcagtctagggcccgggggcgcactggccgtctggccgccctcgcgccggtaggagaacatcccgggtggcgcggggggcggcctggcccgggcggcgcccgcccggggccgcaggtgcgcgtcctccttgtgggcagaggcggggaagctttgctgccagatgctgcccgaatcctctagcagcgcgggcatagcctcctcagtggaggcgctgtccagctcctcgtccacctcgttggtgacggcccaagacacggagctcacgatcacgtagcccgcggccggggacagcagggcgctgcagcacagcagccaggagaggcgggtccccggccgcgccggccgccggccgcggcgcacggacatcttgcaggcagcacgcccggccgccggggccgccagcagcgctagtgccggggagcccggcagcgccccactgcggcggaagcaaggagcccgagcccccttcccgcccctgcaggatccccgggcgcggtcccccgcgcgagtcccggcgaatccctgcagccgcgcgcgaagctcagaagtccaggctcgcagaagaccaggttccacgcacacgccgcgcatcctgcggagtcctcctcgcgcgccaggtcccgggatgggttcgtttcctgcaggatggcacaggttccgcagccagagggtgggcgttcaaatcccggcttaatacacgcgtctgctcaacagctgtgagacctgccaagccacttaacctctctgtgcccatttccttcattagctgacaaagataatatctacctcttaaggatgatggatgggacggttgaacgattaatatttgaagaggcttagaacagtgtgtggcatggagcaaacgctctacagcagtcccttggtatccgaggggtattggttccaggacccccgtggataccaaaatccagagatgctgaagtcccttataaaaaaatagtgcagcatttgcatataacccatgcacatcttcctttaatatctgatttgcttataaaatgcctaatacaatgtaaacactatgtaaattgttgtttactgtattgtttagggaatagaacaagaaaaaaagccaatatatgttcagtacagatgcaatcacccttttttattttttatttttctgataaagggtcttgctctgtcttcccaggctggagtgcagtggcacaatcacagctcactgcagcctcaacttcccaggctcaggtgatccttctgcctcagcctcccaaagtgctgggattacaggtgtgaaccaccacgcccggccatggctgttttcttactcctgcctcctcatgggagaagtgactcatctgatggatgagtttcgaaaggcaagcttaacatgcttttctcagcccctgcaaagctattcttttctgaatgatctgttcacccttctcttctgtcttgcctgagctgtcctgccccttcagcagatgagaggtcgccctgccctgtctgtgactaagggagtaagttcagttgcagaacctaataggaatcctatttggtcaaaatttcccattagctttacttctattaagctttctgattcttgagttttatttcccaaattagttccacactcaaaggggatttaagagggtgatcaataatcactcctcaaaccccatcacacaacttgtgccagaacatagtaaatgctccattaatgacagcaattgttgtttgttttggccatttacccctgaatattcaacagatccctcaaactcaaattttggaagataattctccatggatttcctggtttcctgcagaatccaaacctgtttgaataagcttgaaaagctagagatagtgtctttctggagagatttagggatctattttgcagagacatcccaggtactaaagatatgggtaggaatatgtttatatatatatatatatatatacatatatatatatatatatatagaaaaaaaatatatatcatatgaaaatcaaacttattttcaaaatgattgtaccagtttatattgctactgtcagaatgtgagagtttctgttacagctctacattctcatcaacacagattagcgttagttttttttgcccatcccccgcacccctctcacgccaaccaaatctggtggatgagcaatggtatctcattgttattttaatttgcatttacctaatgactaatatggctgatcatttttcatgtgtttattgcccagttcgaaatcttttataaaatgcctgttaatgtcttttgcccatttaaaaaaatgtggtaaaaaatgtaacaggagatctatcctctcaacaagtgtacagtgcagcattgttaactataagaacattgttctatagcaaatctctagaattgtaccttgcataactggaactctt

SEQ ID NO: 2812 - DNA, 4001 bp, Homo sapiens
gccatttttcttgaggtaaggcataaaaacaagttataaaaggggacaataccaggtgagaggcttttttgtacttcaggcaaatgatctcttctaacccaatgtcttacgtgtgcagcaaagcaagagcaagtccctcccctctgagaagagttcccttcactcatcactgcccactagcttccaaaccagaaaaccctcccctattttcctgaactgtccaaaccccaaactattcaggtataaataagtacctatgtgtgtgtctgtgcgtatttagagagaatcacagcactgaagccttttaataggtccattgttatccttaaggctgtcacctcctttttcagtatcccagcatactaaacaaacacacacaaagatgcttcggaataaaccgttccctggacggtgctggctgtgagtagtgaggaaggcacgccgggcagagggcgcctgtccctcctcgccgcctccccagaaacgaggctgctgcgtgcgctctgctcactcgccaggatgcccccggaacagcatcatcagcccaacgtcagccagagcagggatcccacttttaactgatgcttaccgaaccgtgcccccgttagccacatcaaaataactcactgcctcgctctagaccccaaaccagaccaggcaccctgaaggccgacgcaagcgggcagggattaaagccaacacgcactaacattggctccccaacgagaaagactccactaatctaatctgtttctcccaccgtcaatctcgacaccgcggagcacaatgcgtgctggagaagccagcagaacaatccccgctgtcaaacaaacaaaaaggaggaaccggcaacacgacaggaaacacgcgggtatctgatattaaaaagcagccactaatagcaacaactttttactcccaggtgcaacccccacccccctttcctttcaggagagaaagcctttgaccgtttacaatgggcaaataaatgagtaaccaccgtgtgtaacttcccctgggctgacatattccgcggctgaaactgatttatctgcggaggaggaggaaggggtgaaggaagagctcaaggaaaaaataataagagtcactcggggagtgcgagctggagacacgtctcctccgccaacagaaaaaggactttcgcggccggcgtgcggctcacggtgccacactgcgccagtgcggggagggcggtagggccgggctccccgaggggctcgcgcgcggcagaatctgcagtgccccccgcccgcggcgcccccacctcggggagcaaggccgggccacccagtcccagcaggaacggccacacgtgtgcgcgtctgcgcggggacaggggcgatcctccactcgctcgcccccacccaccatacccaacctcgcccgcgactgcctaagcgtcggggggaacaaggagagggaacgcagggccgcgggggcactctcctgggggcggcggccgcccctcttcccgcagagccctctttcctccagaaagtctcgcccaaactttgttcggcacaaccagcgccgagggggcggcgcaggccaggtgggagggggcccgcagcgggcggccgtaccttcgcaaacgcccgcttcgtactcggtgagggagtcgccattgagcggggggcggatgacacaacgcagcccccggtcgcaggttccgtaaatcccgaaggtgccgccgcagctctcgttcctctggctggcgcacgtgtagcagcagccgcagacgccctgcacgatgctccccgggcagttcctgggctcctcgcacttggactcgtcacagggcaggcagaccagcgcccgggtgccggagcgcgccagcagcagcagcagccccagcagcgagaccaggaggtgcccgcagccggccaaccccctgtcccccgccaccaagtacatcctcctgcgccgccgccgcctcctcctcgcagccgggccgggagcggggcgggcgccctcccctgcgcggggcacacgcgccgccgccgccgcaccagcagcccgcggtcctcaccgcccctctcggggcccccggggcgcgcctcccctcgcggggcgaggcccccgccccttctgcgggccgcgccgaccccgagcccacgagccttggcgccggcggcagcttcccctcctcctcctcctcctcctcccgggagggagggggaaaaaagaaaaaagtttcctcccggcagctccggttcaacccaaacttctggcgcggcggcggcggtggctgctgcgctcggctccagcccgggccggcggcgcctcctccctctcctcctccgagtcggccggccccgcagcggcgcagcctccgggccggtccccgcctcccgagctgccgagtgggcgcggtggcgcagcacaagatccgcggcgtccgctccgcgcgccccgctcgcctcactcctgcgccgctcctccgggcgcttgtttatggctggagcctcagccgctcgggctgcgccctcccccatcctacctcctcccccagaccttccccccacccccacgcgccgcgcgccgctcattggctgccccccctccccggcccggccggccccctccgcctccccctccccctctcgggcggccgggcccttcctccctccctcacacgcctccacctcttcccgatctcctcctccccgagcccggcgcaccgagccggccgtgccaccgagctgcggctctggccccggcgccgcgggtgcgctgcggatgggcttggggcgcacccagcgagcagcgagagtcgcggtgtcccgggcgctcgctggcaccgtggccgcagcggccggcctgggagccaggagggcgaggcggctgcaccttcggggccagattggagttcgaagagtggcgggtaccccagaagctcggggccggggcgatggctgcagcctcgggagggtatcgccggatcgaactccgggaaagggaagcaaaggcatggaacctccgcacactggatgagaatccatcttccattcgagctgggaatagactttgtgaaagatattatgtaatggagtctcgggaaccctgagacctctccagcgaagctgaagtgaattaattaagtgctttaaacggtcttggtaaatattccgcgggagctggggaggaccgttgggatggctgtagcttgagttgaattttaactgtcctcattctgggttttgtcgctctgctttctgtgccaaggtgctgtgttacgggagagagtgactggaaagtaacaaagctgaatctttctccctggagtaaggccgaagactggattactacacgcctagacgtgacactacacccatagatctcatgcatcattaatgccatatgacattgccattttctttctcagttcacggacaaaagtggtgggttttcattgtcttcactgattgtcaatgcattaataaagaagatgtgtggtacatagtctttgtgataaatcaggtaaagaagcaacggaagtgatgcaaaatgcacggtgtggagatggtttctcttcagtggttgtcagaaaaggttttcgtaatgatggctctgtcattgatgggatatgaagtagtaatccgctccgtagtgacctaccattcacaagatgggtaccaggtgaataacattaattaattgacaaaaagtgactgtggtcaatgggggaaaaaatcgatcccgtggcaggtgtgacgtgggaatggctggcccaccctctgatccaagatggtctggctgcaggaaggtggcagccaagtggattctgaaaatcgtgactaatgaaccgaaagttaatagctggcagtgcaaggaaagaggaaacaaagctacctttgaaatgttatgtttgtggaacaaattcatacttacgataaatattttagtttaaccactctgtctaatcctgaacccaaaagccagagttaccagtggactattcccccatgatgggcatcagc

SEQ ID NO: 2813 - DNA, 4001 bp, Homo sapiens
attaaaaaaatttctcctcagaagagtgcagaaattaaatacagactctaaataagctgaatcaaatcaaatactctgataatcaaatactgtgatattgccatcacttgacaatcatttaataattttgctatctcctgatattaggaacccgtacaagtaactgagaactaaatagaagatattaaatcacttgaggacccagtattctttaatgtttaatagataaaatactttgaacacataacatttcattgtacaaataatgtaaaaactaaggtattattcacagtaagtattcggttaaattcctattttctaaaagaagaaatacctgtggtattcctagcaccatctttccatgtatctggagtgataacagtaccaagtttcttttcacctgttagaacaagatagtaaaaggaaaattaaactttattatttaataagtgcattacattgtgcctaaggttcacaatggtatcgactatcaatggtattaccgtaggagcctgttaatgctgggagagcagccaatcaactgagactcatattaactgtggccaatgaatgactgaccctcagtaaaatgcgtaggataataagatgacttataataagctttcactgttggtttatattttaaacaaatctggtaagtctatttgttccataaatatatactaagcatctatcatgtataaactatacaaagtgctgagaaaaatgaagtgatgaatcagacacaattttaaagggattacagtacactaatttctttaacagcaatctgtaacctgggttccacaggtggatcttaagagatatgcgaacaaggtggagttgtacacaaaccttttatatattcatttttttttcctggcaagagtctatagttttcatcagattatcagagggatcagagaccttccccccaaaaagaaccattcaaccaaaatgtaagcttaaaaaataaaaagtataataatcgacagctaaagtactagaagaaattccatgcaggaagaaataaccctagctaaggaaatccaagaaaagaaagtttggggagaaggcaagacagaggatttggatatgtggcaataggactgtgaacaaaaaggagtaaagaggatgaaggcaaactagataaaggacacattctgaggaaaggcatagaaagcttagagtacacatgggcacaaagagtattttgtttggtcaaaatgtgaagaggataagcctcagtgaagatgaagctggaaaaataagttggggccttagtgtggagggtcctgaacgccaggttccaaatatagaatccccaaattattctctgcacactgagaatttattaaaggttttaagttagggaaataataatttgcacttacgttgattttcaattcaagcatcttctgggcttactctaagccatatcctggcataatgactaatgagaatgaataaggcaaagtccttagtctttggttctagtgtctagcatttggcaggagaacaatacttcttacatgaatagaaaggaaagatcaagaattgccaagacagaaaggtgtcgttggggtttaactgcacatttttatatgggaggagagctgatgagatctggggctgggggaaggcaacagaaatagacaaggaggtgcagaactgagaccattctgagtacaaaatatataggactgtatggtcgttgggaggtgcaaaaatggtcaaagggtagggtagaaagacagcggatagaatctgagacctgtgggcgaagaaaaaacaacgagaaagcaaagttcccgggagagctcagttaggttctcccagcctcctcctcccgcagaagcggccccttaactcacatttttcgcacaccatccttccccacgacggttcccctagccgcaacagcagcagcagcagcaggctgaaaacaacaacactacaacttggaagtattccccttccgggctacgtcaacccacttccggcttctaagcccatactcccgcctaccccaaacctggaaagccgctgccccttttgcccgcccctccctttctgcgactggctgttaggcgtgggtctccgccccacagccctgcgcctgcgcgtgggcctgggccgcccgtcgtacctgatggtaggaggcagtagttccccgcttcccttccgcgggagggagagttaggtaagccccgctggacgccctcggcgtctcgcctcacgaggtgcaagctacccccgcgaattgccgaagcagccctgagccttggcgccccgacccgccggcgctcgccgtcagctcagcgccactcttccggcgtgccctgatggacagaccccctttcggatccgagttttcgcctctgtcccccagttttcccttgtcttcaactcccatgctctttgatcctgcctctcagctggttcctcgctgcccacgcttgcgccggcgtaggctcgggcagaatcccgagggacccgggttggggtggggctgccggtgaaggtgcggcgatgcccgcgaaggctcctctgggtgccgctcggaagagccttctctccgctgcggtgcgtagcgaggtgggccgggtcatgcccgtggcacttctgcaggcgtcctgggggcacgccagggcctaaccggtgctggttccctctttgcttactctggttccttcattcattcagcaaacatttgagtttgggtcctgctcactgtattacatccacatctgctgctggcagctgcgattccgagggtggctcagaaaaatcgctgaagggctatctgttgagagaatggattcctgatccccttgccctccctcaatcagcttaagatagaatctatgggaaactttccctttgtcccttcttgccatccgtttgcttttcatgcctagtgtatttccttataccagagagatggctgtagcgcatgggaccttggaccacctcacctgtttgccgtgtttccttatcagtaaaatatctgcctttgaaaagcattgggtgaattaaatgagagctattaggataaggcccaggttcgcctttctgcttttctcactagtgggcgcccctccgcccacgcgcgcgcgcgcgtgtgcgtgtgtgtgtatagtatttttttttctgagatatttctattttctggaatattctccataatgtaacatattgactgttactttaaattaataaagtccttgtttagcagtacaattagtcagctctcaggtaatttaaatacgtgtattttagagacggtaatttttttttcctccttccgttcgtgctctacttttggttggaatttaacacctgtaacagacgttgtcatcttggtatttctgaagcattgggatcccttggtttagtgtggtgctctttgaactcttgattccactggccaccatttgagtattggaatgtgcacttggtgtcatttggcatttgctagaagatgtgaactactgtaatgttagacaagagtaaaaaaaaataccaacaattcagcctaagtatatttgtggagttgttggaattataacctatgcattctagaaaccgcataaataaactttggttataattgcaacaggcagtagataatttaatccacacagttgatttcatctctttgatattggccaaaaaagtttaaatgaattgctttattggtcctaggacatgacccttttgcagaaaccagtcacaatatttaagaaattagtaaatttgttctttttaggctctgagagatgtttgtaccatattaagaaaatcaaaggtagaatagaaagctaagtctgtatgtgcatctacacgtctgcatcttttgtgttttgaaacaaatacattgctcatagaaaattgactttatgacctatttttaggggtcaaaacatttaagacaatggaaaaagtcgttattgcatatgctcttcttttcttgttttttgttagctagccatccaaga

SEQ ID NO: 2814 - DNA, 4001 bp, Homo sapiens
ctctcacagattagtgcccagctaagaggtactgggtggcagaatcagaatagacatgtcagggcatcaatactgattgcatcttggctccggccttcccactgcagggttcttcagcctcttggaacagaagaattgggctggcctgggctgggtcctctgctctccacttcccagccctactagtaaccaggtcggcacaaatggaaaatgaggtcctctctttcggtgtatttgattcattaacaacaccctcacacacacaataacacacacacaaacacactgagactgactcttttcagtgaccctgggcaagccactttgtccctttgagccccatttccacacctgtgtatggggctaacagcagtcaacccgacctcacatggctgtgtgacgacagaggcactcactcacacgtgtggacgatggaatgtgggggaaccctgggcactcaggactgggatggcctcagcgctgtccgtggtgatgatttctgggctccgggcctacgcccacaatcccaactttcttggagacacccttctgattctgagaaataatgctactaccacccatctcggagtttgtttacacacaccccatgcagggcttgaacagcctttctaggtgccatggtgaggccagggcctggagctaggaggcaggggaggagaagtgggctgtgctcaccgcgcagagcactggccggaaggacagcagctggttgctgttgtggctgctgctgccactccaggcgctccagcgaggatagtctcccttctccagaatgaactgctgtccctggaagtcggggtactcaaaggccacccaactggaaaaggagaagagctgggaggtatctgccccagccgcaccctctctgccctcccccttgccggccatgattgaaaagactgagaagcacaatgtttttctccaaccccaaacccttcccctgacacccccattgtatggcaatccagcccctctcggaactaaaggtccaaaacctgctgctttctggggtttgaggcgcccaggcttccccctcaaggaccccaggttgggaaagagttttcctggttatgaagatctcccgacccagtgctcctgcctcaagggtttaggcctttgcatggggacacattggaggacccctcccgaatatcacagcagaaactgggacctcagctggggcaggggtagggggcggcagggtgggaaaagctgggctctgggagaccagggtggggccagggaaagggattgggtttcttttgttaagccaagtgcagagccttctaattttgcacagagaaaaactctgggaagggtgtaagtacactagaaaccccttcacggtggggtcccatagggaccctcaaggggtcgcttctcgcctgtgtctctttagctagcacaaaaatacacagtttcccatgatttatcttgcgatgggtggggaattttggggaggctatggggtttcccatgttggcaggtctctccagggctcacaggacagggggctgaggctctgagcctaggccggtggaacccagcgcccctcaacccagcccagccgcggccaggcaatcactcacacgccgttttccaccttgaccgagcgcaccctgggcaggcctccgcgctcgcagacgttcgcacagtcgcttagcagccgacagcgacggccctggaagtcctcctcgtcccagagcgtgaggctggcgggcgccgggcccggcgcgggggcgctgctcatgccgctgcggacaggaagggtggcaccacgcgctcagcgtctcaagagccccgtttcgagccacacacagcctgcccaacctgggtagcggatgaagaacccgggggctggacccggcctagctctggacccggctgccaggggctcgcagtcttcccgcgctcccctcccttccccaccccagcagagggcattcaccgggtgggtgagcgcggcacgcgagggaaatggaccggctgcgaggctgcgcgcggccgggcgggccgagctttatacctgggccttgtccccctgtccgcaccctttccctcgggggtggggtcgctgagtcagcaggcaggctgcggtcggctctggtctccgctggggagccgaggcctctcccgcagccgccgctgtggccccagcccgcgggaaagacaacagaaagtgctgaggcgcgcaccccgcgcccgccgcagcccaggctgactccgcgctttctttctttccagcctgagccaggcagggcacgccaggcctcggggcagaacgcgccctccctgtcccggccctcggggacgaagggacctggcctcccctgggcctcgggctaagaccgcgctgctgactcgctgagcggaagttcttcccagagtctaatcgccagccttcctcggccctagtccaggcctctcttttgggcgatgctaaggcggaggtagagagggctctgcccaaaggattcgcttcatgtgctcagtcctctttttcctgggggatcggtccatcgcggcccttttcctcccaagcgtgcgttcccagatcctgcgccgcgcccccggggtgtcctcgggcccgggaaggagaggaggcggtggtcaggactcgccacgcggcggcgccgggcgctggaaacgaccgcccgagggccgcgcggtttactcagtgtttaggcataatagccacctagggagtggctcgccgcgggaggtaggaagaatgttgggctttagctcggctcaaccggtgccgctgcgggtctcccacaaagctccaggctctaagggttccagcctcgacgtctgcctgagagttagcagctgaggatgaagcgcttagttcaggccgagttctctgctcaggctttcgggtgcgtgaactccatcaattctaacactgacctgctaggaagatactgttattgtcctgcatttcgcagatgaagaagtggaggcccagagggctttggaatgtggtgcaggggtcacagctaagaaatctcccagggccgggcgcagtggttcacacctgtgatcccagcactttgggaggcccaggtgggaggatctcttgaacccaggaatttgagaccagcctgggcgacatggtgaaaccccgtctctgcaaaaacaaacaaaaattagccgggcgtgttggcatgcgcctgtagtcccagctacctgggagcctgagatgggagaattgcttgagcccaggaggtggaggttgcagtgagccgaaatcaagccactgcactccagtctgggcgacagagtgagctgggaaaaggcggcggtgggggtgggggtggggggtgtagagaaaaggggaggtagagggggaagaggaaaaggttgggagctccaaaaaggttgggagtcccaaggggtagctccaggtaggaaatttcctcaccacttgcagtggaattttctaaccacagcaaatgagacacaaaggcttcttgcaaaattgtaggttttccttaatggtggtgggtgcgggtggggatattccagcagaggtgagaggggcgagtgagaagggagctaatattttgttgcttccatgagtcacatgcttcccttatgggtcctcacaacagtccagcgagttaggtttgtgtgtacggttatggaagcggagggtcaaagaggtgcagggccttgtccaaactcacatggctagccagtttcagagcaagaatcgagctcagacctttggaagccaaagcctgtgctccgccgctgtccattgaagctcccgtgccaaaaagtgctcacaggccagctgcggacaccccagctcccagaagccttgccacaccagcctgccttctaagccttcttcccagtgttccatactcagcccatctcagagcctttgcatttgttgttccagctacctggagtgtcttggtcacaagatcgtggcatggctggctcctgtgtcacctcctcagtgatgc

SEQ ID NO: 2815 - DNA, 4001 bp, Homo sapiens
gaatctgacctgatcaatgaactggagatgttgtggaagaaacaaacattaaaatacagggaataaaagtgtgttctttgtaagcaatcatcaatacaattgtagtcagtgagtctgtagtgaggatttcaactctcatttccattttgactccatataattgagtcttatcaagcttgtttttgagtcactttttgcacttataatttacagtgatttatatttacactgagtccacatgtattttcaagtgacattttgccaagtcacttgtgccatttgggtttcttgccccagagaaatgcctattttatttatacctctttgcgcatctgcaaatttttctggcctaaatttgtttttttatttttttatttttttttagacgaagtctcgctctgtcaccaggctggagtgcagtggcatgatctcggctcactgcaacctccgactcctgggttcaagcaattctcctgtcttagcctcctgcttagctaggactacaggcatgcaccaccatgcctggctaatgttttgtattttggtagagacagggtttcaccatgttggccaagctggtcttgaactcctgacctcaagtgatctgcccagctcagcctcccaaagtgctaggattacgggcgtgagccactgagcctggccgtgatttcaattcttgaatctccttgtcacactacataatttggtgccaacagaaagtgtaaatacatgctgcacgtgattaaaaaagattaagcagcattttgatgaggaccatgttctatgaaatcctaatcaattgtgtgtctctgatatttataagaaactagttgataatgactcctggaaattataaatccacacaagttgaaacatattttcctaggttctagtaagtcctagaatgtagtgaaaaaaatttccaatgcagtcagaatacattatacctatattgttatctcatagtctgttaacttttcatcattaaaaaataattatcatggccgggcgcagtggctcattcctataatcctagcactttgggaggccgaggtcgggagttcgagaccagcctgaccaacatggagaaactctgtctctactaaaaatacaaaattagctgggcatggtggcacatgcctgtaatcccagctacaagggaggctgaggcgggagaatcgcttgaacctgggaggcaggggttgtggtgagctgagattgtgccattgcactccagcctaggcaacaagagcgaaagcgaagttctgtctcaaaaaaaaaaattatctagataaactagatagacttttcttttttttctttctttctttttttttttttttactactgaataaggtgacttttatgtagaaattagggatcacctagatgttaccaagtttaatttaaaggctatgttgtgatttcccatgccctaaaatgatgtccttaagtaagaaaaatagagattattgttactttttttttttatatatgtttgagggtcaggccttgctattcttactgtgaacactcatcctgtgttggaacaaactgacttttataaacaggaattgatggccatggatcattgatgctttcacatcagtcaagttgaagcaagactcacatgaggaattatacggcaggattggaccgagtcgctgaggcccatccagtgctgatagtcggggtacttgcctcggcgcaggaagtactggtggccctggtaattgggacgctcatagagcatccagcagccgctgtctactcggatggagttgcagcggctgaagtagacccgcaggttggggcagtcactgatgcaattgtagcagcgaccctgaaagtctcggtcctcgtagaaggtgatctgaggtagaaataaggtgacagtagacagtcagctggaaggaacatccccacacaccacagacccccaatagacatggcacagcacctccacaggctcaccttccccatggttgttgacagagggtgattagcatctagtatgatagggacaaaggggcaactggtatatatagcagggaagctgctgtgttggcaaaaacaacacaaaagggacctgggggtggtgcgtagggggatttctgtattctcttttttttttcatttgagatcatggggcagtgggctctctctctttctggcattttcgagttgtcctcactagctccagtgaaaggtattaaagtcagcagagccattatgaccttggagacaaagggcacacttctcatcctatgcagctcactagaaatgcattacatgcccagcattctgcaatgtttgcctatggaaactgctgagatggaggttggtggttccatctgaggtcacttatgagaacacatgcgttccagaaggacttgaagtgtgaagaggcaacaaaaaaaatcccagacagaaaatcctctaattgaaagacaattatatttcttaagtgacttcatcagtatgatagggttttgataaaaatattttgcctatatttatgtagggaaaacataagattagaagtgtgtactataccaacatatcaatcatggtaatcaatgaatggcaagattatagatcttagctttatgttgttatattttgttttttgctgctgttttcttaattttctattatatctgccatcttcagccagacagaaaaaaaaattcgattataaatataacaatttcatgagatgaaaaaataataaaatcaatctttaaatgtatgactttgaggtgctggtgaaaagcagtaaatactggaagcaggtatatttaatcaagagattaaacacttcttgagctaaaaataaaaagaaaccctgagaatctgtgagaggctcgaagagcagaaaaatacacaggaacatttcactcccctccccctgccaccctccttctagcattgcttttattttttaaaattagcgtgatgatttgcctgtgtttttcctttcaatagtatcactgtttcattgaacccaagtgactgcctaacagccttctccattgctgccaacttattgatttagaagtactcctcagatgtgcaagtgtggaggaagactccaaaccccagactgtcttttgtcattccacatgtatgtaggaagatgaaatcaaacacctttgtgctttagacccaccgagggattctaaaagagtatttgaccacagctagcaacacattcacaatgtcatttgtgaaaatcctcaggcagcatgtaaggcaaacgcgcaggtggtaaaaggagagacagcagtagctaccgagaaaaaaatgtttcctcataactagcagagctaggcaaaagaaaactgggtgaagtcctatgaagctaaacacctagcagtgcatgcagggaccgcaagttgctgattccctcctttgcctccccctaattagctgcaggcttactggtaaatcttagaaccataatcaaacccagtgtggaaaacgctgcattggtctcccagccccacatgagaatataccaccattttcagaaaaagtctacaatctccatctgtgtttttgtacatgctgatgaaaactgttctgtagacagatggcacaccaaaaccttaagaaatgtattatgtgtactgacattcatgtgatcaagttgttattacatacattgataggctaagccatgtgcctaatcagcattttggaaaggtactaaaagaccagaacatcttccctcctagtagtcattatagtctactgagagaaagcctgtattcatttttttaatgctttattgaaatgatttaaacattcttttcatatgagaacacagtaaaggcaatcaatgacagattaattttattttggattaactctttggaaatctgcctcccactccatcactgtgcaatattcaatgccacacatttgtaaaatgtgctacaaagccagcttgctctaacacagaaatactatatactttctgaattctccagcagtct

SEQ ID NO: 2816 - DNA, 4001 bp, Homo sapiens
gggattacaggcacgcgccaccacgcccagctaattttgtatttttagtagaggtttctccatgttggtcaggctggtctcaaactccggacctcaggtgatctgcctgctttggcctcccaaaagtgctgggattacaggcatgagccactgtgcccagccttggcaaaataaactttctaaattgactgagacctgtctcagatatttggggttcactattatatgcgcacgcacacacacacacacatatatgtatttgtttcttgagacagggtctccctctgtcacctaggctggagtgcaatggcatgatcatgggtcacagccccctcaaccttctgggctcaagtgaccctcccacctcagcctcctgagtagctggaactacaggcatgcaccaccacatctggctaattttcagttcaaatttcttttcttttttttttttttttgagacggaatcttgctctgtcacccagactggagtgcagtggcatgatctcagctcattgcaacctacccttcccgggttcaagcgattctcctgcctcagcctcccaagtagctgagactacaggcgcgtgccaccaagcccagctaatttttgtatttttagtagagagggggtttcaccatattggccagggtggtcttgaactcctgacctcctgacctcggcctcccaaagtgctgggattacaggcgtgagccaccgcacccagccttcagttcaaatttcaacctatctgacttttaagcttcctttctagcctcctgctctcaacttatttatttccctcagcagcaagtatcaccttcattaacttctgtttttatgacactgtatcccatgcctcccacacaccacaattctaagaattctgcagtcactgcccagaaaatatggaatctcaaactttagtttcagatttggccttttctctaatttatacctctaagtgagctaataggtactgaccattaaattagaatagaaatcagaagacaggatcctatcttctcaggaggaataatcaaatagaaaagtaagacaaagcaagcaaaagtttgttgttgttgttgttgttgttgttattgtcgttttgagatggagtctcactctgtcaccaggctggagtgcagtggcacgatctcggctcactgcaacctccatctcccggcttcaagcaagcaattctcctgccccagccgcccgagtagctgggatttaagaataatgtgattaaataggccggatgccgtggttcacacctgtaatcccagcactttgggaggccgaggcgggcggatcacttgaggccaggagttcgagatcagcctgggcaacatggtgcaacctcgtctctactatgaatacaaaaattggctgggcatggtggtgcatgcctgtaatcccaactactcaggaggctgaggcaggggaattgcttgaacccgggaggcggaagttgcagtgagccgagatcatgccactgcactccaccctgggggacagagcgagactccgcctcaaaaaaaaaaaaaaaaaaaaaaagaatatcatgaaatagcttttatttccaaaaagatggaaggcaaagacagagccacactcaccggggggatgaggcagcaggagcggatggagtcgctgaggcccatccattgctggtagtcagggtactccccacgccgcaggaagtactggtggccctggtagttggggcgctcatagatcatccagcagccgctctccaccctgatggagttgcagcggctgaaatagggttgtaggttggggcagtcagtggtgcattcgtagctgcggccctggaaggccctgtcctcgtagaaggtgatctgaaaaatggaagatgtgggagcatggagtgattggcccccactgaggccactgcattagggccaaggctgagcatccggtacccaggacttacctttcccattttgaaggaagtgagcagatgttttctggttgctgtgtgggactgcgggaacgtcactgtatgtatagcagccctgactgctgcctccacaggaaatcacacaaaagggcccattttggtgagtaaggggatttgcaagctcgctgctctccgtgcccaggtcactggggttggctgaatggtttactctcattctttctggtaggttcgggttgttctaattcactaaagctgttgttgccatcaaaatgaatagagtacacttttagttgagcaaaaggatgggcgaaattctgtctctgtgcttttattttatagtttactctgcttaattgacttctcaaaagtcattaaactaagtaatgaattctgctcagggactggtggtgtttttgtgtgtgtgtgtgtgtgtgttttagttctaaaagccagaatttaaatagtaaggaatcttaaagaagagggaatcaagtgaagtaatctgtgaaagtgtgttaaaacccataaagcttagttcaaattcaaaattctgtgatcagccaggcgaggtggtgcacacctataatcccaggactttgggaggctgaggcaggtggattgcttgagctcaggagttagagaccagcctaggtaacatggtgagaccccatctctacaacaaatacaaaaattagccctgcatggtggcgcatacctgtagtcccagctatttgggaggctgaggtgagaggattgcttaagctcaggaggtcgaggttgcagtgagccatgattgcaccactgcactccagcctgggcaacagagcaagaccctgtcgcaaaaaaaaaaaaaaaaaaattctgtgatcatcattgttggtgtttgggggcttgtcttgaataaaactgatacttgcctggaattttgtaggcttctgggggctgggtattatttcttgttcatgtctatccctgagccctagagcagagggttggcacattgcaggtcctcaataattggctctgacctgagcaaaaacagatagttgtggctttcttccccctttcagatcttcctaagggcctaaatccctccttctgctggtggctgtccagagtcctgcctgctgtttggtgttcctgctctgcctcaaatgttaccactaagtggctgattggtcttctcaaggcatgggaccaaaagggctcagagttggtccctattgctggcagattggacattctacagtggaaatagctggattagccttaataagtagaagttaatgcatagccttcatccataccactatgaacgctctcttagtgagctcactgccagcagtagggtggctgatggcagacgctgactggaatcaaatgaccaaatcattttttctacttggttgtttagtgcctcttcaatggtggatgccctacactgggccttcacatgggatacaactatcttcgccctttgtgcccaatcccatatctccctgcacattcctctaccccagaccttcttgtccctaatcttccaatctttctccttccaggccctggaccagccagccaagccacacattactgctcaataattccatatatgcttgaccttgggctacttttctttctgcaccgagtgagcagccaggtgcactacctcaaggttgccttttgggaggatttccctcactgctgtctttagggtgactcctgagtgagctattctgcagcagcattctattttgggcttgtacccaaatgccatgccaatttattagtgtatcaagctcagccttcccccactctatcagctggtcagaagggacccctgcaggcagttgtaagtgtgagctgagagagagctattgcaataatggtgacttcatcccatcccgcagggaaggctagggctagagttgtcaggaacttaggcaagtggaccgggaatctgtgcctctgcattgccccgtaatttgatgtgggctgctgccatggagaagtgtaactttgggcaaggcagcttcctccagcagaagaaaattcttg

SEQ ID NO: 2817 - DNA, 4001 bp, Homo sapiens
cttttgtctaacccatttttggttagaaggaaacttcccaactattgttcctcaaggtgcttagttgaatgcctcccttctcaccagtcagcctctcccaggtctctggcattgccctgcgttttctttctcgggcaggctacaccctgcctccaccccaacgtctgaggcttgttcaaactcactctaccttgaagctcttctccaatagaccccgtcccccaccccattcacttcttaacttttgacaaggagcatttaaaggtgaactgatttgcacaatgaaagaatgacagaagtcagcaattgccagcaatgcagactaaatatttattaggttccaaaatgggaaattggtagtgttaagctattttaatacaaatccaccactctccgcaaagagcctgccttagcatccatggccccccagtcctggcaccgcctgtactcttggggcctcagcaggtattgccgcccccggtagttgggcagctcgtagaggacccagcagccctccagcacgtggagggaacggatctcgctgaggtggaagcggtcctggatgctggggcagtcttcactcagctccatcatgaggcctttgtggtcttccctctcgtacagccgcagcctgtgggagactgtctactcggtccacagaaagaaggatggaaaaaagcaaatgagtctcttccagaatttgtccaaccaaagaacagatgaacttggtaggttgtggcatggaattgtcattgtaaaatttagacagtgtaaaatgtagattactgtggttgctgcgcatggatctgtcttccactagcacctaaatactggcacgctcattttctatttgacctgaaattcattcttatttaggagatggaatttttaagaggttcaaactctgagttagaatccatcaagaactgagatatcttgattcctaattacctgtgttaattcaaactacatttggggggaaaaatagaaataatttattttcactagtattcttttagtaagggtattatctcccaaatttacaaacatataaatttaccactaaagtaagatttaaaaaatcttgtacttcagtgtaaagttaaatagtcatttggaatgagaatttaactgattttccaaattaagaaaaattaccttttccaaagttggacacaacctttgaatagcctatattaacaatacagctttgaaggtttactagtccatggtggaatctatctaattcattcattagaaattcttttactatagacaaaataatttgttaaaaataccgtctttttatgcccaaccagcttcccatttgcaagttttgttttatatcccattatgatattacatttgttacagacctcttttaattgacttattggtagcaaaaatttcaagtaaaacggattcttcctctaagtgggttcttccttacattctctgctgtttttgtgcatgttatctatctggcttattcaggtctctgatgtccatctaacccttaggtgtttttaaatgcaaacctccctccctgtaacccacattgacaatacagtggggactctggcggcatgatggaaatctagaaaactcacttgggggatgagacaacaggagcggatggagtcgctgaggcccatccattgctggtagtcggggtactcccctcgccgcagcaagtattgttgaccttggtagttgggacgctcatagagcatccagcagccgctctccacccggatggagttgcagcggctgaaatacggctgcaggttggggcagtcagtggtggtttcgtagctgcggccctggaaggccctgtcctcatagaaggtgatctgcaaaggaagaatcgttccgaattacattatttgctcctaacaggcattatataaaggcaacttttttttcattttatttaatttgtgttctgctcaccttccccatggctggttgacacggatgatgcgagttcagtgtgatggggcctgcggctgcacagccagtctatatagcaggatggctgctgcgttggcaagaacaacacaaaaggggccctcagcggtaaggggattttatgcatctctttaacatcctgcattcactggaaatgattgtagattgtgtccttgttctctggtatattctaacgctgtcctgtacatactgctctgtgttgcttttatttggattgttagtgttttctaaatttatctgtgcatcagtctgaacttttgacctgaaattcgtggctctgtctatatgattgaattattccctgtgaattttctgggaaagatctatgccattatagaattgctccaggattccagagaggttgctgaggtagaatgccacaagcactgactcatttccctggatggcagagactgctctaccttacatttttgtctttacacaattttccagtccagggccggacacaaatctagattcttatcttggctagttttgacttcgttaacccaatgctttaagacagcttttaactatgcctttcgtgggcacgtcgtctaactagagatcagtccctggtagtgaacttacgataacaagcaagggaaaggtttctatggtcactgggcccaagactgagaagtaccgtatactactttatagattgctttccctttttcaagcgtgagggaggccataaagcttcacgggcaagagtgtgagctttggactcaggccgcctgtactcagaaggcccactgattagctccatggcaaattatataaccactcagagcaggagttatctcatggactatagtctgattaatgagaaaaaaagtgagaaaaaagagtagcctctgacattcagatgctggcgtggcactcgcagtgaggacatgttactccgctattagacataaacagtctcacagaataacaacttcagacaaggctactccgagaccaggatgaaatgagataaaataaatccacttcttaactttgcctaagcgcagacaaaaacaaagtcaatgctccactctcaaaatcccaagccctcactctctcagccaaaatgattaactgccacttctttatggattacaggtttatccgtgttctagtctcccctccctacgggtaagatttcttgagataactaatcacaaaattaaccctgctttctgctaacatctaatctggagtgaactccaacttttttagctccttccccaaatcgcacaactgaagtgcaaatcctataacaatttctttctaagctctcttactgagacactccatgcttccccaaggagcatgtcctcccttgctgcaacaagtaataagctcaacttgtttaaagacaggtgtgtccctggtggtctttagctaaaggacattgacatgaataagtgggattatgtgtataaggcatttggcacatacttggcacaaatgaacactgaataaatgttgttattagtaatagagtgacattgttaaggctgacttcatcctgtttatccctctcaaagatatttaatcctctcaaagattcctgaaaaaatttatcctctatgaagccattttgtgattaaagaaaaattaggcttggaagggactttcgaaaccatcgggtggttttcaaactccagtgtgcctaagaatcaccttgcttattaaaaatgcaaattaccatcttgatcttttggctaaatcctgcatcattagatcaggagaagacctcagaacctacatttttattttttattttatttattttattttattttttgagatggagccttgctctgttacccaggctggagtgcagtggtgcgatctcagctcactgcaacctctgcctcccgggttcaagtgattcttctgtctcagcttcctgagtagctgagattataggcgcgggtcaccatgcccggctaatttttgtatttttattggagacagggttttgctatgttggccatgatggtctcgaatttctg

SEQ ID NO: 2818 - DNA, 4001 bp, Homo sapiens
cagtggctcatgcctgtagtcccagcaccctgggaagccgaggcaggtggatcacttgaggtcaggagttcaagaccagcctgacgaatatggcgaaaccttgtctatactaaaaatacaaaaattagccaggtgtggtggcgggtgcctgtaatcccagctacttgggaagaaaattgctagggcccaggaagcagaggttgcagtgtgccgagatcatgccactgcactccagcgtggggaacagagcaagacttcgtcaaaaaaaataataataataaataataaaataaaataaaataaaaataaaaatacaaaaattagctgggtgtggtggcgtgctcctgtaactccagctactcaggagactgagagacgagaatcatttgaatccaggaggcggaggttgcagtgagccgagattgcaccactgcactccagcctgggcgtcagagtgagactctgtttcaaaaaacaaaaacaaaacaacaacaacaaaaatatatatatacacacatataatgtaaatgaaatatattaaaaatatattaaaatatatttaaaatatgttaaatatatttaaaatataatataatttatgtagttatataaatatattaaatacatatttattaaataaatatattattaaatacattatattcattaaatatatttaatgtaaatatatttaaaatataaaaatatgtattttaaatataagtatttaaaatatattaaatatatcatttaatatattgaattaaatgataatgcatcatttaaatcaatgacataaataaaatatgttaaatatataagccttctattcaaaatataagtgttttaaatatattaaaatataaatatttaaaatatattaaaatataaaatgttaaatatcttcatatattaaagaacaattaattctaagtcaataacttgtgaatgcaatgaagaaaaatggaggaagaaacatcagtaagtccaaggacgaattttgcataaactttagtgttctaacacacatatgggataaaagggacacatgtgtaaaatatgtgtgttgctctcctttgaaggaaagtcttacttatataggttgggaaaacccaaaatatgcaagagaggagcaaaaacgggaaaaagtctcaaaagaaattaccctgtttgctcagtaactgctgtacgctctagcatttattcttctattgggtattagtggtttttctacaactccattctaaatgattccagaataggacttaagtcttatacaacccctagggcaggagacacattcctactcaatacatatttgtggattaattgtgattaactggtgtctgggtaatactttgcttatgtggggagcaaactctattgacttaatccactatagttcatcttttgtccactctcagttattgtgactgatcactacttctaatgtttaacttttgcttgaaaccatccagtgagtgtcctgagggcctgggtcctgacttgaggatgtactcacgtgggggatgaggcggcaggagcggaccgagtcgctgaggcccatccactgctggtggtcggcatagtcgccgcggcgcaggaagtactggaggcccgagtagttgggctgctcatagagcatccagcagccgctgtccacgcgcgccgagttgcagcggctcaagtagggctgcaggttggggtggtcgctgctgcattcatagtggcggccctggaagccccggtcctcgtagagggtgatctgcaaggcaaggcgggacaaggcgaggtctcacaggcctgctcctgccccagtctctggcccccgcgatggaggaagctccggggtcccggggcgcaggctgggctcaccttccccatggctggctgggcgcacggcggtgctgagctggtggggcggcggcgctgagcgggtggggctgcggcgcggcgggctatatagcaggagggctgctgcgttggcaagaaccgcacaaaaggggcccccggaggggagcaagggcattttcgtgttctctttttttctctttgctgtgctagaccacggggcttgttgtgggttttggtcgcattctctctggagtattcggattgctatcactggctgatgctattgagaatgtttgtaaaacggcaatttgggacattgtctatttataatggaagtggagcttcagctatttcacatatagttcacgcttttattcgtatagattggggaaaaacaaaaaaaatttaagtcggggagcaaaaaaagcaacgactcttaataaggcaaatataaattaatctgtcagaactacagtattacttacgtgccacaatattgaatactgattgttaataggaaggaaatgggcttaactgaatgttgaaaatttcaagttagtcctttaagagaacgtcatcatgaaagggtgtaagaaattggaacattttattaagagagttcacagaatttcgaacttttattatggtaaaacacacagcaaacgtgaatcttcaatattgggtctgattttgttgcaattatgcctggaagtagctgagaattagatgtttttctcttagctaaaggtggtgccgtgattcaaaagagagaatagttctaagatgcttaatctcagaaagaactaaaaagggaaatatctaagtttgaggaaattagaaaaagtaatatgtttgaaacacaaaaacatgatctcttagcttgttataaaataaaaccaaattcctaagaaacttatttctggtaggatctagaatacacctttgccctctgaacgagcgagagtacacaaggcctttgactcagacgaaattaattgcatgaacacaaaggggagctatggctggaatgatgcagggagaggaaggaataaaaatctagaagttggactcgaggaagacttcagaaagtacttattggcctggaagagagcagtttgatggactgggaagagtactggagtggaatatgacctatgtgtccagcttctttcatgttcaaagaattgcttacagccctgtgtcaacccatggaagtactttgtcttgtctttgagtcataaatctttgtaagtggtatttatgaattaaacaccaactatgtgcaatacaaattattttaattcttattttctggctgcttttttttttttgtattctttctatatagagctctacggtggtagggaaatacctttttcttttgttttgttttgattgttttcttcatccccattgctacatatagcaggcgtatggtaggtgctcaaaaattggtaaggatcctaactcaaggaagttaagagtctctagtggctaataattggaggctattgaaatggaaaataaacttgtggctgggtgtggtggctcacacctgtaatcccagcactttcggaggccaaggtgggagggtcacttgagcccaggagttcgagaccagccctggcaacatagtgagaccccttctctacaaaaaagtgaaaaaattagtcaggcatggtggtgcgcgcctgtagccccagctacttaggaggctgagatgggaggatcgcttgagcctgtgaggtcgaggctgcagtgagctgggtttgtgccactgcactccatcctggacaacagagtgtgaccatgtctcaaaaaataaataaataaaataaaataaacttgcactatgagccggtagtctcacttctaggtcgctatctttttaaaattatggcatgtcaggattagcgtatatgtacaatgttattctttgcagcattgttggtaaaagcaacattggaaaagcccagtcacttaagtggacaaatggtgaaatggtctaagggacctccaaacaatgggatgcaattcaaccatcaaacagaataagatactgacctagatatatgtccatattataatacattttaaaagcaagttgcagactaatatgtatagcatgattccatttttgtaaagaa

SEQ ID NO: 2819 - DNA, 4001 bp, Homo sapiens
ctggttttattcagtcctctcccttagtgattattaaaagggtgatatttttagccaaagaaagcaaaatgcatctgcagcagctggtttccaaggaaacagaataatttaaaaccatgtggaactctgctctctaattttcatcaattccccttcattcctggaggtagctttactcagaatttataatttctaaaaaatatagctgcattgatttatttcctctaatacattttaggagatgaatatctggtcttatatatcaccttgaatttcaatcttggggtgaggggtggattaatttcaaccattgttttgcttaaaaaaacaaaatcggaaagatccatcaataattagaaacatgccaaaatttcagtattatgtaataatttttgaaatccagaaacagttcaaaatcaaccataccagaatatttacttggttcattatgacacttaaccatataaacatgttattaactatatttagtacttttaggaaatttaaggtaattctcaattcatttagataatccatactaatattcagcaattttctcactcattttaattttccaagaactattatatttgtgtctgtttattcaaagacaaaatctctcaaacaaaaaaagtacaataaataaaaaaatttgaaaaacaataaacaaaaagaaaaacaatagcaaaaaatatttagaaattatatagtcattcctattagttttgattcattcaaaaaggtattaaaatatgtaggaacaaattatttacctcattgaaagacttttattttattattataatcaacaggtattaatcgatggccagtgtactgaagtcagtcataattcttgaaagttcaattttaatgaggttctaccaccgttaaatgacctgtatttatgaattaaagtaaagaattaagtgactgggagttcagtttttttgtatgtttttactgcaagtgtgttatttattctacatacttagaacttgtcccttttttccctaaggcaatataaaggaccatattaggagatacaagcacctagtaaagttgctaaaaaaaaattgcctagagatattatcaacaatataaatgctctgatggaattcttatctagatgtgtttgactgataaattaaactacccatgaaacatgactgttaagatgctattttttacagcaatgtttaatctttcaaaattaggtttctgtgctttaaaataaaaatggctccatgtaagttaacaagtagagacaaaccattgtttaattatcacataagcttaaagtttgctgaataaaataatgcaaatattgaacaacatgagatttatcaagaggagtaagttaaataacagggcttaaatgcacacaaatcattcattctaaattaatgctaaaagagtctacaacctgcaaaaatagttttcctaagccttttactgtattgtcaatattaaaagccatcacatgaaattttatattgtatattcacagaaggctccattttctcaggacctgtggaatttaccgaggttttctcatccttcctgcgattcctagtaacaagcttgaattaaacatttttgaagagacacatgatgattcattttatctattaattttgcttcagtgacacttgcatagaaagttatttaggataagacatgcctctggtgattgttttgttttgtttttaatcagctaaggattttgcagagagaaagaacagcaagctcattgcaaagcttcctcaagtaataaaagggacacactttcagaaaatgtcctcagaataattttcctactataaaattgtttccgtaaaaattaagaagcattctcttttaaagaaaaaaagaattctcttttctttttttttatttttcgctcttacctgtaaatatggtttctgtacttcggctccgtcagaacacactgaagagagtacactcctccctcgtctatccatcaggcggcagccaaccaataacaaaagccagatcctggcattctctagctcatgctccctgctttgcttccatttcttgttccctcccacctccactcttttagaggacgaatccctgcagctgggagagaggaagcgagtggagaaaagaaatatggagagaaaagcagagatgcaagatatttcaaaaaatagctcccaactatggaaaatgtctgcagatgacctcagctgaagtaaaaagtcttgctttggatttagaaaaataaagttaatcaatgcctcacctacctgaaatcaaagcaaaatgctcatagtaaaacctaggtaaattgcctgttttttagttcccactgatttttctcagtgaaaaaagtgtacctcctcattatacattttgatatgcagacagaggagggagactgaacatcaagatgacattttgcatattcagtttgcaaagagatagaattaaaatgaatcaacaccctttatacttatgttttatattatttgcactacaacctctgtttgacaatgttttcattcaaacgcagtttcgaggcctaatcagtatgaaaaatatttcattctgagcattagaatattcaaatatttcacagttatgtggtttgcattacttcagattccttaaatgccatcaatttgtgaataatggaacttattaaagattaaaaagagatcagtcacttggttgccatgcctcaaagtgaccagctgaactccaattttattctaataaacttaaacaaaaatcatttcacttctgaacctagaggcataacatgcattaaaggacagttaaagaaaacaccaaattaggattttttaaggcaataaagcaaattcatccagtttcaaacagtttaatttttaaaatactgtaatacaaaccagggatctttatgataaaaattctctcaattgagcttcctctagtggaggtggtctgaaaaatttccttagaaagacatatacagtagatatcaccactatagaggtatgtactggctacttgaggtatttataagccttgctcttcaatttcttaaatcagtaatgtgtcctcatgggaataaggccaaagggagtaaaattagagggaagggcaagcaagcattctttaagagttactggcatggtggcaaatcattagtccaggaatatctgtacaggaagggcttggggtgtcaatattgttaggaaaggaatggctggtgacttaaactgatactaactttagataggagtgcactgattttgcttagtttgcactgttatttagagtagctttgggaggctctgctaaagattatggggaagactaaactatcgcttattcccaccgccaagtcctctgttgtgaaaaatgctttcaaagcctttgtggtcctattgctaggaataactggaggaatccctaggacagacagcatttttagaaatagttgttcggggccatcttcatcagaaccactaggggaagattcattaaaaatgcaggttcatgggcctcctccagatttaatgaataagcatttgaggagtttctgactcagcatttttagcaagctctcccaggtgatttatatgtcaagtgtgattgtagacagagacttgtaggcaagtatttgcagggcacaaattctaaccagatttcttctgtttagatgatgatgccattgtctcagaaaaaaaaaaaaaagagagatttagagatttgggaacaaaataacaaaattaatttgaacgttttgaactttttggatatccagattaaaatattaaatagtcagttaaactcataaataaggctgggatgtaggttcaatttggaacccccagcatctagggttcggttaaagtaatgaaaataaatgagcaccctaagggtttaatataaaaattttataaagaactcataaaacttaacagtggaaaaacaaacccaatacaaaatggacaaaaggcccaaatagacatttctccaaagaagac

SEQ ID NO: 2820 - DNA, 4001 bp, Homo sapiens
gcagagaaccccagtacatttttttcaggcaactgatccagctttccaccagccctgtgacctttgaactcccttctgccccctcctctcgcttctgcagtcaaagcctccgagctggtctcatttgcataaggctcaggcagtcctccagcagctgaaacggaatgctgggtaaggaattgtggaactgcggttctgccaggctacctgaatcacgggagagcaggaatacaggatggggagtgggcacgggttttactgggctgtcagcatcacatttccctgtgtctattaatggataaacgattttaacgctttgttttagagtcctattctcactgcttactccctccccaccaagagaagctgtcagcagcgactatggtaaccaaggaaacccaaatagtcaaatgcttcatttaaatacgtgtggaaggccaattttaaattttcattaacttcccttgtttttgaaacacagctttttttttaaattcaaatacatattgcacgtataatcaggcacatggggtatttctttttgttgctgtggtttaaacagcatcttacaggcgtaaatttatattagtcactacacaaatacatgaggtcactatagtaattctgtaaaatgttaaatgtgcccaagtgtcttagagactatcatcctaagtggtgtccaaaaattaattgtaaagaatttaggtcccaggatgcctttaaaacaatacagcagtcaaaatgtagagcaaagttaaactatgtatttaaatctaaagattcatatagcagcaatgcttgtctgtctttggcaaagatattcagtgttgtgctattatttgctagttatttcttcccttatttttctacacacaacaatctctctatttgaaacataaacttctctattgctcataaatggaagaagtggttattttctacatagaaaaagtcatgtgtgtacatattttataaatatacataaagacacataatctttctaaatggtaagccaatgaaaatatgcatcatcaaataatctcttctcttaaaaattaagcaaatttgtttttctctaaatatcaatgaataatatttataaaataaaaggttttgtgcaataatctttttcatgtgtcaaaagaaatataacatgaaaaattaaaagcacacaacaaataaatacagatatgtgttactaaagtataaaatacattgttctaatagtgttatttacatttcaaaatttccttgtttttaaattttttaattcaaataattaaatattccaaaccttccttttgcagtatactaacacacatcaacaaattttgaatgatatattatctaatttataagacatgtaaactattgcaatacagattgttttaacactggaaaaataattttgaagctttttatgtgaactatttgtcagtagtattctcttttatattatttctgcatacacaggagattaaaaattattggatgaatttatttcttacccataaatttttaaaatagactaaataacttttcagtttaatataatgatatcaacatttctctgtcacatctgactacatcgacaatttaatcgcattgggtcaattcaagtgcatccttaatattatacactacaaatatcttgcaaagtttttgtttaaggcaaaacacaccagcccattctaatttaaatccagtcaaacacaaggaagtgttggagtaatttataaaatcaccaacctgttcaaataactgtagtcttagtccttgcactctttattcattaggatccaaaataaatgatcattttatcatatgtgtcagcatcaccgaagacacagttcttcctggttcagaggaatcttcttaaatttcccagccctgtgttttattgcttgtaccatatgctttattgttcagcaacaagagcttcactctgcacaaagactcattacctactgcttgctgcacggcatcagcctcactgaggctgcctatatgtgatcacatggagttttgtctgagagagccaggcgtgccactgacttcactgtgtctatggatatttttatcatctgaggtctactaggaggaaggaataacagataaggaagctgctctaagtcattaatgcagcacaacttatggaaatcccttcacaagatttttttttattatagaaaatgtttgagcaagctccaaaagaagttaactagattttattttaataagaggttgaataataatttaaggaaggagaacttgcaaaaagccatttcctatctcatattttctgaaagtacttttgtacaaatgttattaaagagccttgcgctactgaatgatttggcaatatgttttaaccattagattgctggcatttctttttcttggtgttttgttttttgtaaaaagataattgctgtttccttcaaaatatcctcaattaaaatctcaatcactaaaagatactatatgtgaataaaaatagatatactaattacttttgataaagtagatgagaaggtgaatcttttttattaatgtatatagatgaagtagatgattaatttatcttttcaaaagatgacacattcctagaacagctgacttaaaggaacaatgcagatttcaatttaagttctaaaggacatatggtttttattaatttttaaaattgcggtaacttattttagacagcttacctcaataaaacatatgatttaccttatctgatttcaatgttaacaagtagtttcagggaaaactatccaacatttacaggaattttccaccacacaaatattacattaatatatatacaaatatgtgtgtgtatgtgtgtgtagtcagattgcctttctaaaaatttttttaaatatataaaattatttcttaaaaactgaaaatggaatttggatttccaaatacagaactatttagttattggaacttattttaaaacatcgatttcttatctctttaatgactgtctaaattaaaatgatgtttgaaagcttgttacttttaagtctcagtgaaaatcttatgacaaatacatgcgaagtgcaacaaagaacacacacagaaggaaaagtcagaagcactataaatacagatgagaaaataaattttctgagtagttagatatatagtaacttaacggcacttataaataattcagtaattaaaaagtgaatatacatatatatgtatatttgcttaagccttccattagtaagaaattcttttggggcaaaaaatattataactcaaaattttttgtgtgtcaattgaaagttttaaaaataatttaaaaccagaataggtaagtatggttaagtagcttagcttttaaatacaatgagttaatacctttctttatgatattatttgtagggttagcattgatctagaatgtttatgacttaaataaatgtttatgacttaaataaataccttttgatgggtttttcttaacattgaaagaaatattcatatatgttttagataccaccattttaatgcatttgtcccaaaatgttcatgttcatttttagcacagcattagagctatgctaaagctgcaaaactttggggcattaaaagaaaagggcttatagtatacttctgggttcttaagatatgtacatcctagttaatatatttgatcatgtcacccatgctaatgtacaaggaagtaaacaaaaggcagccattttttttttttttactgcattacttcaaaaacattgaaataaaaaggttgcccaatggaaggaaagaatcagcagaaaactaagttatttgcaagtttttagaaagtgagagtgggagaacaagagctgagaaattgggaaaaaaaatccacatatatgtgaaatttgtgtgtatatatgcaaaggaataatttaacaataagaaaataaatacaaggaatatgaaaatagctagcaattaaaacacattgccagtaaaattgtgagtctcca

SEQ ID NO: 2821 - DNA, 4001 bp, Homo sapiens
ccgcgtctctgagcctcctctgagttcaaactctctccctgctccctctcgggctgggagcttcgggcacagctaaggcggccgcccggggcggcggcggcggctcccctggggaagatcccggccccttctctcctcccacggcgccccggcttcggccccctccccgcagccccggtacctttgccccgcagcgggccccgagcctcctccttgctgatctgagtaatgacggccgagctgtccatggggccgggcgcgctccgctccggccggactctggcccgggcgcccggcctcccccccggctggggccggaatcggggcgcgggggggaggggaggggtgggagggagggatccccgcgagctccggaggggaggggagccaggttctaggggggagggggagggagggggcgcggaggaaactttgttacaacatggagtttccttcccgcgaggcggatgcaaacatggaacccaggcgccgtttcaaggctcccccttaaaagggcaacggcttcggcgtgacctggactcggctgcggctttcgccacttctgggaccggcgcggctaggcggactgggaggcgggccgggccgggttcctgccgcgctccagggggcgtcgcctcccttcctgccgcccgccggcggggctgagtctctgcggctgcgtggcaggcccggcacccggctcaccgttccaggccgccgagcgccctcggccaaggcccgcccgccgggagcgcccacgccggggagtgcccgagtgcggcgcggctccacctctgcgttttctgaagacccgggactagaggcttctcggtttcctcgttgaggacttggagatagcactacctcatctgtaaaatgggtcttctctcctgtctggtggtcgcagagatcacctcgcaaggacgtcaagagccagcgaaggctctgctggcccgaaacagctgtgcaaacctcagaatcacgctcttgaatgggacggtcgccgccccccgcagccccagggcgaggtgcccccggtctgtaggacgtgaaattctaactctctgccctgggaaagccccctgccgacctctccccacggccccacccggggccccgcacgtctacccgccgcgcacgggccaccgcgcgttcccgcctgaagttttcgtacgcgctgttcctttcgcgtagccaaattccaccgacctcgaggaaatgccaccttctccaggggccttcccagaccccctcccctgcccgcggtcgacggccgccctgtgattactgggggtgcggtgggagtcactggactcgctgccgatcctaggagcccagcacggcgccgcacgcggtgggcccaaagcccgaccgtgggggacctcaaaccagaggccctcaaggcccgttccacccggcctgtggcgcagtgctgggcacttgggaacggaggtccctgtcttctcgctgcaagcccctccgtggtgcgcgccgtgggtctgcgggttggtctttttcctcgtttatgaagttcttttcactcgtcgttactattttgtaagttcaccatttaaaaattaataatgccaagcccgacaaacacccctcggcacttcctcccctccccctctcccgcgggcctccgtggcggggcggggcgggcgcgtcctgtcccgtccggccgccgggtgcgacgcggcgcacgtccgccaggccctgccgagggggagccggggaggggaggccccgcgcgggggccgggaggggaagggaggggagcggcgtctgccagaaggcgcggcggcttcgtgcgctgaggctgggagtaggggcgggaggggactgtcggggactgataccccggtccccgggctggatccctcggccctcctcctgctcctgggtagcccacggggcggccaccattgcgcttcatcaccgtgatcgccacacgctgctggcgttttcctaggcctgctctggctgcgccccctaatctcatttaccccttagaacggcctccttcttaacccatttcacagatgaggaaactgagtttcaagaaaggaagcgacgtgcttcgggtctaccggcaagggcaaaggcgggattccagcctgggagcgggacatctgtctcccctgcggtccggccccctgggtggggcctcggctttatctccggatgcggggccctcatgaccccaaaaggaagcgtgtggcgagggactgagtggagtcgtggcctcgcccttggcctgggttgggtggcgcgctttcctctccctctgtgaagggggctggtacctggccggctgtccccacacccaccattcccagacgcgccatcctgagctcacaggattcctcaggaatcccccacctcctccaccccatcttatcgccacttcaagccgttgcccgtgcagttcttttcccagggagacctaactcctcctcccaggctcccaaagcggcagaggtagccgcgccttctgcctggagccctggacttatctccccacgcctggggcgggtagttagttacggagtgagcgagaggccaggattgcgtggggggaggggggtccttcgagtgtcctcactgtaggggttgtctacacccagctgccctctgtctctacaggtggaggtcgctttatgcactctattttttgtctgttttatcattcgcaccccaggaaaaataaaatcatgggggccacaagtcagaaacggggaggggcaggaacgggattcagcaaggtgctgtctggcacctgtggatttggaagcgtctcttccaacacagtccctcagtttccccatctgccaaacagggctggtaaaagcccaacccagggggaggcggggagccgtgcacaaagtcggggtgcattcagcaggctcttggggagtgccaagtgcgaccacgccctccctgggaggcctaaagggagcttccagaagagcaactctgcacccctcttcctggagggtcgatttgaggccaggctggaagaaccagagctactatggggggaatgggggcagctctaagtagacgccttccagtgtccaaatgactgaccttggcgcgacctcatcactagccctttgcccaggtcctgggtagccctttagccgggtctccgtgtcttcttgaccaacctgcccattactctgccgtcccccgtcctgccccacaagatctaagacgtccccagaaagcttcaggtcttggcagatgtgcacacacgtgcccccatgctcctggcactctcattcctcctgggctgtcctgtcaacactcccccctaccgccgacccccccttcagcaagattcagtccccttccctggctggcgtcacgggcagcgcccttcaccgcatcctgccacagggacttgtttgcacagctgtctcccgccgctggagtgtggggtccttgagaactgacatctttaattcgggactttgccgccctccccaacttgtaacacagagcctggcagaggactggcactcaatgccaagaggggtgtgtagggggtacaacgggggcacttccaggaggctaaaggatctgggagatgcctttcttcgctaaacgtcccccatccatctcctccttcagctggcatggacccatcttctccagtgccaaacccagaggaggcgggcggccctcttgcccaggtaccctctgcagcgcttgcccaggtcgcaccagaccggtcccatctcttctctccttgagggacccactcgcatcgttgcccttttaagaaagaggaaattcttctcataaacaagcgtccggacctgagcgcggagccaggccgcctgccctgctgggtccccaggaaatcgggggttcttccaggtgcaacacccggcccaggttcaactctagggaaaggcctgttggcctctcctcgctgcggccctccgcaggtcctgggctggggtctgagggacccgacgaggctggaggaggga

SEQ ID NO: 2822 - DNA, 4001 bp, Homo sapiens
ctgagtccaggtgcccccgtggccccacctggcccccacgcaccttagggatggcgccattctcctccacaagcaggggcgccccgctgtgagcaggcagggcctccccatcatcccggcagacacagcagaagagtgagtggaggatgccccggcttcggggcttctgggaagctgctgacttctggtcacctgaagtagggaggcacaagttggaggctcggtgcacactggcctgcagaatcctgcatgtgtgcccaggtgtgaacccctgagccaggaggatcttgccgtggccccttcatccagacacacgaaggcagctcctgactttctctgaaacgcccctgtcagggctccacaatcaactgcaaggctcctgcagctcccagacaaataggtctagcaggtattaaggcgcccacatagggagtgcgtggcctggagaaggaggtcctggggtgctctctccctgcctctcacagcctccatgactgctgctgatcagccccattgcggtgcctcctgaccccaccttacctgagcacccctgctcaggacagccagggcctgggacccagggcagtccacccctgccctccctccatcctctccacccccgtgggtacgaagtcctcactgcggctgggcccagaggcaggggtgcagtcccgcggcctggggccagtgtccagtggccatctgtttgccctgccccgcccagacctccgacctggagcccagcagcctgattgacagatacccctcccaccccacccccctccggccccctgcaactagcctttccaccttgccctcagttccggggcagccagacccaggcgagggtgggcagacctgggggcagcgtccagatcctgaggtccacacggggaaaaggagaagacagacccccccaccccggcccagccacgctgggggacgcagcctcgtcggggcggcgaggctttgcggggtggtgcgtgcccactaggcgcacgactctccccgcgggcgccaagcgactcttggaagtgccggccgtcctctctgtgcctccgagggggtcggcgcctccacgcgtgacgcgaagtttgtggggaacgtagctgtgtgttggcgggagatccctccaagcctccccagcctgctgtcacctcggcgccccctcccaagaccctaccggaccgcagcccgggggggtgggggtggggggtggggcggagtctcagcgggtggcccataggcgccctcctcagctcccccatctcccagccccattggcgccaatggtgggggggcgcccatgcaccacgcaatgcctgccaggaaacccccgaagagttccctctctattcctgcctcagtttcctcacctcgagcgaacaggagcgccccaaaggcgccaggccccgccccgcgtctctgagcctcctctgagttcaaactctctccctgctccctctcgggctgggagcttcgggcacagctaaggcggccgcccggggcggcggcggcggctcccctggggaagatcccggccccttctctcctcccacggcgccccggcttcggccccctccccgcagccccggtacctttgccccgcagcgggccccgagcctcctccttgctgatctgagtaatgacggccgagctgtccatggggccgggcgcgctccgctccggccggactctggcccgggcgcccggcctcccccccggctggggccggaatcggggcgcgggggggaggggaggggtgggagggagggatccccgcgagctccggaggggaggggagccaggttctaggggggagggggagggagggggcgcggaggaaactttgttacaacatggagtttccttcccgcgaggcggatgcaaacatggaacccaggcgccgtttcaaggctcccccttaaaagggcaacggcttcggcgtgacctggactcggctgcggctttcgccacttctgggaccggcgcggctaggcggactgggaggcgggccgggccgggttcctgccgcgctccagggggcgtcgcctcccttcctgccgcccgccggcggggctgagtctctgcggctgcgtggcaggcccggcacccggctcaccgttccaggccgccgagcgccctcggccaaggcccgcccgccgggagcgcccacgccggggagtgcccgagtgcggcgcggctccacctctgcgttttctgaagacccgggactagaggcttctcggtttcctcgttgaggacttggagatagcactacctcatctgtaaaatgggtcttctctcctgtctggtggtcgcagagatcacctcgcaaggacgtcaagagccagcgaaggctctgctggcccgaaacagctgtgcaaacctcagaatcacgctcttgaatgggacggtcgccgccccccgcagccccagggcgaggtgcccccggtctgtaggacgtgaaattctaactctctgccctgggaaagccccctgccgacctctccccacggccccacccggggccccgcacgtctacccgccgcgcacgggccaccgcgcgttcccgcctgaagttttcgtacgcgctgttcctttcgcgtagccaaattccaccgacctcgaggaaatgccaccttctccaggggccttcccagaccccctcccctgcccgcggtcgacggccgccctgtgattactgggggtgcggtgggagtcactggactcgctgccgatcctaggagcccagcacggcgccgcacgcggtgggcccaaagcccgaccgtgggggacctcaaaccagaggccctcaaggcccgttccacccggcctgtggcgcagtgctgggcacttgggaacggaggtccctgtcttctcgctgcaagcccctccgtggtgcgcgccgtgggtctgcgggttggtctttttcctcgtttatgaagttcttttcactcgtcgttactattttgtaagttcaccatttaaaaattaataatgccaagcccgacaaacacccctcggcacttcctcccctccccctctcccgcgggcctccgtggcggggcggggcgggcgcgtcctgtcccgtccggccgccgggtgcgacgcggcgcacgtccgccaggccctgccgagggggagccggggaggggaggccccgcgcgggggccgggaggggaagggaggggagcggcgtctgccagaaggcgcggcggcttcgtgcgctgaggctgggagtaggggcgggaggggactgtcggggactgataccccggtccccgggctggatccctcggccctcctcctgctcctgggtagcccacggggcggccaccattgcgcttcatcaccgtgatcgccacacgctgctggcgttttcctaggcctgctctggctgcgccccctaatctcatttaccccttagaacggcctccttcttaacccatttcacagatgaggaaactgagtttcaagaaaggaagcgacgtgcttcgggtctaccggcaagggcaaaggcgggattccagcctgggagcgggacatctgtctcccctgcggtccggccccctgggtggggcctcggctttatctccggatgcggggccctcatgaccccaaaaggaagcgtgtggcgagggactgagtggagtcgtggcctcgcccttggcctgggttgggtggcgcgctttcctctccctctgtgaagggggctggtacctggccggctgtccccacacccaccattcccagacgcgccatcctgagctcacaggattcctcaggaatcccccacctcctccaccccatcttatcgccacttcaagccgttgcccgtgcagttcttttcccagggagacctaactcctcctcccaggctcccaaagcggcagaggtagccgcgccttctgcctggagccctggacttatctccccacgcctggggcgggtagttagttacggagtgagcgagaggccaggattgcgtggggggaggg

SEQ ID NO: 2823 - DNA, 4001 bp, Homo sapiens
gagaccagctctccatacagagaggcttgcatcaactcaaaaatagtggctgcatgccaaattaccttcctgtaactaaccaggcccctctccagtcagtctgacaagtgaaactcaaaacttgtgttgcatgatgtcactcatctgctcaatccctttgacactttactaacactgatcgcaaaaacaaatacaataaataacattcaatgagtcccccatgatccaattccaatctatcactctggtctgaatttctaggacacactttcctgcttataaatcaccctatattagagacactagtcccttccaccaagccacttgcacgggacatctgtcctcagaagagaaaacagtttggcagcagccattgtcatgtctattccagcagctctagctagctagactacagcttccttccctaaccctcacctctgcctatcagagatgccctctgagcatccttagcactgtgataactccattgcagtagttcattactttctgctctgtattaaagttatttgtgagctaatcatatctcctcactcttttacttgtggttcatgaactcctgtgagcagtgattatagcccacccaagtgagcactcaataatctttattgtattgactctaagcttaagaaatcctaaatgtcctgccctctccccaagcaagctcacactcatcaccactaaatgcggtcacactcaactttccagtattgggagggtcctgttactggttgagataaatttactttaggaaatttaaatacttctaagagtgtttatttaatctttacatatttaaaacatgtaaaaataagaaaacatatatgaatatttcttctccagtaaaaattaaatcatcaaatatcttttgagtacctacttcatacaaactacatggtttcttaaccaagaaggtctagagagagataaggttgagattcaatggatatactcatcattttaagccgtgtaacaaacctggtgtcagtctctgaagagctgaaaactgaggatctgcatctgaaacccacacgtaggtcaggcaacaattaagtattgtatgccaaacagactggtggctttctttctttccttttccttgtcttttttttttggcaatttcaaacttttatttttaaataattggctaattagctagtagaattgattaagagaaccttaaaaccttgaattaagtaaagaaggcattcttcccacaatttccctacattttaaacaagctggctaattcatttataaagtatatgaatccgaggaccttaaaaccttgaattgtatagcaaaaaaactcttcccaggatttgcttaagtcaattttttttaaaggaacttgtgagctcatcctgaaacccagctcaaatgtattcaggactatggctatcctttccctcttaaatcacttccagtctcatagaagggtctgaaattgcctgtgtctctctactaaaccaactcacatgcattcatgaagcccctactaaatacctggcgctctgttctgagctatctctttgccttatttgctgccgcccaactgctccctgctggccctggaatacagagccagccaagccagattggagttttacctttaacttctggctttgctataaatcactgcctttgactgctgaaacaaatgaaacccaggtaggagaaacacctcctccatcttcatgctccaaaagtctcactcacctttgcagaagacagggatgaagagaagaaaaaacaggagagtgcagggccaggtcctggtagccaggttcagctgagccttgtgccgctgaaatccaaggcaagccatggctttatgggagcggtgttcaggtcttcaggaagtagagcaaaacctttcaggatcctgaagctttgaaatgtgtttgaacccacacagaatcaaggactttatatagatagctttgatcccagatatgtattacacatgtgcacacacagaaggcacttgaatagaaagcctttttgttttggttttacgagaaaggaagccgtgggtttagctgttacgtcgaaaagacaacctcaagcactcaactgaacaaaacaagccaatccatggatggaaaatgtattcaatttgaaactgaagcttcatgttcactttgaggatctggataactaagtggagacttggagaatttcctggagtacaagggtcctcctaaatcccaattttattcaatcttctgggcatccttaaccatccagtccaattcatttcattgacaactccaaaactactaggctgctaactttctgagcccttgggctaatggcaggatttgtctaggcatcattaataaaaactgtattctatctgtgaagcaccatccttctaatggtcccttgacagctttacaaataagtttatttctcctaaatccatttagcatttggttaagagaaaaaaactaaaatcacaagaaataaactgaaaataggcggaaaagaagctgcctctggttttgcagaaggaaagaattcaggtgttcttaaaagccttaactcaacagagacaaaacagagttgaagaaggtccaaagaaaagccaacccaaatgattcaagagattagagccgtccataaaaggatagacttttttttctaatacaaatttttcaagcagaaaattcaaaagtgaagattaaatataaccagagtccttaaatttgtgacagctgtagacaggaccaatgatctaacaaaaagaatttgaaacattgaggaccttccttaaatctggagagttttcatacattttaataaagaaagaaacattcatggggaacctgtaatatgcccggaattctgtgcacttaggattgaatgatgacaaaacaaaaacatagttgataccttaaggggcttctagaaggctgacatgcaaacagacagttgtaacagggaatatgacatttgcctactccagtccgtccatggtttcccattgtccacacctcagcacagcagaggagactctgcagaatactcaccaaatgcctccctctttggcctgtaccccagcattccctcccattcccccttcctgcatttgtctttccttccacgtgcctctttcaggcctcatcacctttacccatgctgttcctactgccttttttctcctattatcttattttatactccttctcatcctccaggacttagctcagctgtcatctcctccaggaagcctcttctttttttttttaaaattttattattattatactttaagttttagggtacatgtgcacaacatgcagatttgttacatatgtatacatgtgccatgttggtgtgatgcacagaagccttttctgacctgcctgttttctatacactgctacacattatagaaaccttcaagccccagctcaagcgccaacaagcaataacaacctaatgggcacttcctaatgccagactgggcaacagaggttttttaaaaagtgaaaaacaaatgttcctgccctcaagaggaacacacagcagtggcagggacagacagctaaacccatgatcatgatagagtgagatcaatgctggaattgaagtattatgtagaggagcagaagccagtggttcagcctgtggaagtcagaaagggcttctcagaagacgaaaagcctgaacttattattgagaacagagaaaagggtggatattcagacaagaagaataacatgggctaaagttggaaacggcatgaagagttcattatggtcacaggacaaagcttgtctggggatgagcagaaggtgcaagcggatgctcttagcagcaagggccaatgaaacataaggagcaaactggtatgactgagttcacatttgggggaaattttagggatggggaggatgggttcagggagaaatgtaaccaggaagactgggaagaagactattggaatacgccaggcaccaggatttggaaagctt

SEQ ID NO: 2824 - DNA, 4001 bp, Homo sapiens
tattgcactactgtcatataataatttaaatgaaaagaaaaaaatcaataatgtgttccacagcatagtgtcttactggcaacttcaaagaatccaccattaattttggtccctcacacatactccttaaacacaaaacacagctattctaaagatattaaggttttttggtctgttgttttaggagaatataaatagaacaaaatataggcttcaaaatatccatttttgatttatacttacactgttggacccttctgagatgataaatatgctaaacattctgaggcatggctgtcccgccatgtaaaaataaactttacagcagcaatgctaacagaaagaattgtcaaattgccaataacatgtataatgtaaggggttagaatgcaagctgaagagagcaaggtaaattatagcattctgtgaaaataagtgatgtaaaaccaacagcaattttaaattattaacaatggttccgaagctaattcaacttttccattggtgtaagccacaaacagaatcacacagcatgtttctctttaaacatcttcaggggtcctacgaggtgggtgaaaatgggtaagggtgtctgttaaaggctctaatgcagctaatgccatctaaatggtatatttacaagcctgtggagtataacctcatttctccaaaactgtctaaccattatcctacttgagaagttaacccatgatgaacaaaagtacctctcttccacccttctgctccctattttcccaaacctttctatcttggtattttgtatgctgagcaaaacattccataaataatgctgtggtgcacaggcattaaagtttagagagtttctgcctttgaagtaggtagtgacaggaccaaggacacacgggttcaattccaagccaaatatgaggcgggtggtttgaaaatgtcaaaccaaagaggcctaggggaaaagaacacaagcttccactgccacctcccttcctctcccctcccctttttctctcttgttcctttcctctcttctcctttttcgttgtggtttctcacggagacaatcaaagcagggaaggctggattttaaattggtgagacacacactggaaatatgtaattcccagaagaaaaaaagaaactgctgaagaggggtatgggggctgttggcagcatgtccaagtgacaaccctccccacccccaccctaatatagcacaaatccacagattcttcttcgatcctcttctccctccagttcccagtactctacccaacttgacccttcatcctaaaaatttaggaatctgcagggcacccgctgtttaagagtgtgtctctcagtatatgcacccaattttctggaacccctgaatccggacagttgtagcaggcaagggatgctcccaccctcccaccggggaagaggtaagaaaggggggaagaagagatggagacaagaggaaagggatgcagagctgtgctctagggcgagtggctgcaaggaagacggggaagaaagaaagggtgggaaggaagtggggctgggagagaggaagaaagggatgaaagaaaggctggaagggagaaaggaggggagaggagagagggatgttgggaaggatgagggagggagggttggggagcggggaggggggaggatggagaggatgggagggaggtggggagggagggaggcaggcagggatggaggatgctctgcccgggactcacctctgtgggtcggtgggagtttctcgcctcctcctctttctcgcccgttcccagcagctggagtggtaatcacagaagggactggagaggcggcggcagggacaagggcagcagctgctgcagccgcctctggccgaggtgcggtgccgcctgctctgcccgcccgcctgggtctccgcctcactcggggctggaagcgaagccgctcccccctccccccgcccgccccgcgtcctgcccaagcgcgagcggcagcggcccggatcgccgctaggggaggcagccagtgcgcatgcgcggccgcttgctcgctcgcgcgcccccgcggtccccgtggctccgcggcgcctggaaaggcaccgggcatcgaggggtggctgggtggggggccgcgggcgcgcgcggcctggggagcgcccgaaagggcggggcggggtagggcggagctctggaggcgcggcaggctcggcgccgcaggtggggggaggggacggcggcgaaggggcaccgccgtagggcgcaggtgccgtgtccatgacaaccgcgttaccctgcgggcggggacccggagctgaatcgccggagtcgcgaggcccggggagagggaccgggtgcgggagcgggcaggataggggcgggggggataggggtgtcgcagagtaggaaaggagggccagcccagcaggggtccgacacgtggcaggaggagggcagggccagagtgctgcaaaggtagtgactgccgcggaagggaggtttgttgggatgtggagtcccgaggggagaggaagggagatttggactttaaaagaacctagaagaggatggaattgttaaaacaactggaatatttgctcatttaacaagcctttgttgaatattttctccgtggaaggcattgtgattcttttcttgattcagtggatattacttggctcctagtttgtaccagacactgtacttaggcattttgagatatccaaaaatgttcgtcctctgagaggttatactgtagttggggaacttacatagctagggcagggagtgtttgcgccgccagccatcggcagctgggactcgatgttgctggaatgtaactgttacagaggtgctaacagtgaaaaaggtacacagctacatcagatgagaaatataagttacagtcatctttgttctgccacagtgccaaatgacaattttgttttgttttaaatcaagagagagaaacaaaaagaaaatctgtggaagtttagtatgacacaaccgacgctaagttcacaacatgctacctgtttggtatcctagtccactagcatcagtgcgtgtgttcatgccgacacttggatggctttatgtcacttagtgcatgcattttttaaattctccttcatcaatggctatgccattgatatttttccctccccccttttgcttccaagttcgcgtctgcaattgtttgaaaattacataaaatcctactatttttaattctctctagggaatgactggagagggatacctctgtccatgcctctatctttctctcccaatatctttttggctttcttttttcttgtccccaccactttaccaatttaaaaattcctgggaaaaagtgaacaggagtcaccggatattggcttaagaagaatcttagcacgcaaccatgtttcaggaccacggacagtgacaccgcgtgctcttaccacctagcgtttttcttagactgcctatagaaacaggagaaacacgctaaaggcacacgatgtgcttcatgaagtgccgagcgccaaatgatttgtgccaaaaggtataaagagtggagaatgaaaagtgcatactatggactggagtaggtaggaaggaggtaggccttcagctgaattttgaagcatgaataagatttagagaggcatcacaagtccctgatgtggtaagatgtggtaagcaccagcgaggtgcttaaataaaaagggatactgcatacagtgtcattccagaggcagaagacacctatgaatttgaatggtccaagaatctggaaagagtaaagttgtcctagtcaaatgaggtagagcatgcacgtaagaattgactttttaaaaaaatgattattgtgatctttttcatactctggtcaggcctgagggaataaactaaaaactacaggccaaagagtgaccagacaaatttatctctttaagttccaaggattcatgtatagttttttgtattgttgtaattaggcttacatttataatttttgttttaatt

SEQ ID NO: 2825 - DNA, 4001 bp, Homo sapiens
tcaatactgacacatttctaacaaacaatgatggatgtggaatgaaggtctcgtattagcacaacagcttcaaaatgcaaatgatgacaaaatatttaaaaaattagatatccaaacaataaagtcacttggataaataaaaaaagtttactatcacaggcattagcataatcaaacatgttgtcaccaccattagatcattattcactcaactctatccaagatatagaaaagacatggcccgtgcctttgaatagcatacaaaaaaaaaaagcaccatggaatactgagaaacatctataaaagtgccaagtaaatttctggaagtgaacatatgaaattcatgtacacactatgcttactccaaatggaaagattcacaaatatactgatattggtataaatatacttacgttactatggaaaagacagatattgagaataattttaaaagcaaaataggtgtgtctggagtacagtatagacagtgtatttccaatctgaacagtgtctcattcacactaaatctaagatagaagacaaaaaattatttaaaattagaagacactgaaataaaaagtatatgttatcattttcatgtaaataaggcttgtaagtggggtgtgtgtgtgtgtatgtgtgtgtgtgtttgtgtgtatttaaactatgaactcttaacatataaaagaggtaatacaaattgctaagaaaaacacaagggcacgtttttttggaccaataaggtatttcaacaaagtgacaggagacaaaaccaaatataaaaatcaaaaagaataatttctacatcagcaataacctattaggaaatattaaagaataaaatccctttcccaacggtaataaaaactcatacaagatagcaataacacaaaatgagaaatatttccttctataaagaaggctatttatgttactgaaggacacaaaaaagacttgaataaagagacctgccaatggaaagattatgaattgagagttgtcacttctccctcaaaattatcttaaattaaatataatactaactaaaatacagtgttgttttcaaattgataacctgattatcatattcttctgaaaataaagatgtaaaaatagagatgaaactttggggaaagaaaccatcacctactagaaatcataatagtagttttaatagtatatcattaattcaggaataacaacaaattacttatacccagagaatataattcagtccttaaattaaaataactaagtcatgcaaaaaaacttggaaaacatgaacacactcatcacagcaaaggcaagacattaggccattagacagaaagcaaatgaaaagataacctctagaaatctgggaaacaaatttatctaaaaaagaggtattcttcttacctattcattggtaaacttttacaagtttaaaattatcacgtattggcaaaagggtaaagaaatatgcactttcatattgttggtggaaggtactaacaattggaagagcaatttggcactattacaatttaaaattcacagaccttatgactcaacaactgcatttatgagtttacctttaaaaaatacattagtacatgtagacaataaacctgtataaggatgttcatcttagcattgtttgaaatagcataatagcacaaacaaactgaatgtacatggaaataaggattaaataaaccatggtacaaccacactatcaagtaataggcaagagttaaaaaaaacaatggtgtatatgtttttgagccagtgtggagatatctttaaactatatgtaaaatgaaaataaagtatagaacatcatgttaccatttaagaaaaaaatatatatgtatatacacagctacacaaaccttcacctctatttctttgaagcagtctcctggggcccccaaaatcaatcttctgcccatgccacagcccatattgaaggcagatcaacccagacattttatctctgtagacagccaaaaattgaatacttaaattccaaaaaaatgcaatgttacacaaaaactaatgtagaggaagaatttttattatggcaggaaacgcttagatatatttagttaaaaataatatacaaatttatatatacctatgatctcagctgtacttgaaaacaccctcactatataactcagatatactcacggggggaaagaaattcaccaaatgttcactgaatagttggactgcagtgatttttattttccagactctttttcttgttattttctagatgttctacaatgggcatttattactgtaagtgcaaaagacaaaacatgttctttttgaaacaatgtatcttctgttattggattcttgagatacctctgtatagataatgccaaaatatttctctactcccagcctctccccttcactctagtctcacttttcagctacctaccgagtagttatcagtgtcccagctttagttctcctgaatgtgatttctccacctctcccactgctgtgctcattgatctcatctccctggcaggccagccctgtcccagttcccagaccaagacaggactgaatctgaaagtactaatacaaggtcaccccctcctccatactcttattcccatccattgctgaagcaaagttgctgattctgtgtcagcctggatttttgccccacgccactgtggcatcagtaccacactgcaggacacactcgatcattctgtctggtattaaactgttcaggtattcatcttatagcccctactagattgtcaacttatgagacaaggcactgtgtcttactcacgtatggctccaggaccgtgcccctcaaaacagtggtttcgataacttgtaggaaagcatttgtaaatggctgttacatatgaccagaaatctgaggatctgtttgaagatggagcgagttcagagacttagttgaatcaacaagcatttatgaaggaattactgtgggcccagcaatgacacaggagaatactagaaaaatggaaggtgcggctcctatccttaagacagaatctagagtggttgagaacaccttaggaaaaaaagtagaaaataattactgttttggcttctgccttaacaagcaaaacatgaaaatcttcttgcctgaggtcctgatttcacagatgggcaaactgcaatcgaatttgcctgcctggattccagactactgccagcactgacttttgcttcctgtcccaactccatgggccccaatgtgcttggctttgcttgtcactatttgtatgcttgcccactttaaattgttcccttgggtccagattccctgcccctccagttcatgctgtgggctagaatctaaattttctccttcttgtgccacgttgccctctgtcacctgtttctgcatacactctcccacaataaaaagttgtgaccacaatctcagctttttgcttcaacctcttgccaaaacctgagaacaaggcaggcctctatatcaaattgtaacaaacactgctgcttacttacccaacaatcatttacctcttcctcattaaaagaattgctactctgttcatcagtcccctaacctcctccacccagtgaaggctaatcccatacatagtcccagccagtaaatcctgatttagtctaagcgcctatcattcatggtattcccattccccttgccattgactagactgggaatgtccatgtgattcagtgctggccagtgacataagagagaagtctgcaggagggcttttggcaaaaacctcctcattctgcaggaagagacgctgctgctgcatgacggtgtgctaggaactaaagaagtgatcatagcaccggctgaggaagcagtcaacatgcagactgagcacagacaagagaaatgtagaaagcagaaattaagcccatgtctcccatcctctgcatttcttgtcattttagaaatcttttccaatgtattccccttcctctgctgccaggtaacatatattaaatag

SEQ ID NO: 2826 - DNA, 4001 bp, Homo sapiens
ttcagtcaacctggtccccacagaagttatactcagccaacacatattgccagaaactaaataaagtgattgttgttttaaccaccatgttttggagtgtttgttgctgcctttttcattttgattttgctttttatgcagcctctaaagtaggaacagatatctaaagagggagcagtcaaaagtctgagatactgggcacaatgcaatttgtgcttatgattattttccctccttttcttcaatctatagggtgtgatttttgccctggcatagtagaaattgatataggtagttattgcaatagcattttaactattttctgtttttataattcaactcatttttcctttgttttactatgttgaatgtttctgctcaggggttaagtcacttgcccagatcacacagcttctaaatggcagaacagttttcaggctaatacgaagtcagaaatttgaaaatgcttttcacaatgttattagatgtctcaaattcttctgctaaaatgcaaatatagatttgcctctgaaggacatgacctccagccatcaccttgttccatgtttgaggaaggaatataaggtctatccgcaaaggaataatcttacattgatgtgatatgccaatggcaaaccctcttcagaaatgatacactcaacaccagctagacattgacatagaaccatgaggcagacagcatcatccttacacgtttcctttgcagcttcactcatggtcaggcatcctcccccattgttggtgatcttgaccatccaatgtcctctccaaatctatcaggatcaaccatattttatctcttccacagccacatgaagttcataataatgacagtcccatggccatccctatatgttaaaggctgcttgctatggactaggggagtgtttcctaattttactaaactgtccttcctattgaggcgatctctacttcttccgccccatcctattctttcttgttgagaatcatcacttagaggctctgcaaactggtattccttaagctgaatacagttcacaatatcatttgctcactaacaaaattcagttgtaataaattagaatttgaatgcttttaatcaaaatctgcactttgtaggtaacacaaggtcctgttattcctcatctaactgctaccccagatattaccttactggactgtgaaaacttttgattgtgcatcagctggtattctaatctttctttctggaatttgcatctactgccaccactatagccaccaagcacattccagggactccctgatctatatgtgcagctctaatgtctgttcagatcttcaactgctcactcctggctccaagtgtgagcttagctggcttttacatcctactcttccttgcctcccttctcccctagagcaatccatctattgaaatcacctttcttggaaagagtaccacttaaaagtttgtcaatccactgcagagctattattgcacctgctgccctgcccatttgtaatgtgaacatagcccacatagtatctcatttgggaagatatggtagtctgccaactgctctcattgctttcagtatcctttctcctccattcatgttcaagggagtcatcagaattatattccttgtactcacattttggaaatcatatttctagttgaaagtctttccaatctggcactaaattcacactcctttcttacccccttctcctgcatacctgtgctccagacatggtatgcatctcagaagtcttcatatttttttcacagactttgcctactgactggagtggccttctccatccatccatctggtcaattcgtcttccttcctctacctggtcttgctcaattagctagaaaaatctcttcaaccacagctcttgtttacatctctgccatagcatgaataatattggtttgttactcatcatctccactccagaactgtgaacacacagggtaggcaccacattttatctaactctgcttctcatcgggtaaaattccatctgacttacaacaaatgaacaaaaacaagaatagcagcaaacacgtatgttaaataattagaaaggcattttcaagattcttgtcagagattgaggagtgagacagcttgaatgaagagataaatgcatctaactaggcaggttagtttaccactgaagacctgttgcttatggatggtgagggatttcctacaactaatagatctgcaacaggaggccacacataaaggcattaatctgtgtgacttcaactcaagagttttggctttgctgggctaatggcttgtgtctatatgtcaatgtaatatagaggtttttatatttaatttagattccacaggctattgattaggcaagcattcaaactagttaataaactcaattcaatgagagtgtttacaaacccagaactacgcagactgcactaagagaagagaaaacatatttactagtgctatgtggcaattctcatgtctctatatctggtctctcacatctgatcttcttctccctttaaaggtagatattagaaggtctaaaacacagagaaagtaatatgtctgttcttagagagtttcattttatctgtgaggacaaaatttccaacatctgtaaaattctataaaacaagataattaagtgtcaaggaatatcagagacagagcagacagaacttactatagaattaaattggttctgttaaatatattgaaccccaagtttctcttcacaaaatcagtacgtcagtaggttcagctctcttattctttgattctccattttaaagtttaacttcctggttctctttgcccacttgcttctagtttcagtaaacaactttcccactagtcctaatcagtagttcacatctgttcccctggtcatctgctctgtcctgactcattctggtcacctgctttgacctgagtcacccttggtcacctgctctgacctaagtcacttttagttacctgtttctaaccgttgtccccaccaactactcaccccgctactctggctcatacccccgccctctttaaatagcccatcagaattagcttagactgtgcggtccaaccctagccaataggggaaccacacagcagtaggggctacctgcgtaaggagtaagaactcctgcccctcctctgtccaggtgtgctctggccattgttccatctgcgatgagcaccctttctgaagaaagtaaaaactgccttgctgagagaatcaaatttatgttcgaatgctatttctttgtggcaatgaggaacaagcatttctaacagttcctttatttatggctaggatgagaaggtgaaatttgctaatagcaagtagaagaactgtagttgtctaggtatcccccataattgataaaattatgacataaaacaggttcctgcaccagcattcttctataatgcttgaaatctgaaccttggaatgtcttggtaaagtgatagccagtttaaagtcaaatgcaatataaactgcaattaaataagttttcaaaactgttctggtttagtgttaatagaaatcccaaataaatggctgaaaccatgaaaaacaagatttcttacaactgagattgtgagactgagatttcttatgagagtgaaacaggaacaacagaacaaagccttgtgcatttcacaaatgcatttaaatacttttaccctcgtagagcattttaagtaatgctggattaatccattttcagatattaatggctttgtgaaaataatttggctggccagctacttaataagatgcaggaattaagtccacgtaaactcccagaaggaatcttgaaggccccaagccagccctctttctgaagtgggaattgccttcataggatggaatgaggaaatgggtgtgaagaggaagaatgattccaaggcataataaacaaaggcagacagaaatacaggtcggggccccagccagatgaaggagaggggccccaaaacatg

SEQ ID NO: 2827 - DNA, 4001 bp, Homo sapiens
gataataatgcaaaaagcaatatatagaaaatatatatttatatataatatatatatataatttatttattttaattacagcctaggagcatcttgtaagttttgagtagcacacttagaagaaaactcacatataaatcagtgaatttaattttattccctttctttcttgccaacactcaactcttctgcctctctgcaccagctctacaaatcaagtgacatccaaagtgggacctcttcttgcccatttggcagcctctgtcaccactttgccaagcagccagcattaggaggatttttttttttcctagcaaccctagggattgggtggtgtgtactcacagtactcgctgaatggctggccgctgtttaaccctgcgggtgcctcctcaacacccctcccccacctcccaaccctttagagtttatggctccatcagctggcctgctgtcacgaataattgtcttggcaagaggtgaaaccacttgatggtgaatttgtttgtctgtctgttaaagtgttccgcagcaccttggaggtgccaggatgaaacatgcaaatgcctgatccagagttaggtaggcagcaagagtgacagagaggcaatcatcaagaatggcaaattaagaaagaaagaaagagagagagagaaagaaagaaagaaagaaagaaagaaagaaagaaagaaagaaagaaagaaaagaaaagaaaagaaaagaaaagaaagaaagaaagaaaaaaccatctgtgccagttgcaagctgtatgaccttggataaaccatgatgtctcttggcctcagtttagtcacgtgcaaaattaagggggttgattttctaatgtctcttctaactcctaagacagcatgtgatgtctaggacatttcagatttgtgttccttccaattaaatgatacatctcagagatgaatgaccagggcagagctcagatgaatacaaaatggaatgattcatgcccctgttcatatgacttttcctgaaaagtaccaccagtctttggtgactttgattccattggttggcctcttcagcttagatgctaaggaccaatccagttacttgtccagtctatctaccctggctctggtaatccaccctcattcctatcaaagtaagtgccactacatataatgcctactgattttgacttccttagaggcagaaacgatgggaattcaaacagtggagctggagactcacatttgactctccctaccatctccctgggcatctttgtcaagaaggaaggcttgcccacactcacttcccgcaggctttctcagccatcttggaggactttgtttaaacagatgaccaactgaccctccccagggcagaccctctacagaccagtaggcacaaggtgtgtgtgtggggaggtggggggagagctcattgtaaggactcctatctataaatgattatgaatagaaataatgaggcaaaggcttctcgtcatactcagaggaaaaagtggcacaacttagtgcagtctcaaagattaattaggatgtgtgtatggagacgggtaggcttcattatggcttaaactatcacgtccctacacattcacactctcttggagtggggtgcactgcagggcccagtaatcaccatgaacagcacaagtcagggtaagccctccccatgtcagacagtacaatcgttctttaatccactctgtaccccatatgtatctgtggagcctgatgaagccccggagggatctcagtcaagtctccctgcacacagacatacctttttgccacactggatctcacaccaccgggacttggatggcttcccaaactaggtgggtttggaaagcatttcccctctccacctcaaaaaagggctggctgactgcagaattccagtacccgcaagagggggaaaaaaccccaaaaatcttagccaagccccaaatcattgccttcctgtgtcttctctcaagttgcttttctaaagcaaaggtccaaacgttgatttctctacagattcctacgtatctcttacacgtagacagttttaaaggggaaaagaatatatccccaaaaggcaagggggagagcacagaacatttcagtttcccacttggaaatatcttgtcgtggatgatgctacccctacctccacctccctcccccctcctttttttttttttttttttttttgaaatatggacaaaaaagctgaaagtgttttccgtttcatcaaaaaacatatattactttagtggttcggtaaaatgttggttttatgcccaccccttttcaatctgcccatgtctgaggtgctcggggaagacgcacaatcgtgagcagcttacgacactcagtgagcagtaggtgcctgtgcaagctcgcgccgcacactgcctggtggagggaaggagcccgggcgccgctcgccgctccccgcgccgccgtccgcacctccccaccgcccgccgcccgccgcccgccgcccgcaaagcatgagtgagcccgctctctgcagctgcccggggcgcgaatggcaggctgtttccgcggagtaaaaggtggcgccggtcagtggtcgtttccaatgacggacattaaccagactgtcagatcctggggagtcgcgagccccgagtttggagttttttccccccacaacgtcacagtccgaactgcagagggaaaggaaggcggcaggaaggcgaagctcgggctccggcacgtagttgggaaacttgcgggtcctagaagtcgcctccccgccttgccggccgcccttgcagccccgagccgagcagcaaagtgagacattgtgcgcctgccagatccgccggccgcggaccggggctgcctcggaaacacagaggggtcttctctcgccctgcatataattagcctgcacacaaagggagcagctgaatggaggttgtcactctctggaaaagggtgggtaagacactttttaattaaattctttcccgaagattttttttttcctcccttttctttgctgcagcatctaacatggaccaaatcaccatctctttgatctttccgtggctgtgaactttctatgctgcccagctttctgcatgcttagaggtgaacgtgtggtttttggggaggggggtccttctttatttctatgtatttatttgattttttgcccttttctccccctcccccgcttcccctccctcggaataaaatatgatgtagatttctgaccgagcgcttccaatggacattctccagtctctctggaaagattctcgctaatggatttcctgctgctcggtctctgtctatactggctgctgaggaggccctcgggggtggtcttgtgtctgctgggggcctgctttcagatgctgcccgccgcccccagcgggtgcccgcagctgtgccggtgcgaggggcggctgctgtactgcgaggcgctcaacctcaccgaggcgccccacaacctgtccggcctgctgggcttgtccctgcgctacaacagcctctcggagctgcgcgccggccagttcacggggttaatgcagctcacgtggctctatctggatcacaatcacatctgctccgtgcagggggacgcctttcagaaactgcgccgagttaaggaactcacgctgagttccaaccagatcacccaactgcccaacaccaccttccggcccatgcccaacctgcgcagcgtggacctctcgtacaacaagctgcaggcgctcgcgcccgacctcttccacgggctgcggaagctcaccacgctgcatatgcgggccaacgccatccagtttgtgcccgtgcgcatcttccaggactgccgcagcctcaagtttctcgacatcggatacaatcagctcaagagtctggcgcgcaactctttcgccggcttgtttaagctcaccgagctgcacctcgagcacaacgacttggtcaaggtgaacttcgcccacttcccgcgcctcatctccctgcactcgctct

SEQ ID NO: 2828 - DNA, 4001 bp, Homo sapiens
cttcataaaattctaagtaattctaaactctaaagtggtcagaatttagtaggaaaattaatatcactcacaaatgcataacccagctctgcccaattataagggaaaacatactagtaagcttcgttagtactcgcttgtcaacatttctcacgtttacttagaaaaaagtttgaaacattcaaaaaatctttaattattatcaaaacacttattctcctaaattccatcgtacctatttacacaaagcagaggttttcgcacactgactttagtatttatgttcttacaatttcagaattctgcatgaggtgtatccttttaaattttaggaattcagagaggtcctcatgttctctgaaactaaatcacttgactcaactggggcaatcacatcaaggtaagtctttcctcactgcaactgcgcttcaggaaaagcatgctttaaaaagtgacaacaaatccccctctttcgctggtacatcatatgaagtatttatgaatctaagaagggaagaccaagatctttctctaattttactttttaaaatcttctgtccgattgctagttcgtctgtcttgacgtatgccttttattgtagcgacataggcaagtatgcccagttcgttaacagtacattttaattgcttgccacggggaagctgaaccagatttgacacccaaagttatatcctatatactaaacatcgcaagggtacgactcaacgtaatgccaaaaaagaaaaagtttctgagcagaacacgtttgctgtcactgaaagcgatgaaacaaagctactccgcaaggcgactacactcattctttgggctcccaaggctgagaaatggagaaccaattggccggtttgctctctgttgcttcccccccacccggccttcctccgagtggcgaggcaatcctgcacaagagtttgtaaagtgcttaggaagcttgtaggatgaaagacgctataaatacacccaatgttactagtttatgaccacggagcattccgtggaaccactgtcactgcgtcgggggcaggttgatggcatagaccttcctggggaggggggcagagagagagggcagccccttcatcaccctaaaagctaggctgggtaaattttcaaagtgtagcgaaaccccacgtgaaaagttccacacacgccccacacagggaggactccgcggctgctagcagcgccggagactgggcctacaaccccggcaacgtggggaggcgtggggcggccgaggggccccggccgcagccgacgcccgcggagcggctgaaggagcagctcccggacgggggcgcggcgccaggcccgggctcccggcgcggggaacggcccgggagggcggccgcgccggggccccgcgccgcccggttgccgggaaggctcgcgccccgcggccggcgggcgtgggggaggggaggccgggcctgcggcctgttgggggacttcagcccgggcctcgcgtgcggctctcggcccggcccccggccccggggtcccggacgccgaggagagactcaccggaaaggcccggatccgcatcttggtgtccttccggctgcccgtgcctttgctcagattcgacatggtgctcgtcccctccccggcggcggcttcaggtcgcgctccgcgacgccggtgtcacatttaaggcgggcaggcaggctaggggcgacgctgggggcggcggcggcgcgacccccgggcagggctggggagctggccggcccctgggcagccgcggcggcggcgggggcggcggcggcggcggcggcggctcggactctggcgactccgatgcggctggggggctgcgctggcgcggcggctccgcggggtccccctcacgtccggctcggctccctttatcgcgctcctccgcgatggcggcggcggcggcgacggacaaacatctcactgcgcaggccgaacgtcgtcctcctcctcctccttctcctcctccgcctgagcgagacgagatccggcccagagggtggaggggggaggagggagggaggagagccggagagtgagagatgccgggggagggaggtgggaggacgggagggggagcccggcggccgccgcgggggacgctcagatctcgcgagaagagggcgagcgcgctgcccccctggtgggcggggcgaagcccgggagagggtgggcgccaccggaggggaggaggggaacagggaactgaaggaagtgggaggggccggcggggcggggaagcggaaagggggcgtggctgagggcgggaggattaagctgcctttttgaaagtggagcgccaggtcccgggttctgggtggaggtggttgctgattggtggagctcggagcggcggttgggagggtcctggtcacatggtggggagtgggaggggggaagttcggagagcgggagcgggatggtagtgggctgggccccactgggctgggacagcaggaggatagtcttgaggaggagcgtggggtgctagatgtgtaactacgtcccgaactggttcctgtgtttttctagggcatgtggactagggatgggtacttgagtagaagcctgcaacttgaagagtttgtgcaggagttagctgcagtgtcggaaattagtgtcctgtatgctcaacaaggtattcggactgggtgtgcacaccacagctctcaggactggaaggtggaaatttaatctacgaagttcccttaaactgcataagcttcgggacctcttgattcactgatattttctggtggacccagggcttattcatgttaaaacctgtttttcattaccatcagaataaactgacagctccattaatgaaatgcagcatttggtaaataatgttaagtggaatgatagaaacctatctttaacctaccggataaatcatttctaccattaccaagagtattgtagatttttaaagccaaaattaccgtctgattcagttgctgtatatttgaaaaggttttggcttttggttttggaggagaggcgtttggtcgctttatagtcaaaatgtctaatttgacttatcggttttgctgtccatttgttatgaattgtacttcctcatttacctacttgcccaattgctgttatgtttgggtttctgactctgcaagggaatacgtgagttcttattaaagtttgtgttcttcctattttaaagaagcatatgtttgggggatggatatctacatttagaagctggaattttaatacttttaaatagcaaacaatataaagtgaaatacacttatttgttgactgtaaggttgaatttgccctaaattaacttaatcctgatgactaagcttatgagtgttgtgcttaaagccccttcttgcttaaaacgccccactgcaaataccatattttcttgttttttttttttttttgtgggagttttttggtattggctaattaaagcaggagcttaagaaacaagaatgttgcttaagacaatatctgtaaatactgaagctaaaaataggttatcaagaactgagttgataaactaagattgggagaggctctgacttcaatgtaagataatgtcagccttgaataggagtttataatctctatgctaattgaacctccatttccataacataatataataacaaacaatgtttttctcttggttgtactctcatatggcccagtttctttgtaatgtaagaatatatgttcagaatagggatctctgaggaaccaaaaaaagaaataaaaaaatattttaaaaaagaatatgtgttcttggagccattgtttgaatctcaattctgccactttactagctgtgttttgcatcttttggggcatggagttgacaatccccagaatttctcatctgtaaaagggagacaataacaatacttcctccttgggctaccgtgaaatttaaatagatgaatacgttttaaagagccctgagaactgggcatggagcagcaacttaccacct

SEQ ID NO: 2829 - DNA, 4001 bp, Homo sapiens
aatcacaatcaaaataaacataggcacaccatgaccctgttcaaaacctttctatggtagcatagtaggcacagacctagtttatgctcacttatccacacctgtctgacatgtatttcccaacaacattaaaccaatgggaattcttaaatatacaacttgctgtttctcactctatttccatcactgtcacagcccctccccacttatttcagttcccatgtcttttttcccccctgcttttggtcctcctttgctttgccttttctttatctgattctttacacatatcttctgaacacagctaggtgtcataacctctaggaatccttcactgaactcctcaagcaaagttaacaactccttctcagttcttccgtgatattttatagtgtaaactgtatttacttaactatacactaaataaactgtagtgtattttcgtttatatgggaatgtggtgatagtctataactactagtgacagtttgtaaccatcactacactcccatgtagctgaattatctgttcatgcatcttcctccactagactatgagcttaagagattatgcatttttcttcaatgccacacagaaggttgtaaacaaatgtctgttgaatgaatactactttatccatgttataccaatgtaattttgacaacacaaactttttacttataaggcacaatgatacaggaaaacggttgaatgtgtttaccctcagcaattaatctaatttttaaataatcaaatctttttctaacagaagtagtgtacaagtaacacacttttaaattttacatcaagcaatattttcagatttttcccattcacctaaaggcctcacccagaaggctgcttaatcattaattttactaataaatattaactgggaaaaaaagggtagacgaaataggcccttcagaagcagatcaataagctacaatctttccctaaatcaaataagtccaaaaactacatatcaaatgaaatgggcttcaagtgcagattaatacatacacatgatcgggtcttggcatcaaatgcacgtcaacatccttggcaaaataattatgttactaatgagctttaatctttccacttgcccatccctgacacagaagcaacattaactgctactgaaaaattttttaaatgcctaaatgttcaactctcacctcatcaatatgttaacaataaaaactttaagctatacttcattccaggagcaataaaatttaaaggctctaactttatgtattaatatattttttaaaagagaagtaacattcttttaaagtaacattctaaattacttgagcagggctttaatcccattgataaactgattaagttgcaataactgcaaatacactaagggatctagcaactaatgcgtcagcaaaacaataaaataaactgcacacacatttatcatctatatacacaaacatgtaatatttgctatctaattatcagatgtatacaggacccttccccaagaaggccaagttacaaaatgatcagcaagcaaattaaattcattcagcagaaaaagaaacaaaagcttttttaaaggaaaaatataattaaggattcttaaatgtttatagtttagtaagactttcaaaaaccaagtcaagaatttaatttttgaaagtgatctttgcctccttacctccctccaatccaggattacaattttcccatcagaaaagtatcaataacaaaaataaatctataatggtctttgttttctttaaagcaaaatcttttcatttacattacttcagatgatataaaaaatataaccttcaaaatgcctgaatttgaaaggatgtcagtctattatatacttacacatcttgaaggttctgtgattactgagagaactacatcatgagacaaattaaaactaaatgaaaagaagtgaattcttaacatctactacatacaaaggacaagaagtctttagtcctctgtgaataattttctacaagaaaaaatttagaacagggtgggtgggggaaagggtgagaatttgaaattccaggcaattcagaatgacacagctagaaaaaaaataaacaagggaaaatacttgatcttaatttcaagctccagtctcaaaaaaaaaaaaaaaaaaaaaagctttggtacaagcatctgaggaatggcagtattttttaaatctgatacaactaaactattaattacataaggaagctccctcccaaactgtaagcacctcacagtagataaggtctttatgttattgtaccccttacaatgcgtggcacaatgtatagataatattaaaaaaaaatgatctgaatacagtccatttgcagttaatgataaggagtcttatttgatgaccaaacagtatacaactacttatgacatctgcaataataccatttatccatcaattattccttaagcaacatcaaccatcaaaaatgtagccaaagatccaagctttgagaaaaacagcccagtgggacacattcaaacagactttgaacaaattaacctttcaaagctcactttcctcatttgcttgtggccagagaaacgtgagacggtggactgtggggtaattaagaaagtctgtgaaagcatctggcacacagcacttgctcaataaatatgtttgtttcttccttgcctatgtagaagagacatatagccttgattagtgacttaaaactgaatgtaaaaactactgatgtttggttaactggtttctctggttacagtggagaacagatgggagtgggggagtgctgccaaaaaaagagctgatgccaaggaaaaagaaaaaaaaagattatcaattagaaaagcacagcagcatgggacaattccatgaaatcacaacctgatcgacattcaattgggctctagtatcattacattacagaacagtaacattcataatgagaaagttaaatcatcaatagaaggttcaattatgatttgcatttcagtcctcaatatgagtaggctatccaaaactcaatttgagaatgtgggaaatgtgaaacaattttttcaaagacacaaggtcaagcttccagattagcctatttaagtccatttaagtcacagagcaattgagctaaaagtactaacaactctttcgactatatctctgtgaatgacttttgcatatatagaaaaaaaggtatgtataacatttcaaaatgtgataatgaccacaacaaataagatacaataatgtaagtactctcactgaggtaaaaagcttgtcactgtcctactattggtgctatttccacccataaaaatagagatgttacaggactcccttaaacacattttatccaaaaaacacagtagtcatcataactagaattcaaacattgtacttacagaccctctatattaagaaaattagtgattatatctaaaatcaacacttcaaaataaaatttgttgtatttcccaatatactatgaaatccaaaacactactatttatactatttaacactactatttatttatacatgggtcacatgtatataaaattactttttacacattcatctatgataatgtataaaaactctataaactgtaagacaatgacaaattgattgtacctaaatcaattacacataacccaaagggaaaggaaaaaaacatacaaaataccgaactgccatagtttgctctgtctttgaatgattctaactgtaatcaaataagatatgacagcaaaaggtctatgacacaaaattgttacaaaaatctgctataagtctgtttaaaactttcctacaactgtcaactcaccaaaaaaaatgtacacaagaacacagctaactttcccactgcttcacattagaacttaaccatcatcactgaaccataccattcataaagaaaaatctaagactaaaaagtaagtaatttttgcaacatcacacaaaatatttcaaacaaaggccacaggaaaagacactagta

SEQ ID NO: 2830 - DNA, 4001 bp, Homo sapiens
tgggcctccatttccacgtttccgattcaacagaactgggtgaagcccagtaatttacattgctaacaagcttcaaggagatgatgctgctgattcagaagacatttttggaaccaatacaccagtgtattagatcaaagttcttggcctttaacttataaccaagacagtctcagagccccagtcaactgagttgggaaagactccattaaagtggcatggacacttaaaactaggacactagccgggagcggtggctcacgcctgtaatcccagcactttgggaggccgaggcgggtggatcacaaggtcaggagacagacaccatcctggctaacacagtgaaaccccgtctctactaaaaatacaaaaaattagccaggcgtggtggcgggcaccttagtcccagctacttgggaggctgaggcaggagaatggcatgaactagggaggcggagcttgcagtgagccgagatagcgccacagcactccagcctgggcgacagagtaagactccgtctcaaacaaaacaaaacaaaacaaaaaacaaaaaacaactggaaggacacttacaggtggaaaggcaacattcagaaccagagaacaagaattgaggaacagagagaactcatcaactgtatcatagtagtaatttacaataatacaacgctaacgctgtgctcagtgcctcatctgcattatttttctttatactcaaaaaaagacaatacagtgaggcaggtattgtattactacctacatgtttccagatgatgaagctgacactagagactttaggtaacttgctccaagtgacagacctaataatagctggataaaacagaaatctttggtctactagtccatcacccaggaccaacacaagtggctttcctccacctactgataacgcctgtaacaatgcttctcctctcctggtcaaaaccacacttttaatgtcaattttaaatctgcccttccatagtaggatgataatttatgttaactcctgaattcacaagcaatcctaaaacaaggtaagtctaaatacagataagaggtaggttaactgatctgctgagaaccaagtttgcttgcttatctgctatttcgagtctctgcacatctaaaaatgcaaaggaaactcttacctaattcttgcatctagaatagcctttctccaaatcctgccttctccacttacctcagaagaattgttaggattaaatggaaataggtaccgtggtttttgcagttaaactcagtgaaattaactattatatttccgttatataatgctgtgttgtaggacccagagctcgttagagaggtggagcctggagacccaagtttggcagttattacctcactggagatagttcaagttatggaaggatcaagaatgacagatgaagcgggcacatgagaagcgaagtgtcttcaagactaaacactagacactatcagtatttacagggcaaataaatgaaaaagaagacgctaatgaaatttaaaacaaatagtcaaagggatataatgccggcaagaggcataagagtgcaagtaattcaactaacttttaatcaactagatctcattaatcccactcccctgaccctgggacccgggcactaggaaaggggctttggcaagccccaatggactccagaggctctaagtataaaacgcagtgcacaagaaacaacacagcaccagcgttggtgcaggatttcagacagctccaggaacttcacaaggaaggtcagccggtccgctcaggcagtcagttcatggcagcccattccctccccacctgcttggacctagccgctctcacacccctcttgcgggcccgagcgtagcgagaagacccacgcacactccaatgccgctcacagccgtatcagtgagcccgcacccactcctgggggtcttttacttcccacccgatccggcgacccgccacccccactccgcgtctctgcctgcggggactccacggagttcgataattacctagagctccaccgcgccgccattacaccggacgtacgtcacttcctcttcccgagcaccgacggtaggaagaaggcgaatagtgaaatatttaaaaacttgacgctcaattggcttgacacgttatccctttaatttatttcaaataccatatcataataccagagtcaaagtagtcgatccaggcacactgtcttgttgccaaaatggcgacaaaaaagagaagttggcatgaactacaaagtccgaaatccagcgcctgtgctgacggaaatgaggaaagcataattgtagtttagcgtgaaatggcgcggtgtacgatgggaattgtagttcatacagatgcgcgccagcgagttaacatccacgctgctcactggcagcctagtagtgttcagggtctagccgaatttactttaaaactatttcactgcattttggggaaattttttttaaaaaagcagtcagttgtcactttccttgaaaaatcttaagagagagattttcctgagactttataagagtttgaccaacagttaagtgcctaataaattccaagatatccaggccataagaatgggagaatattaaatcataaatagagtgaaataatgaggaaaaactaattctatagagactgtgttgcctctcttttaggttaaggtaccaactggtatgacctgagaataaagagattgcctggctgagtaggaagtagcagtttgtacagcgtgcagaactagggcatcaaacagtttctttaaacttcacttttcactagtaacaaaacctaaaagttcaactacttgctattttggaaactctcttcctaaaccaagaatatctttatgttatcaaatctttcataaaccaggactggtttctccacacacttctctattacagttttagggtgctgtgcttccactcctttctggaggcagagtgtgatgattaagaataaaaacactgcagttggactacttattttgaatcttgagtccttttattatttatggatgactggggcaagtaacttcacattctgtggccgtttcctgatctgttaaatggaaataccaatagtatccatccaggcagtagttttaagaattgaattagttgatacacaagatgcatttaagataattgctagtatacaatagtgttatctattttatttcatatttaagatatttggccattgttgatggtgcattttggtgcaccaatacagggcacaggagatggatctggagatgaacatttgtattcatatatttaaaaacccacaatactaccggtgatggttaattctgaatgtcaacttgattggattgaaggatgcaaagtattgatcctgggtgtatctgtgagggtgttgccaaaggagattaacagttgagtcagtggactggggaagacagactcacccttaatctggtgggaacaatctaatcagctaccatcgaatataaagcaggcagaaaaatatgaaaaggcaagactggcctagcctcccagcctatatctttctcccatgctggatgcttcctgccctcaaacattggactccaaattcttcagttgtgagactcagactggctctccttgctcctcaagcttgcagacagcctattgtgggaccttgtgattgtgtaagttaatacttaataaactcccctttttatatatatatccttatatatagatatatatattaggatatatatataaggatatatataaaaaataggatatatatgtaataggatatatatacgtgtgtgtgtgcgtgtgtgtgtatctatctatctatctatctatctatctatctatctatctatatcctattagttctgtccctctagggaaccctgatgaatatactacctctacaactatcaacagaaataggaaagttagggttgagcagaggagaactagatggagctggaaaagaattggatttgtcagttgggtcc

SEQ ID NO: 2831 - DNA, 4001 bp, Homo sapiens
acggagcggccgaccctgctgtataagatgaccagcatcaccagggagtttcccagcaggctcagcaggaacactagggcataggcgatgatcacaacatacttgttgagtgtctcagtttctagcatacaggggctgtaatcttcatctgcaggtggcatgccagtgaaatttagatcatcaaaatcccacatctgtggatctgtaatatttgacatgtcctcttcagtttcagcaatggtttgatctaactggaaggttagaaggaaggaaatgtgatttagtagctcggattcaaggcattctcatcaatgatgtgagagcagttactgggatatccttggcttccctgttggtttggcaatgagagctctccttcctcctttgactccaacctggtcttcttcggaggttggcttcccagtgttctccaccttccacaactctaaggcctggcctgagtgtggggtaagatggaatatggggaaaacaccttagccctagctcaacctacaactgcctcctctcagcctatgtctctacctctgtccctctttagccttctccatcctcagctgtgtctgtgcatttggatgtggggaccaggttggtcttagacattcagggaagggccagcattaagcaaaatgcaagaaggcaaacctgttcccaggtgtccccttctactatttctattcctatgttctccctgattcttgtttaccctccttaaaatctactgggggaaggaagtgataacaacacattgcattaaactgtatattttaagccttctttaaatgaggagcacatattttgttcctctgtctaaaggagttttaagtatttgagaagataaagtctccatcttggtccctgaaaccctccacccctgaaaaaatccacagaatcattcaagagttttcaaatatatttcctattgtgaaatagtttactgaaataagatcttcccagaagcccagtatgtgaagcagataaaagctgagccactgtggggcagagtgtgctaatctccgaacccagatggcccctaaagagcccctcaaagctccaggactctccagagaagtctgaaagcctttggaaagtcaccgaggttggttgtaaagacacctagcatccagtcttcattccatcctgattctaccattaataagtttcgtgtgtaatcccagccctttgggaggccaaggcaggcagatcatgaagtcaggagttcgagaccagcctgaccaaaatgatgaaaccccgtctctactaaaaatacaaaaaaattagctgggtgtggtggcgtgcacctgtaatcccaactactcaggaggctgaggcaggagaatcacttgaacccgggaaatggaggttgcagtgagccgagatcgtgccacagtactacagcctaggcgacagagtgagactccatctcaaaataaataaataaataaataaataagtctcatgaccttgagtggggtctcgtacccctatagatttcagtcttctcatctgcaaatcgaggaagacagaatcatccacctctcatttgctgccaggcctgagggtgtatgatgagtccactcagatccacacattttagtgtgttccctccctaccagtatttgcattttcactgaagacaaagtcttaaggtgaagcaataaacatcaaattggggaatggtcagcctcttcccacaaaagggcaaggtataaaaagaggggatgaggaggctgtcctcttcacctgctaactccatgtatgagtggtggtcacaagagaggaagcgggcagcagaaatcctcagctcccacagaaatgaatacattttccaaaataaagtcaagccaagcagccctaccccacagaaagtcctagcaaacagaggtggcttcctacctgaagcaccggccaggtgtgtccaacagtaggagctgcagtcagagatcagagtgacttaacagctagagggcacttgatgaataaacggaaataaggaaaccacatcagatgacacctcccttctgagccccacccatgtctacatttggggaagaacagtttaagtcaagggatcacagacttgtgattagagactgccagggtccatatgaccaagtgggggtcccaggtgtgaagctggggttgagggtccattatctgaattctccactctatggatgatcatttttattattttccttttcttgaatttatttccatttgtttattcctaaattccctagtatatcacctgtggaagcttgcaacttcctgaccaagtataaagggcgaaggatttgacttacagcagagacttcagaaggagtcccccataggagggacttgggggcaatccagtgggaaagaggaggaggactgcgcttgagttgtgtttgaacagcaggcactcaatctctacttattttgcaggcttctttgaggtggcctagctcggattcaaggcattctcatcaaggatgtgagagcagttactgggatatccttggcttccctgttggtttgccaacgagagctccccttcctcctttgcctccaacctggtcttctttggaggttggcttcccagtgttctccaccttccacaactccaaggcctggcctcaatctctacttatttttcaggctttttgagggtatttgaatggaacacaaaccctcctttgccgccagccactctttcgcacaatcactgccaatgaccagttggtttaaatggccctgaggctgacggcataggccactcccagagtctggctggttagcagagagaccacagagctggggcagtccatgaatggaagagctgtggtcaaggtcactgcagcccccatctcagtaacggagaatggcttctctgggaacccaccttagctgcctccagcagctaatggctgtcccctagcttgagtcttctggcaccttcgtcacttctccatataacatgaaccctgctgtgaggcatttacaagtcagccctcttctagcttgggagccatgagacagcaagaaccttcttcaattcatgtttatgttctctttcagggaatatagtaggtgctcaatcaatggttgtggaataaatgaagggagacatttctcctgtgattcatggaccataagtcaccaccacgattcagtgtctattgcttttggctacacactaaagtcactggtatgcctgatagcttcacttccacacagcccagttggtctgcctggcattgcttctttccaaccttcctctaatgtttggagctaatgccagtctgtgcaagtataaatcctgccctaccacaaatgccaaatttaccatgccatggattcctacagttctgcactggaaagaatttttttctttttttaagagacaggctctcactgtgttgccaaggctagaatgcagtggtgtgatcatagctcagtgtaacctcaaatgcctgggctcaagcaatcctcccacctcaacctcctgaatagctgggactacaggcaagagccactacatctggctttctttttttatattatatttttatttttattttttatttagttatttatttatttgtagagaaagggtcctgatatactgcccaggcttatcttgaactcctagcctctagtgatcctcctgcctttgcctcccaaagcactgggattacaggcataagccaccatgcccagccggcaagcctattttttaagctaagttgtgctttcctcctgggctcttttatcattcatagatggtaacaggaagtgtaaggggacaatagccactcatgctttgcttttactgatgttggactattgtgctctaacgcctagactagaaaggagtcaaagatggggtagtcccaggaggtgggagactccctctattaatcatctagggaaaatcagccccaagggcagaaaatagtcactggggacacaggagaaaaaagacgggggcctagact

SEQ ID NO: 2832 - DNA, 4001 bp, Homo sapiens
gccaggcgtggcagcgcacgcctgtaatcccagctactccagaggctgaggcataagaattgcttgaactcgggaggcagaagttgcagtgagccgagattgtgccattgcattccagcctgggcgacagagcaaaaccctgtctcaaacaaaaacaaaacaaaaacctggcttctaatcctgcttggagaagtcattctttctgggccttgttgtgtgcctttggaaaacgggagcttcttctaattctattctgttcagcatgctagctactagccatgtgtagctatttaaattaaaattaattaaaataaaggccaggcaaggtggcccatgcctgtaatcccagcactttgggaggccgaggtgggcggatcgcttgagcccaggagtttgagatcagcctgggcaacatgacgaaaccctgtctttacaaaaacaaaaacaaaacaaacaaacaaacaaaacccaaaaaattagctgagtgtagcggcacatgcctgtagctgcagctacttgggaggctgaggtgggagaatcacctagacctgtaggttgaggttgcaatgagccaagatcatgccacagcactccagcctgggcattggagtgagagcctgtctcaaaaaagaaaaaataaaataaaataaaatgaaataaaaattgagatccgcagtcacactagtcacatttcaagtgctccgtggccacgtgtgactagtggctaccatactgggcagggcaggtctaggacatttctattattgcagaaaattcttttgtgcaacactgtctaggtgaagacttagttgtctttagctctaagcttctacacttcatcaccccagttctcaggggcctcagaggaggctgaagtttccagatctcttccattagaaatatgttgccagcatctcagactgaacaagtcacctacctgctgttattggagtggccaccgatgtcttcactgtgcctcaaggttgggtggtagtcagagctgttagacaggaaaaaaaagatgaaacaaccttgacgatgaaacttctgacctgggttgcaagggggaaatccaggatgccctcctggggaggtattcccacagaggaacaatgaggtctgtcctgggactttggcccaggacaggtgccacttagtgattctgggatgagtgctggggattttcacatcttcctgtctgatggcttctggaggagcctaccagtctgaaggtggagatttgtctatccaccttctgtctctgaatgttttgaacctgcacttccttttttaacaaggaagatgcaggcatcccagcccccgccaacggacttgtctgaactcgcacgcagtttcttccttctttccggggtcagagtgagaagcgtccctccttctgtttctgttgaatccccgcacctgactgtgggacccactgcctctctggtccttgaggatcctgctttctctcccctctgtcctggctctttcccttctaccacatcttacttatggctttatcatgctccctctgtcctagcacccttcagccaccacagctgctctctccacttcctcacctcccctctgctgctcaacaaagacactgcaactggcttccttcctactgctccactgaaataactttcgccaaggttcccaatgacctctgggttactaaacccagcaaatccattaaaaaaaaaaacaaaaacaaattgctttctttccccccaagacaacagattggaggcagcattagcatgcctctcccatctggaaggacagaatagcgtgtagagattcacactataatttttttttctccaggaacgaatgcaggaactgaacaggaaagctgaaagaatccacagaacttttgaaagaagtggcaggctgcagcctactctgtgagacaggcaaaaactcacctctaggcagaatagcactgtacccaggaaggagaaaacggctgcatattctcagctatcaccactgcttacaacaccctggctaaccagaagtcctgcgtctgtccacgtgataagttcactataattataaccagcatttgagaaagtcaatactctaagtctatctacaaccaaggaatcttgcagagtttgcatcactcccctcccacttctgtcagagatggtgctggtattcactgctgggagtcttgaagacaggtaacaccactggatcccttgcagacattccctagcaccagcccagagtctggtaggcccactgggtggctagacccagaagagcactgtagtctggcttccaggaagtcccattcctagaggaaggggaagaacatcacatcaagggaataccctgtggaacaaaagaatctgaatggcagggcttgagtcccagatcttttcactggtgggaagtttcctattgcagagacaattgctgtgctgggcagagtgggggaaagtttgcacctctacccaataggcaggcagcctctggtattgtgaagggtcttagagaagggatccttgttccccctggtacgccactgcagacagagctggggcttctcccaaaggaacgcagcattgatgcacctatagacagccttcctggaacaaatcagggtgattgcatccccacgggaggagcactccccagattcaggtttgcatgacaggcagtcacaattcctctctacttggaacatcaacatttctacagatgaaaataactgcctgtctgatctgaatagctggaacactgggaaaggagtgaagctgggaggtggatagctttccagctggcctagtgggggacctgaggtagctcctacccttcaccctgacaaaacctcagcacatctaattgagagctctcccaggcactctcatcaaggctgggatctctgcccacctgctttagctacaaccggtgcctacccacctactttagctacatctggtgcctacccagggatacttcccctactggtccaaagcctgaatcaactcagtaagtaaaatactggggaaaaattaaataaataaataaagagtaccccacgagagaatgaggtaagcttaaagagattcctgccattccaaccctgtaggagacagtaaaccttcccacacaccaagtacgtaactgctacaaccaggatctgggaaagccagcacacaaggactgtctctaactaacgaactcatacagagtcttcactcctaaaatccaaaagtcttcactcctaaaaaccaaggatcaaattaggctaaaataaactataaatattaaagtcagatccttaagagggaagaaaaagaaataaaaaaaaaacatagttgctgggcgtggtggctcacgcctgtaatcccagcattttgggaagctgaggctggcagatcacctaaggtcaggagttcaagaccagattgaccaacatggagaaatcctgtctctactaaaaatacaaaattagccgggtgtgctggtacatgcctgtaatcccagctactcgggaggctgagacaggagaatcactcgaatcggggaggtggaggtcacagtgagccgagatcagacattgcactccagcctgggtaacaagagcgaaactccatctcaaaaaaaaaaaaaaagtcaaatcaaaaataaattcaagaataacttgaagaaatagtctacccaaatgagaaggaaccagaaaagtaattctggcaatatgacaaaacagggttctgtaacacccccaaaagatcacactaactttccagcaataaatccaaaccaagatgaaatttttgtaataccagacaaagaattcagaaggttgattattattattattattattgttattattattattaataatattttgggacagattttcactcttgttgctcaggctagagtgcaatggtgtgatctcggctcactgcaacttctgcctcccgggcccaagtgattctcctgcctcagcctcctgaatagctgggattacaggc

SEQ ID NO: 2833 - DNA, 4001 bp, Homo sapiens
tgatcattattactggaatagtttattcactgataacatgctgcctctctcactacatccccagtcaagggaaagcagtcggcagtgggtctgctttcaaggctgactttgatgacatctaatttactttgacctggatattaattgtcatattagctgtaatgttgagtgtctaccaggttctagcttctgggcaaagtgctttccagaatttgtatcaattaatcctcaggataacctcacgaagcaggcactttctggaagaggaaatgaagactctgagaggttaagcaacatacctagagtgacacagctgaactaggttttcagtttaaaaaacttctaaaaatctgctctcaaatcctatctcctgttcactgtaataaggagcaggatcccagcctaaagtttctgagctccattaggtacctccctgtgtcccagaaagtcagatacaaaggatgtagagaggggagcccagatttgacatttcccagtcagcctccttcttcatgctccttaggtcaatttcatttccatggagatcactgcggttatatgcagggtggagtgaattaaaaaactggcttctggtgcggtggctcatgcctgtaatcccagcactttgggaggctgaggtgagtggatcactcgaggccaggagttacagaacagcctggccaacatggtgaaaccccgcctctattaaaaatgcaaaaattagccaggcgtggcagcgcacgcctgtaatcccagctactccagaggctgaggcataagaattgcttgaactcgggaggcagaagttgcagtgagccgagattgtgccattgcattccagcctgggcgacagagcaaaaccctgtctcaaacaaaaacaaaacaaaaacctggcttctaatcctgcttggagaagtcattctttctgggccttgttgtgtgcctttggaaaacgggagcttcttctaattctattctgttcagcatgctagctactagccatgtgtagctatttaaattaaaattaattaaaataaaggccaggcaaggtggcccatgcctgtaatcccagcactttgggaggccgaggtgggcggatcgcttgagcccaggagtttgagatcagcctgggcaacatgacgaaaccctgtctttacaaaaacaaaaacaaaacaaacaaacaaacaaaacccaaaaaattagctgagtgtagcggcacatgcctgtagctgcagctacttgggaggctgaggtgggagaatcacctagacctgtaggttgaggttgcaatgagccaagatcatgccacagcactccagcctgggcattggagtgagagcctgtctcaaaaaagaaaaaataaaataaaataaaatgaaataaaaattgagatccgcagtcacactagtcacatttcaagtgctccgtggccacgtgtgactagtggctaccatactgggcagggcaggtctaggacatttctattattgcagaaaattcttttgtgcaacactgtctaggtgaagacttagttgtctttagctctaagcttctacacttcatcaccccagttctcaggggcctcagaggaggctgaagtttccagatctcttccattagaaatatgttgccagcatctcagactgaacaagtcacctacctgctgttattggagtggccaccgatgtcttcactgtgcctcaaggttgggtggtagtcagagctgttagacaggaaaaaaaagatgaaacaaccttgacgatgaaacttctgacctgggttgcaagggggaaatccaggatgccctcctggggaggtattcccacagaggaacaatgaggtctgtcctgggactttggcccaggacaggtgccacttagtgattctgggatgagtgctggggattttcacatcttcctgtctgatggcttctggaggagcctaccagtctgaaggtggagatttgtctatccaccttctgtctctgaatgttttgaacctgcacttccttttttaacaaggaagatgcaggcatcccagcccccgccaacggacttgtctgaactcgcacgcagtttcttccttctttccggggtcagagtgagaagcgtccctccttctgtttctgttgaatccccgcacctgactgtgggacccactgcctctctggtccttgaggatcctgctttctctcccctctgtcctggctctttcccttctaccacatcttacttatggctttatcatgctccctctgtcctagcacccttcagccaccacagctgctctctccacttcctcacctcccctctgctgctcaacaaagacactgcaactggcttccttcctactgctccactgaaataactttcgccaaggttcccaatgacctctgggttactaaacccagcaaatccattaaaaaaaaaaacaaaaacaaattgctttctttccccccaagacaacagattggaggcagcattagcatgcctctcccatctggaaggacagaatagcgtgtagagattcacactataatttttttttctccaggaacgaatgcaggaactgaacaggaaagctgaaagaatccacagaacttttgaaagaagtggcaggctgcagcctactctgtgagacaggcaaaaactcacctctaggcagaatagcactgtacccaggaaggagaaaacggctgcatattctcagctatcaccactgcttacaacaccctggctaaccagaagtcctgcgtctgtccacgtgataagttcactataattataaccagcatttgagaaagtcaatactctaagtctatctacaaccaaggaatcttgcagagtttgcatcactcccctcccacttctgtcagagatggtgctggtattcactgctgggagtcttgaagacaggtaacaccactggatcccttgcagacattccctagcaccagcccagagtctggtaggcccactgggtggctagacccagaagagcactgtagtctggcttccaggaagtcccattcctagaggaaggggaagaacatcacatcaagggaataccctgtggaacaaaagaatctgaatggcagggcttgagtcccagatcttttcactggtgggaagtttcctattgcagagacaattgctgtgctgggcagagtgggggaaagtttgcacctctacccaataggcaggcagcctctggtattgtgaagggtcttagagaagggatccttgttccccctggtacgccactgcagacagagctggggcttctcccaaaggaacgcagcattgatgcacctatagacagccttcctggaacaaatcagggtgattgcatccccacgggaggagcactccccagattcaggtttgcatgacaggcagtcacaattcctctctacttggaacatcaacatttctacagatgaaaataactgcctgtctgatctgaatagctggaacactgggaaaggagtgaagctgggaggtggatagctttccagctggcctagtgggggacctgaggtagctcctacccttcaccctgacaaaacctcagcacatctaattgagagctctcccaggcactctcatcaaggctgggatctctgcccacctgctttagctacaaccggtgcctacccacctactttagctacatctggtgcctacccagggatacttcccctactggtccaaagcctgaatcaactcagtaagtaaaatactggggaaaaattaaataaataaataaagagtaccccacgagagaatgaggtaagcttaaagagattcctgccattccaaccctgtaggagacagtaaaccttcccacacaccaagtacgtaactgctacaaccaggatctgggaaagccagcacacaaggactgtctctaactaacgaactcatacagagtcttcactcctaaaatccaaaagtcttcactcctaaaaaccaaggatcaaattaggctaaaataaacta

SEQ ID NO: 2834 - DNA, 4001 bp, Homo sapiens
attacaatgaaatacctaggatagtgctttgcataccataaatgtattacttttgtcttctactagccaaaagaatgtcaacagaaatcagaacataacactaagtaagtttaacatgtacttttattaacaacttaatacaagactgtacactgtaggtgctgaaatcaacccactcctgaaaactgaaaaaccagcatttctataccactttgggctttggttataagtgccatcttctacagcaaaatcacgtcttaagaacaggaaaaacgttccacgggaatggagagattatctatgcataaacagctggggatcatttctagctttacgtgattcactacacgctctggaatgttcagttcccttttctacagtcctaccacgagacatacagcaactaagaacttggccacaggtcctgcctagacacacatcaatatgaaacaaaaaaaatttatataaataagtcaattaaacttcacaaaaactaaagaaacacaagacaaaaatccaacaagcaataaaaactgtacaatattggtcagtcttttatatctgaaaaatgtgtaacttaaaaaaaagttatttatcgtataaaaaaaagtcttttacatctgtgttagctggagtgaaaacttgaagactcagactcagtggaaacagatgaatgtccacctcgctttcctttggagaggatcttgaggctggaccctctgctcacagaggtgagtgcgtgctgggcagaggttttaaatttggctccaaggaaagcatagaggatggggttcagacaacagtggaagaaagctagggcctcggtgatggaaatccacttgtgcacagtgttctcaaactcacacccttgcttgatgatttccaggaggatgaaggagtcgatgctgatcccaatgtagtaaggcagccaacaggcgaagaaagccaggatgaggatgactgtggtcttgagggccttgcgcttctggtggcccttggagtgtgacagcttggagatgataatgcaatagcaggacaggatgacaataccaggcaggataaggccaaccatgatgtgctgaaactggaacacaaccacccacaagtcattggggtagaagcggtcacagatatatctgtcatctgcctcactgacgttggcaaagatgaagtcgggaatagtcagcaggagggcagggatccagacgccaacatagaccaccttttcagccaacagcttccttggcctctgactgttggtggcgtggacgatggccaggtagcggtccagactgatgaaggccaggatgaggacactgctgtagaggttgactgtgtagatgacatggactgccttgcataggaagttcccaaagtaccagtttgccacggcatcaactgcccagaagggaagcgtgatgacaaagaggaggtcggccactgacaggtgcagcctgtacttgtccgtcatgcttctcagtttcttctggtaacccatgaccaggatgaccaatccattgcccacaatgccagttaagaagatgatggagtagatggtgggcaggaagattttattgaaattagcattttcttcacggaaacagggttccttcatggagtcatagtcccctgagcccatttcctcggtgtagttatctgaagtgtatatctgcaaaagaggcaaaggaatggacattcacttccaattcagcaagcattaacccagttaaaaaaaatttttaaagcaatttaaaaaaccaattcaggcttgctttcttcaggaaattctgaagtagtgggctaagggcacaagagaattaatgtagaatcctacaactctcctccccatcttttcccatagtgacttcattatatccttctttggtagaaccaattacaaaattctttgtttagaacaaaagggcactgagacgctgagggtttcaaagtcacatcttggctaactcctctgccccgcccactagagggaagaaaaaaaaccttccttaggaggaaaaaaaaaatacacacaaagaggccactcccaggcggcgtggggggtggggtgggtgctgctaggaggggcagtgattaactttttgtaagaagtttttcgcccagggagggaagaggggagaagggaggatcacggggggagggcgggggcgttgcaaagactcattctcctaaagcgcaaaaacttaattttcccacgcctgcctaaatacaaaccattctgggcttcaagcaacttgtagtgggtaaagagaatgcggtcttaaaacgaaggcccttcggtgcttggggtatattgggcgggagtgtcagaaaatgaacaaacggcacctcctcccccaagcgggcgctcctccggtgtgtgggtctcttgccatcctcgtgtttatcacttggcgcgtttgggacgttagggagcggggcattttcctgggtggagaaggtaacggggtctgcacccgtggtcctcgccccaagtttcatttcctcactctcccgggtggcttcccattaccccgccactgatccagttaacccggccggaggtgggcagctggaagcctccaggcggtgggcacgcggggggccgggtcgtccagccccgggccgccgcggctgcccactacacccacgccaaccgcccgcaagcagcgctgcaggggctccgctgggcgacacgccaggctctgtcccacagggtgctggggagcgactgggcggctccgccgcgagcgtctttgaattgcgcgccgctgcaggaaaccaaaaactccctagcaagagggtttcaaaaggtttctggaaaccaccgacggttaaacatcacaactggactcggagagagccaaacggtttccccacttgcacctgccagtcttcgcggcggcgacctggcagcccaggtgcggtcttaaccgcccccgcccctcaccccgtacccgctcctatccccggagcgcaaatctcagggctggcagctgcgcggtgtcaaaggggaggtcaaaccactccgctgacctctgcacgaccccaaactctcgaactgcaggacccactcgcggccgtggggaagaggcgcgcttcggacggcgggaaggttttccccctcaaacccaaagcgcgcgggcggatcaactcctagctgctgccaccactcgatcccctcagaggatcggcgcggtgggtccacccgcctctcccgccctctgcctactgtgctgggagactggcacagctccgtcggccgcacagagtttaacaaacacgcacccagtgtcaagaacagtcaccaggcgcttaaccccgaagttaaagcgggcgcaatctcctcctgggaactcagcccaggcacgccgccctccgcctctaaattcagacaatgtaactcgctccaagacatccccgcttccccaaggaagagaccggtggtctgagtcccgaggcagcgcgcacgccttctctgcacttgtgcacagaatgttcttacgtttgcaaacagcgtgcaagccgccgcgcgcggcgggactcaagggggagacacatgcagccactggaacgctctttccagtcgtttctcctcgactcacagagaaaaagattccaatcctgctccccccccacccacccgcactatataggcatggtcaagaaaactcctttcggtgacccttttttggagtacgggtacctccaatgtcctggccgcttctgcccgctcggagaggggctgcgctctaagttcaaacgtttgtacatttatgacaaagcaggttgaaactggacttacactgatcccctccatggtaaccgctggttctccagatgcggtggctactggagcactcaggccctcggcgtcactttgctacctgctgccgcagccaacaaactgaagtttctggccgcggccggacttttataaaaacacgctccgagcgcggcgcatgcgccgctggggcggggagggagaaggcggggtgggggag

SEQ ID NO: 2835 - DNA, 4001 bp, Homo sapiens
agaacaaaagggcactgagacgctgagggtttcaaagtcacatcttggctaactcctctgccccgcccactagagggaagaaaaaaaaccttccttaggaggaaaaaaaaaatacacacaaagaggccactcccaggcggcgtggggggtggggtgggtgctgctaggaggggcagtgattaactttttgtaagaagtttttcgcccagggagggaagaggggagaagggaggatcacggggggagggcgggggcgttgcaaagactcattctcctaaagcgcaaaaacttaattttcccacgcctgcctaaatacaaaccattctgggcttcaagcaacttgtagtgggtaaagagaatgcggtcttaaaacgaaggcccttcggtgcttggggtatattgggcgggagtgtcagaaaatgaacaaacggcacctcctcccccaagcgggcgctcctccggtgtgtgggtctcttgccatcctcgtgtttatcacttggcgcgtttgggacgttagggagcggggcattttcctgggtggagaaggtaacggggtctgcacccgtggtcctcgccccaagtttcatttcctcactctcccgggtggcttcccattaccccgccactgatccagttaacccggccggaggtgggcagctggaagcctccaggcggtgggcacgcggggggccgggtcgtccagccccgggccgccgcggctgcccactacacccacgccaaccgcccgcaagcagcgctgcaggggctccgctgggcgacacgccaggctctgtcccacagggtgctggggagcgactgggcggctccgccgcgagcgtctttgaattgcgcgccgctgcaggaaaccaaaaactccctagcaagagggtttcaaaaggtttctggaaaccaccgacggttaaacatcacaactggactcggagagagccaaacggtttccccacttgcacctgccagtcttcgcggcggcgacctggcagcccaggtgcggtcttaaccgcccccgcccctcaccccgtacccgctcctatccccggagcgcaaatctcagggctggcagctgcgcggtgtcaaaggggaggtcaaaccactccgctgacctctgcacgaccccaaactctcgaactgcaggacccactcgcggccgtggggaagaggcgcgcttcggacggcgggaaggttttccccctcaaacccaaagcgcgcgggcggatcaactcctagctgctgccaccactcgatcccctcagaggatcggcgcggtgggtccacccgcctctcccgccctctgcctactgtgctgggagactggcacagctccgtcggccgcacagagtttaacaaacacgcacccagtgtcaagaacagtcaccaggcgcttaaccccgaagttaaagcgggcgcaatctcctcctgggaactcagcccaggcacgccgccctccgcctctaaattcagacaatgtaactcgctccaagacatccccgcttccccaaggaagagaccggtggtctgagtcccgaggcagcgcgcacgccttctctgcacttgtgcacagaatgttcttacgtttgcaaacagcgtgcaagccgccgcgcgcggcgggactcaagggggagacacatgcagccactggaacgctctttccagtcgtttctcctcgactcacagagaaaaagattccaatcctgctccccccccacccacccgcactatataggcatggtcaagaaaactcctttcggtgacccttttttggagtacgggtacctccaatgtcctggccgcttctgcccgctcggagaggggctgcgctctaagttcaaacgtttgtacatttatgacaaagcaggttgaaactggacttacactgatcccctccatggtaaccgctggttctccagatgcggtggctactggagcactcaggccctcggcgtcactttgctacctgctgccgcagccaacaaactgaagtttctggccgcggccggacttttataaaaacacgctccgagcgcggcgcatgcgccgctggggcggggagggagaaggcggggtgggggagaggggcagacgcgaggaaggagggcgcaggggcggggcggagaggtgcgcggcttgggaagcccaggggaccctgctgtttgcgggtggtcggtagtgagtccggagccggacaggacctcccagaggcatttcctaagtttgagggaagcgggatgcgcctgaagacaggtgggaagcgcgggctaggaacgcgtctctctgtggcgcgtccatccttgctaaagtggatggaattccagacctgggaatgctacagtagagacactgaggcccagggaaggggagtgacttgctggagtaacccaaccagtaggcggcaatgctggaagtagggccaagcttccaacgccattccccgcgctttcagcagacgcagcccattcaggaggtaaaaggagtaaagatccttccttcggaggatgtagctatacttgcacattcacagcatcactagggtcaggtgcagataattaggagatactttcagaagaaggtaggatttggcataattctggagactgatcagatgtagatatgtattgctcagtaatttcataatagcggtaaccaattcgcgaatagtgctttattatcctaaaagtatgctttattataagagtaatttagcgaccagtactttttgtaacagatcactaggaacttgcacagaatcactcattcattctcacaacaccgtgtgggtattaccatcacagagatgcatttagtccgatatttatagaaggacgaactgcgtgccacgcactgttctaggcgttggggatccagcgtgaaccagacaaggcccgcattcggagaaaccagcaaataagcccggagagatgaaatgccagggatgggcagggattccaagccgggcttgaacccaggtcttcggtccccatactcggcgtcttccacgattttgagcagaggacaagctttggcacgaatcagaaattaggttgaagaactgggcggggcggagtgggggtgggggtcagacgtttaaagcgatctcagactggctgaggtttgcagtgggcgcgcagacagtgctttccccctcgcgccacttccctccggcgcggagactgggtggggcgggggagcgagtgtggggcggggccgagaaactgcgtccgcaggcggggtggccgctgcggagatagctgggaccgaggcgcgtgcgtcgcgacacggaccccagaggcccccaccccgaaatggtcccgaggagagggattgcccagactgcactctacacacgatccctcttttctatatcaaaagaggaaacatttcagtctggagtgttccagaggtagttcggaggcagggaaccttttctctacagagcatgactttccccctttgtctgggacccctccctaatgttggtggttaaaggttctcatctactctgcactttcactgacacaggaaagatgatatccgggccgggagatgggactctcagaaacgaacgagttaggacacacactaatggccagataaaatcaattctaatattacatttgtagaattaaaaaaaaaaaaagaaactccaggttcttggagggtggtggctggaagaggtttcggaagctccacgccccttctcacaggccttgcattacgtatctcttcatctgtatcctttataatatcctttataataaacgataacggtaagaaataaaaatgaaaataaaaccgtaaaaacacttttacttttttcgaatctttaataaaacttaaggatcttcatatttttatagacacggtagatcctatctactgaaggtctagaatttcagagcgttttcatgacttgcttttcacaaagcctggtagtggcagaatcagtatgttttatcctggaccgtaagctgcaccctacctcaaaa

SEQ ID NO: 2836 - DNA, 4001 bp, Homo sapiens
aacttaagggctccaccacgaaggaaagagtgcttctgacagttactttggaacttgagtatgtttttttcttataagcatagtggcaaaataactgagagttacgcaacgaaatgccttaggtgcccagtggtgctcacaccctgatgccgatctcacaccctgatgccgatctcacaccagggaagcctttgaatgctgagggttagtaacaccttccactacattccagagtgggagaatgctggccacacttgccaaagctgcagtacaagtttaaaacaaccaacaaaaacaaaagccaaaatcacttttctttaggaatgaggtcagcactcttttgcacactcgtttgtggggagttaaatatttggtgaagaaaaggcagcctgcccgcaggcaaagctagagatttcggccagtgggcatatctttccaaacccttgctactcctctcgattattttctgcgacataacaccactccaccccttgctgcctttctctaactactttctgaaggccgtgcctttggggaagtggttacaaataaatggtgtttgcgccaaaagctagaggttcctccagctacacggcaaaccgaaggaagcagtcaggacattgagaggcactacacaatgacaacaaacattgccagcgactgctgagcccctcccccgcgccagcctcagcccagagaatgcaggcccggggctggctcgccgcgggccaaacacggacgcagcttgcgccgggggcatcccgagcagaggcatccctcggtgccaggcagccgcgggccctctccgggcatctcccacccggagtgctgggccagtgcccaataggaagccccgcgggggaactttcgccactcttctgccacataaacaagtcgggctcaagaccgtccaatgactgggcagggcggcgaaacacacttggaagtcctggcagcttcccggactcgactgagtttaacactctaggaggagaggaacccagggcggatgcttcactcgccccccttggccagcccctttacccagggccgaggatgttacaaatacgggcaaattctcgctccggcaatcttttccccgctgccttcccctcctcatctgcagcctggaagcaagttcagcaaaaggctgaggcgaaagtgtttccgcgcccccgatcgcgcaggctcggtccacaggggcgactttccggggcgcgtgggctgcagcggcccgactgcgcggcgctccggcatcgcgcccgggctcaagtttctgggtcttggaggcccctccagtgcgtcctagccagtcgccgcaaagagttaaccaagtggggccggccccgctccgccgcccccagcagcgcgtctccaccgcgcacccccggccccgcgctcgcggcgatcctcctgaaccgcagctctgtcccgccccagagccagccagcctccctcccgcccagccgacttggcttcccgcgcgctcctcaccgcactcctccgggccccgcgatcctccagcacttcctcagctggaaggggcttcacggaggaccctctgcccccgccgttctccccgctttcctccccgcacccccccaggaggtgccagtaccgatgccctggatgaagacgaagccggtgaccatgagcactgggtgccagttaaactctagtgcgctcccatcccagccaagcccctctcggtagtggaggacccagacgagggcgaagatcaccgacaggaagccgacgagcagtgccgaccccagcagcgccaggaagcgccagtagccctccatggccatcagcgccccatactccgcaccgcgggggccacaagaacttggagaggcggcggcagccctctgggtagtggccgggcggcgggaccggggcgtcgacttcttggggctgtctccgcctgcggggagggactttctgggctgctggcccggaatgtggggcctcttgggggtggggagctggccccaactcagaaatgggccccacccccgggatcacgcggccgccgagggcgctcattgcctggtggcctcaccctctccctcgtccagcatccaagctcgcagagggcttcagtaacagacctagttagttgctcaaagagaaaattccgaggattttatactcaccacttgcttttaacacttcccgtgtctcgtccttatttgtggggaggttgagtagggcagtggtgcgccctcttggttaagagaagagagggatccgttgggtagggttatgtgtgtgcttttaactactaacgaagcctccttagccacagtgctggagaattggctgtctctgacatcaaagggtgttaaggaggaacctgtaaggtggtgtaaactaaaaataaaatcctaagcccctcactgactgaatggacctccttggccaagcagaccccagaaaaaccttaaagctgagtttctagctacagccggaagggaagtctaccccctccattttggaatttagactcaacagctgactagcattaatgtttaaaatagaaatcataaggcggacagaacagactctttgtagcaataagacatcaaattataaaaaggacctaagtcacacactcctacacttaagaaataaactatggtctaactgccacaaaggttttcttttcctctagaggctaaacaagcactggcttgagataagcaatattaaaacaattacaacttaatcagttcacagatgctgaccagctgaacccctgttgcaccagccagaactacagctttcactgggctgatttcaggaactttttcatgataagaagaccgaccatggaccggttctggccagtgtacagggattgtgcacttgtatgcattcacgtcctgaaaagaccttttgaagtgtaggtttgaagtaatacatttaaatgtatttgaagtaatacaattaaatgttaagtctccaccccaaagagaacatgttacatgcatgtttgttcaatatgcatgtgtaaggaccacctccattaatattcatagctcctcctgtaacctgttacgtatgtatgtttggccaaactgttcagcataaagctcctaccccaacccctctgccttccaagtgcctgtctctggtcttaggccagaggctatgtttatcagcctatggaatggcctccttgcaggctataaccttttataagaaataaagtctcctcttttttcaaatttataattttttgttttaagttaacagtaaaggccaggcgcagtgcctcacacctgtaatcttagcactttgggaggctaaggcgggcagatcacttgagtccaggagtttgagaacagcctgggcaacaaggtgaaaccctgtctctactgaaaatacaaatgcatgcacctgtagccccagctacttgggggactgaggaaggaggatcacttgagcccagaaggtcgaggctgcagtgagctgaggttgcaccactgcacttcagcttgggtgacaaagtgagactctgtctcaaaaaaaaacaaaaaacaaaaaacaaaaaaaacccagtaaaccgggtccccatgaggtgtctcacagctgtaatcccagggctttgggaggtggaggcaagagaatcacttgagctcaggagaggtatgatcgcaccactgcactgcagcctggtgacagctagactctgtctggaaacaaaacaaaaacagcatgggcagcggtgggcttggccttatcctgcaatgaaactacttgcagtttgctcttgagagagggaagacaggaacctcctggacctggacttgccgtttagtgtgacaaatggattttcaaagtgcccgcccacccaaaccaatttgaaccaaagcccctccttgatgaagtgaagcttgctccctgccctctttccaacattatcctcacccttctccactggacaaaaacaatgtcagcattatctaatgctattataagaaaaagggttctga

SEQ ID NO: 2837 - DNA, 4001 bp, Homo sapiens
cgaaatgccttaggtgcccagtggtgctcacaccctgatgccgatctcacaccctgatgccgatctcacaccagggaagcctttgaatgctgagggttagtaacaccttccactacattccagagtgggagaatgctggccacacttgccaaagctgcagtacaagtttaaaacaaccaacaaaaacaaaagccaaaatcacttttctttaggaatgaggtcagcactcttttgcacactcgtttgtggggagttaaatatttggtgaagaaaaggcagcctgcccgcaggcaaagctagagatttcggccagtgggcatatctttccaaacccttgctactcctctcgattattttctgcgacataacaccactccaccccttgctgcctttctctaactactttctgaaggccgtgcctttggggaagtggttacaaataaatggtgtttgcgccaaaagctagaggttcctccagctacacggcaaaccgaaggaagcagtcaggacattgagaggcactacacaatgacaacaaacattgccagcgactgctgagcccctcccccgcgccagcctcagcccagagaatgcaggcccggggctggctcgccgcgggccaaacacggacgcagcttgcgccgggggcatcccgagcagaggcatccctcggtgccaggcagccgcgggccctctccgggcatctcccacccggagtgctgggccagtgcccaataggaagccccgcgggggaactttcgccactcttctgccacataaacaagtcgggctcaagaccgtccaatgactgggcagggcggcgaaacacacttggaagtcctggcagcttcccggactcgactgagtttaacactctaggaggagaggaacccagggcggatgcttcactcgccccccttggccagcccctttacccagggccgaggatgttacaaatacgggcaaattctcgctccggcaatcttttccccgctgccttcccctcctcatctgcagcctggaagcaagttcagcaaaaggctgaggcgaaagtgtttccgcgcccccgatcgcgcaggctcggtccacaggggcgactttccggggcgcgtgggctgcagcggcccgactgcgcggcgctccggcatcgcgcccgggctcaagtttctgggtcttggaggcccctccagtgcgtcctagccagtcgccgcaaagagttaaccaagtggggccggccccgctccgccgcccccagcagcgcgtctccaccgcgcacccccggccccgcgctcgcggcgatcctcctgaaccgcagctctgtcccgccccagagccagccagcctccctcccgcccagccgacttggcttcccgcgcgctcctcaccgcactcctccgggccccgcgatcctccagcacttcctcagctggaaggggcttcacggaggaccctctgcccccgccgttctccccgctttcctccccgcacccccccaggaggtgccagtaccgatgccctggatgaagacgaagccggtgaccatgagcactgggtgccagttaaactctagtgcgctcccatcccagccaagcccctctcggtagtggaggacccagacgagggcgaagatcaccgacaggaagccgacgagcagtgccgaccccagcagcgccaggaagcgccagtagccctccatggccatcagcgccccatactccgcaccgcgggggccacaagaacttggagaggcggcggcagccctctgggtagtggccgggcggcgggaccggggcgtcgacttcttggggctgtctccgcctgcggggagggactttctgggctgctggcccggaatgtggggcctcttgggggtggggagctggccccaactcagaaatgggccccacccccgggatcacgcggccgccgagggcgctcattgcctggtggcctcaccctctccctcgtccagcatccaagctcgcagagggcttcagtaacagacctagttagttgctcaaagagaaaattccgaggattttatactcaccacttgcttttaacacttcccgtgtctcgtccttatttgtggggaggttgagtagggcagtggtgcgccctcttggttaagagaagagagggatccgttgggtagggttatgtgtgtgcttttaactactaacgaagcctccttagccacagtgctggagaattggctgtctctgacatcaaagggtgttaaggaggaacctgtaaggtggtgtaaactaaaaataaaatcctaagcccctcactgactgaatggacctccttggccaagcagaccccagaaaaaccttaaagctgagtttctagctacagccggaagggaagtctaccccctccattttggaatttagactcaacagctgactagcattaatgtttaaaatagaaatcataaggcggacagaacagactctttgtagcaataagacatcaaattataaaaaggacctaagtcacacactcctacacttaagaaataaactatggtctaactgccacaaaggttttcttttcctctagaggctaaacaagcactggcttgagataagcaatattaaaacaattacaacttaatcagttcacagatgctgaccagctgaacccctgttgcaccagccagaactacagctttcactgggctgatttcaggaactttttcatgataagaagaccgaccatggaccggttctggccagtgtacagggattgtgcacttgtatgcattcacgtcctgaaaagaccttttgaagtgtaggtttgaagtaatacatttaaatgtatttgaagtaatacaattaaatgttaagtctccaccccaaagagaacatgttacatgcatgtttgttcaatatgcatgtgtaaggaccacctccattaatattcatagctcctcctgtaacctgttacgtatgtatgtttggccaaactgttcagcataaagctcctaccccaacccctctgccttccaagtgcctgtctctggtcttaggccagaggctatgtttatcagcctatggaatggcctccttgcaggctataaccttttataagaaataaagtctcctcttttttcaaatttataattttttgttttaagttaacagtaaaggccaggcgcagtgcctcacacctgtaatcttagcactttgggaggctaaggcgggcagatcacttgagtccaggagtttgagaacagcctgggcaacaaggtgaaaccctgtctctactgaaaatacaaatgcatgcacctgtagccccagctacttgggggactgaggaaggaggatcacttgagcccagaaggtcgaggctgcagtgagctgaggttgcaccactgcacttcagcttgggtgacaaagtgagactctgtctcaaaaaaaaacaaaaaacaaaaaacaaaaaaaacccagtaaaccgggtccccatgaggtgtctcacagctgtaatcccagggctttgggaggtggaggcaagagaatcacttgagctcaggagaggtatgatcgcaccactgcactgcagcctggtgacagctagactctgtctggaaacaaaacaaaaacagcatgggcagcggtgggcttggccttatcctgcaatgaaactacttgcagtttgctcttgagagagggaagacaggaacctcctggacctggacttgccgtttagtgtgacaaatggattttcaaagtgcccgcccacccaaaccaatttgaaccaaagcccctccttgatgaagtgaagcttgctccctgccctctttccaacattatcctcacccttctccactggacaaaaacaatgtcagcattatctaatgctattataagaaaaagggttctgactgccagggcttccagaatgcatttgggaacgttcacttctagccctcttctgtagctcatctccaaggactactttgctatattgtcttgttgccgtcttgaaagacc

SEQ ID NO: 2838 - DNA, 4001 bp, Homo sapiens
cctcactgtgagtccctttaccgacgcgatcttggttttgaggggtggggacctggagcgaaaccccaaacccggggccctgcttgcaaactcagcatattctgtctctactccgcctttttcagaggagaaaagacctggcccacgcctcccagaggctttacctggtgaagaggaggagcagccactgcagcgcggtggacagggtgtcctggctggcgccgaagatgtcagtgatagtggccggtacgttctccaaatccagccgcgcgccaccaccgtgcgagtccccggccgccttcttttccgcagagaggataaaggcgtccatcatgtcgcggggggcggccccgggccgaaggctttcgcagtgcctcaagaacttgtccaggatgaagttgctgaagttgcggttgagctgctcgaattcgcggaaaacggtgcgcaccgggttggggaagtactgcagccagggcatcacgtccaccaggctgcccgcgcccaccgtgcgcccgaactcttcgttgtggctgagcagctcacggaactcggggtcgtcgtggctgtagcggcagccgaaacacacggcactcatgacgttggccacggccacgacggtcagcggcctcgggtcgaggaaggcgccgtccgcgctgccgcgcaccagcagcgccaccagctcgcgcgcctcgctcagcacgtggccctcgaggacttggcggctgcgcggctggcgcgtgaagaagttgcgcatcatgctgtgggctgcgcgccgctgcaccttccagtgctccgagtagtggccgaaagccatgctgcggccgccggacaccacacggaaggaggcgaaggccggccggtcggcgaaggccgagccctgctgcaccagggcctggtggatggcgcgctcgccattcagcaccactatggggcagctgcccaggcggatctggaaaacgtcgccgtagcgccgcgccaggcgagcgaacgagaggtgagccgcctggcccaccgccgccgcgtttccgatcagtggccacgcaaacgggcccgggggcgcggaccggagctgccgcctccgttgcctcagcagccgctggcccacatgcacagtggccagcaccgacaggagtagcaggagcgtggtctgctggatggacagcgggtttagcggccaagggtcgttcgggctgaggctggtgcccatgctggggacagagaggagaaggcgtgacactcaggggtgcagagacaggagcgggcgccccacgcccctaccccagcctctggggactgagtgccgttgggtggagaggtcggagctgactctctggagaaatggccgaagacgccccttcccatccccaacccactctcccttggagaagagaaggggcgtgtttccacctcgctgtaacccagcgccaaacccttcccctccccgcaaggcgcgtaacggttcctgcaatctggggacaacgctgcgggcatcgaggcggtggcgcttgatttcctttaaagtacctaccacgccacccgctacctgtaataatccatctgaagaggtcgccgggcagcgcctcggcagacagactgacctgcggggaggtgcggtttccagtggcgcgggacagccggctccgagaaggaactgggacctttgcctagggcaagacgtcaacaggaacccgcaggcccggcctggacacctgctgccctcactggaagctttaactcccactcgagtctcttggcgtcgtcagtgccaggagcgcttggattgggatggggacggagaagggtgcctcgctcgccgagccccgctgcccttggggacctggcaaagtcgaggtttcctcacagcgttgagattgagactgggggtcggtgagtggcgtcaattcccatgcccttgcggctctcacaactggagtcgcagaagcgctcgctcccactcccactccagagtcaaagcgcgccatcccgctcctccgggttttaaggactgggtagaaggagggcagcgcgacctggcagggcggggcctgcggggggcggggcgcgccgcacaccaggccgctttgacccggactcccgtccaggcgcaccggccggcctcggagctctaccagcaggctttcatgggagcggaggtgcccacgtttccattgtgcggtaaccgcgcttcatcacagccacctccaatcgaggccgcacggtgtccccagaaccacgctcggtacaacctgccccggccgctgcgctcgacttgggagcgcgccccgccccgagcgcacgacctcccttccctctccgcgacttgagcttgcttcccggaaagccagtgtagtggcagcggtttgcctcacagcgcccctggttggttgtttaaattttatcttaggttctcgcaaacaaattgccacctcagtggaggctctttggcatgctaaattttttccagttcttgcggcgagatcaggaatccctaaaagtagccgctcccccgccccggggccccgacagtgcttgggcacacaaaggctcctggggcgcagctggccctgagatttcccgcgtagaggccactccaggtggcgccgcccgctggtgggcgcggggccgcccaggctgcgatggaagccgttggcgcagggcggggagccaagctggggcgactgggggggcctgggggagctagcggggcgggacccgagcggggcggagagtggcaggaggaggcgaatctccgcgctccggcgaactttatcgggttgaagtttctgctgtcgcctcccctttgcgtgcggagctgggctttgcgtgcgccgcttctggaaagtcggctccagtcatatccctgggcgctgcctgcggccgctcctcccgcgcttctcacggcacctgacacgcggaggcggcggccgagggtggggtgccggccaccaccacccttggcgtggggtgccggccgccaccaccctcggctgcgcacgcacagtcgcgcctgccaggccagcgaggcggacgcttgggccaccacccgcaggccgagcccgggcgcgtatcgccacctcgctgcgcaccggcggctctgtggtcttcctgggcgcgcttgcggtcgcgaagggggccctccctttataagggaagccggaggcgcttgggcgggggtggcttcccccgcctggcgcgccctttcctacatgctgatgcataggattttcaagacagctaagagaacaaggacttcacgaggcggggggaagggcgaactcgagggaagaggtgggatgtatctggttaaccaggtaggaattgtactggcttcatcaaaggataaatataaaagtgataggttcaccagggacaaccctgcactttgagctccactcgcgctgcgaatctcgtgctattattgacctgtttacagatgaataaactagggttcagagaggttgcgtgacttaacccaggtcgcgcagccatcaagaagtggagccagggcttgaagccaccaagtcccactccagatccttcacataagtttacacggaagaaaattgcagataagaggcccaaatgccttctttcctgcctcccttaaaaaaaaaaatgcacgtggggctaggcgcagtggctcacgcctgtaatcccagcactttgggaggcttaagcgggcggatcacttgaggtcaggagttcgagaccagcctggccaacatggcgaaaccccatctactaaaaatacaaaagttagccggacgtggtggtgcacacctgtaatcccagctactcggggatcaggggggaaggcagcagaattggttgaacgtgggaggcagaggttgcagtgagcagagattgcaccactgcactacagcctgggcagcagagtttaagtgagactctgtctcaaaaaaaaaaaaaaaaaaaaaatcagctggaagaactttttaattattgtttttgttttcataattgagaattctgagaatagc

SEQ ID NO: 2839 - DNA, 4001 bp, Homo sapiens
tgtttcacggctggattcccagcacgtggaaccatatctggcacatagctagtgctaagaataaacagtgtgcttctatgagctgatcaaagaagagtatcattttaaaatcaccaaaaattcaagaaccactaaaattgtttagtttctcagaaaataagatttcaggaagtccctgattgtgtagttgcaagattctagtctaatccatttacctgctcggaaaagaacatttaagaaggtgtatggtcaattccagcagttcagctacttttcaactttcactgtaaaaccaccaccttgctttgtagaacaggtgttttttgtttgtttgtttgtttgttttgagataagagtctggctctgtcgccaggctgcagtgcagtggtgcgatcttggctcactgcaagctccgcctcccaggttcaagcgattctcctgcctcagcctcctgagtagctgggattacaggcgcccgccaccacagccagctaatgtttgtatttttagtagagacggtgtgtcaccatgttggccaggatggtctcgatatcctgacctcgtgatccgcccgcctcagcctcccaaagtgtgtagaacaggttttaaagacggtcctcagtcatcaacacttttgttttcagaccctccctctctcgctgacggaggcaagtggagagaggaggaccggaggctcgcagaggcgtcagcggcagaggaaacctcgcacccgaacccgcagcgcggcgctctccccaaagaagcatttgcctggagcccctaagaggagcaagacctggacctcgagcactttggattccagtcaggatagatcgatggacagatggaaaagaggaatacacaagtgctgggagaatcctcaagaaaggagaaaggagtggcgcgcccaggagtctcgtcctgacacactgggaaatgaaatttgggtttggcgagttatggccaaaaagctgcccaaagtacttgagagccgccttggagagtggcgcggggtgcctggcaaggtgagaccggcctgcgggggcgcgggcttttcctcagcagctctacgcccgcctggcccggcgcctgaggggtagcgacgcagcccacgtcgctctcagagcttgccgggaggggcgtcacgtgactccgggtgcggtccccgcgctgaagctctggagcgaacccgaaccctcctctcaggcccgccccctgcggcccgcagcgggcaggttggcctggatgccggcgacagagagactggggcggcgcccggggccccagagagccaagacggcgctcaccggatagaggtagagcacggctcccaccaacgccagcaagaaggtaacggcgaagatcgcgaagtccaacatggttctgccgcccagggagccacgtctcggatcggccgctccagcagcagcgcctcagcctggcccaatttaaggcatagcgtgtgggcgggggcaccccgcgggacccggaaaccaacgggccgctgggggcgtgaccgaggcctgcggccggcgccagaggaaagagcaatggatcgccgaggagccggggcgcgggttcctgagcgcagcaggccgaggctgaggccgcctagcgccagcctccaccgcaaggcggggatttcggtgcacacgatttcagacagaatatgcccgcgacttcggaccgggttgctggcgaaagcagagcccagctttctgagaaaagttaggagttagtagtgctctgtccgcccaacagttttcgcaatggattcagaattaaaacctctaaaccgatgattttcgaagagtggtcccggtaccagctgcatcaacgtcgcccgggagctcgttagagattcagattatcgatgccgggcgcggtggctccacctgtaatcccagcaccttgggaggctgaagcgggaggatcgcttgagcccaggagtttgagaccagcgtgggcaacatagtgagaccccagtctctacaaaaaaaaaaaaaaaaaaaaaaaaaaaattagcctacagtggtggcgcttgcctgtggccccagctgctccggaggctgaggctggaggatcactttagccggggaggcagaggctacagtgagccgagatggcacgactgcactccagcctgggcgacagggcgagaccctgtctcaaaaacaaaacaaaacaaaacaaaaggaaaacaaaataaaaagattctcgatcccaaactagacctactgaatcaaacactcggggtgggcaggggtagggggcgcgtacaacaatctgtttgaacagagccctcccggggacactgttacacacttaaatttgagtgaaaaccaccactgatctaagcgggacagggaagtgtctgggagtaaaacaagagtagatacgccttgtttcgcagaatttctgtctgaagtactagtaaatgtgattctttgacactttctggtgagcggaggctgcacactgttcaggtttccttgctctgttaactctgactttcggtaaattgcttcagttttctaagcttccatttccttctatgtaaaaaagtgaaaataataccacatggagttgcctgtaggttaaattacatattttatgaaaatcacttagcacagctcctggcaaaaccgaataagtgctatctacgtcagcatttggcgtttgttgccctgggcataaaataccctaggacccctctttctatttcgcctggctcagaagttttgacgtggctactgaaatacaagacaaggcctgctacttactagtgctgcttttagtgaaagtgtgctaaaagtatttatagattttatagctttaataatataaaatgtcaagaacaggcagcaatttggcaagagaaattccagattgcattttacagcttctatgataaatgactgttacataagcaggaaacatacctcattgaaaatggcaactcttttggcatctatagcaaatataatgaaacatgctgtttaatatttcacttggcagaaattgtatttttaagtctttctctgcatataaatgtgctttaaactgtcgtatgttcaaagttcatttttaagtctcttgttcagaattttaaagatatttcttgtcaaactgatgttcccaataggttttcaaaacagtaaatgtaagagttttttgtttgtttgttttgtttgtttgtttttgagacgtagtctccctctgtagcccaggctagagtgcagtgacgggatctcggctcactgcaacctccgcctcccaggttcaagcaattctcctgcctcaccctcccgagtagctgggattacaggcacgcgccaccatgcccagctaatttttgtatttttagtagagatgggtttcaccatgttggccaggctggtctttaactcctgacctcgtgattcgcccctctgggcctcccaaagtgctgagattacaagcgtgaaccaccccgcccggccaaacataagagttttaactgcataaggtagccatataaccgtaatcttaggtaccgtaatcttaggtaccaatccttcaagatatctagaattctcttttagtcctaaattgacctacatcctgagactctctgaactttgagggctgtaaaaaagagacaaaaattccagaaattgtcagggcaccatattttatagtgtgagtctctaaactagacatctacctcctcttcctgtgttcctaaaacgttttgcccagatactccctaaaagcatatataaataatatatatataatatatatatacacatacacacatatatatcttttcacacattttttgtattgacatctaaaatttttatcttgactttaaaggattaaatttctgtcatattataaatattcacgttttgaaattgttacagctctcttttaagtgtatgaaaaggaatgtaaatataatagtgatgtgataactataagactttttttaaaaacacacaaacttggccagg

SEQ ID NO: 2840 - DNA, 4001 bp, Homo sapiens
atttttagccctgggctctgtttagatggcgctcggtggaaacggagagcccttggaggtccccccgtaaaatctgataaatgactccgaaaaaataacgctgggattcagagggctctcattaaccccttaggcgctcctgtacacgtaccccctatttccctcctcacctccagatctagggccccgggttggagggatggggaggcttaggtttcctcctccctaacttctgtgcaggttggacgctgacccccaggggctcttgtgggattcggagaaaaggtcatggggacctgagggggggcagagaggtcaggaaacgaagtgggggtgggtggtgacagaccgtggattcagcagactggctctaaaaggcgggagccgttgcccaagttattttatttcctaaattcgcggcccaaagcctagagcaccgctgcagttgacactttaagtgtggtggcgagggaaaggctctggggatttctttgcggggggtgggggggtgatacatccattggttgaaaggacccccacctcattgcacgaacaaccccaaaaagagatgggcctaatccgggacgtggaaagaccacagggcagaggaacttcgaaccccctccccgcccccgctccgctgtcactcgtcccggggcagggtgagtgcgtgtgtgcgcgagcgcgcggattgcacgcgtctgttaatttcaagccaagctttcgcacctgtaaacccacaggtcgcagcgctcacctttcgcttcacctctctagtgcggggattgtcagtttcaggacatccctgcttcccctaacagaacaaacgcgcgtacacacaaatacacctcccgcagttactgcagaggcgctccgctcccccaccccaagaagaaaaccggtgtgtatcacattgcaaaagcgattgtctggcacttgatgaggtgaactccaggttaatctccccattacctacctgggtctggtccctgacgcgcctcacccccgttatcaccagcagagtggggttgtgcggcatctaacaagcacacacgcactctctctctatggatcccacactcacctctcccaagtttccctctcctgccaaactgtccccacccaataagtaaatagacccttttccccgaaagcctagagccctggattctcatttttccttgggttaccttcttcctcttccaccacaaaacagacacactcgcgcggaccgcggaccagggacactgtacctggcgctgccgacggcgccgcaggaacacagttttaaatcggcaattcaagctgccaccagccccctcctctcccgactcaattttcggctcccagcgacacagccaaccccagaaagccgagggcgactgggggcttgcagcaccgaggggaggcgaaagcggctcaggaccggaccctcccccgggaccgcgcctcgctaggcgcccccggggcgctccacgccccctgccaggccagccgcgacccaggcaagtccatcttgggagccccctcaggtccgggaacccctcttaccagccccctgaacctgcgccgcgggcgccagtggtcccggaaccgcgctgccggcgggctggggaagcccgggctgctgcggcagagaggagggaaggggcggggcggggaccagtgccttcaggctcccggcgccccctggccggcccgccgctccgtctgccccgcgctcgcagctagcggaccccggagtgcagcggagcgagcgcgcccttacctgcagcagccagtggccggtctctccgatgagcgggaagcccatggatcccttggggatgggcagcttgcagctcttgtcgcgagtggcggcccagcgcagctgccacagctgctgcgacacggccagcagcagcgtcacggacaccaggcacgcggcgagggtggccagcgccgacaccagatccaagccctcaaagagcatgttggcggccgctcgggggattggctgtgccggccgcggcgggggaggggagggcccgacgggaggggaccggagcggcgggggaggggaggctgcggccgggggtcctggcacctccagccgaaacagagaaggaggaaggggccaagggaaagggagtggaggctgcgaggggagcggagagagggaggaaaaaaattgcctaaaagaagagaggaaacacgaggcgactggggtgcaactttgtttgtttgtttgtttgtttgttcctttatagcgggcttaggggctgctcaaggggtggtgagatgaagccgtgagtcaagctggtgggtttgctctccccgctaccatcacactcggaaaactttggaaaactttgtccagagggagcctctctctcgtaagccccttcccctgctcggaaaaaaagaagggggcagagagctagcagagagaaagtgcggtcgatttgtcaaaagtattgcagtatggccccaaaattcctaggtgaaaaaaagaaaaaaagaaaaaattcctgaatccaaaaattccaacgaacccagaaactttgggggcgagggagaaagctccctggctgaggcgagtggagaggccggagcctaaaagtccctgggctgcccggggcggcgcgctcgagccccagagccgccgcagcacccccgaggcaggagcggcgggcgaggcggcgaggcgggcgctgcggcccgagcgcgggtgcggagccggcgggccgcggccgggacgggacgcagccggcgacagagccccgggcgggcgatggggcggcggcggcggcggcggcggcggcggcggcggcagcgggcgggaggggtgaggcggggtggggttgggggaggaggtggaaaacccgagctgggctattgtatcaattaagaaaaggcagtccgtcccgggacgcggtctctcggctctggagttgctgctgggggaagaaatggggaaaaaagaaaggaaggcaaaaggaatgaaagagggggaaaagcaggaggcaggatttcagggctggtggttttaaaagcttctctcaatgtgaatttgagtccaaagcgaggcgatgcgtgtgtttatatagaggcgggaggctgcgccgtgggcgccccgccagcacccccccgccccaacccgcgcgctcacaaagccggaggcgtggtgagaggccgggcccgcggccggagctggagagcgcagcccggcctcccgccccgccccggccgcccgccgcccgccgcccgcagcccgcccgggacccacttgtagccgccgcaggatcaaactcagttcacctctcgcctcctcttctttctcgccggcgtctcgctgagcccagcgcctacagacggacgagatgagacacacgcgcgcgcacctacgcgcacacacacacaacacacacgcgcacacacacaacacacacacctccgcacacacggtgcgcactcgcttagtgcctgcttggcttctaggctccttcccttcctcttttcctccttcccaggtcagcggtcccctcctccagctccgagcagtccctcctgggccgaagccccggcagcggaggtcctggccggactgccccctcgactggcaggcgcccaaagccctcgaaactgtgccttagggtcccgagcttccaacccccgggatcccgctggctcttatctccagggacccctgagttaccagtcccaatccccctaagccagatcccccattcccgatccctatatcctcacacctccgatgctaaggtccgcccccgccatatgtctcttaccctacggaacctggaggttctcctgtccccgtcagcgtcccaggctgctgactctgcagcccctcctttcctgcacattgggacccccctcccctgcttttgtagtccccctccaccgcccgcagcgtcggggaaccccgatactggtccggcaagtgtcctgcgcggggacaaacgcggcggccccggtacccagaggcgggagaagac

SEQ ID NO: 2841 - DNA, 4001 bp, Homo sapiens
tgacaaccaagtgtccttgtggaggcaccccgaatcgaagccccctccctcttccccaaccttagaacagcttctcccccagagttctctctgtgaagttaactttttgttgctttatctctttgtcctccatcttcttcagaggagcatttaagccccatgagggcagaagcctcatctcactgaatcccagtacttggaaccatgcctagaacatggtaggtgcattcatatttgttgatagtcattaggaagatagatcctgtatgaacccctttggttcattccctaaatcctctccaacattggtcagtgttgggttttccggtctctgtcagtgagcagtgagctgttcatccctgcctcatttctgtgttctgctgtataaaactttcttattagacattggttttctcccccaacaccactaacctgaacacagactacaggctgatttcttttttctttttttctttttttttttttttttttgagacagagtttcgctcttgttgcccagactggagtgcaatggcgtaatcttggctcaccacaacctctacctccctggttcaagcgattctcctacctcagcctccctagtagctgggattacaggcatgtgccaccatgcccggctaatgtttgtatttttagtagagatggggtttcaccatgttggccaggctggtctcaaactcctgacttcaggtaatctgcccacctcagcctcccaaggtgctgagattacaggtgtgagccactgcacccggcctcagactgatttcttaataacaaaaagtaccttttccttactgtctgtgagtttgcttccacgatctgagatgcagcattgtgttttcccctaagaggaaatttaccttgcaaataaccaagaggtttctataatcctcctgaagttatttcgtttggaagaagtctgtggtagccaatatcagcccagaattagtgattccataatatccgttagcttacacatttgcctctgccactctcttcccaagacagctccctcctcaacctctgctcactgtaagtccggcgtccagatcccccccttactggtgccgtcctgatttaagcccttcctcgtcctgtttatctcagctcaaagggctctgtctgcactttgcccattctccctactgatttccagtttatgaccatagcctcagtgggtccccagctgagttcctgcagccttcactttctgtccaacgtcttctcacctctagcctctctgttccggtgcccactcccatccccaggacgcgatgcccccgcgggttacctgtaactggtgcagttgcagggcatagccttgaacgaacagctgaaagaagaagcgcagctgtcctagacgtggaatctcctctaagctccgttgccgccgccggacaccaggcccggctccgggagctccggtggccttgtccgaggggagggcggcagggatcgcggccttggctctggccccgtgggggcagaggccacggccggcccctcgcagcgcccacctcagcctcgcgcagcccagcgcagccatgggttgtgctcgcgcgcctgcacctttgggtcgagtgctgagtccccggacccgcccagacagcagtgcagggcgggttcaaagccgggcgctggggagggccgagcaaaggccagctagaccccttcccgctcgctccctcgctcctcccagcgacgcgggagctgcaggagagggacgcggtgactcggggatatccacggcgccccgaccaaggcctccgccacgactcctcaccccgcgcccccgaggcctctcaaataacttttcgcttggtctgaactctgggcgggggtgcagcgagattctttcgaaatcgggaagccccacaccgggataggtcctcgcccggtcgcggttccccacccaaggcgaccctcgcgtcctggagggaacgggaaccggccgtggctaagctgccctcggcttctcccaatggccttccggattgatcccggagtcagttcggagcgaggggggccagtcatctgatccctggaggggggccgctgaacaaagaaatctaaatattcgtgttttgttgtttttttttttaattcaattctccctccacgcacctccctgccgcgtctgccaaggcaggatatttcaaactgcaggttgagaccagatttcgtagatgatggccagaattatttttaataaaatggaaagagtaacatagtacggaaaacgtacagcaagaagaaaaaaaaagtattgtcttatgaatcctatgtttcatgtatattcaaagtatagttgtcaaaaagtttaaaaacataactcacgcaagtataaaataaatacagggtcaaagatcacattcaagccaggaatgaaggacccagcaggatggtacagctggttctaacagcatttgaaaaattggtgatttacaggcagccagagaagaaagggcatattaagttcaattaggctgacagctgagttgctaggtgtggctttctacttatttattctaggactcctagtttcttgactctgtgactggatgtctttgatcagtctggggagtttctcagatattatctgttcaaatattgctcctccccatttttttctcctttcccgggacttcaaactgctatatgtatgttagctctccctgtatccttcctctctcttatcctgtcttgtgtatttttgttcctttgtgtcatatagtttgttaattctctcctccccactccccagagtctcaccctgtcgtccaggctggagtgcagtggtgcaatcctggctcgctgcaacctccgcctcccggttcaagcaattctccggtctcagcctccagagtagctggaattagaggtgcccgccaccacgcccggctaatttttgtatttttagtagagatagggttttgccatgttggccaggctggtctcaaactcctgacctcagatgatctacctacctcggcctcccaaagtgctggaattacaggtgtgagccacagcacccaacctagaccatatttttcatttggtttttggacaggaaggacaggaggccatgctttaaaaacgtggtggcacacgtgatcccagctacttggggagactgaggcaggagaatcgcttgaacccgggaggcggagattgcagtgagctgagattgtgccatgcactccaacctggacaacagagtgagactccatctcaaaaaaaaaaaattatatatatatatatatatatatgatctagttcaagacttaggagccattaacgaggtcataattctcttacatcctatagtgccaaatccttatactatacttaaccaaataccagaaaacaccaattagttcacagtgttagatcataagaatgctttcttttgtattcctttgcacttcgactctcagaacttatttcctttcaagtagactaatcctgaaactactattacccaatggtacaccaggacaatactgcctcatgactttagggatagcccttgcttgttcaaaaatgccttgacacaaaagttaagaaagccagagctaaaaaggagagccacactccagtatgtaaataacatctttgtatacagccccactaaagaagactcaaataaaaatgccattcaagtcctaaacttccttaaaaaaaatcagttctctccatccaagcccaaatttctctaccaaaagtgaaatacctgtagtatattctaaactcaggaaactggaccttgtccatcaaacaaaagtttacttagaagtaaaacctctataaacaacaacaacaacaaaaaaaaaacctaagaactttcctgggtatagcaggattttgcagaattgctaagccattgtatgaggccctaacagggccaaaacataagccattcaaatgatcaaaaagcagaaggctttatcttctagctaaacaaaggggtttacacagta

SEQ ID NO: 2842 - DNA, 4001 bp, Homo sapiens
ttacactcttgcctttgaagcaaactttaaggaaaaaactaccagtggtaagtaataatctttagtaaaagtaatacgacttcctttaaaaaatcttgaaataatattgtaataaagaaatgagattgctaattagcaaaagaaaaatatatatatatatgcatacatatgtatatataaatgaagtaagtactgatattaaaaaagaaaaagagggccaggcatggtggctcatgcctgtaatcccagcactttaggaggccaagatgggtggatcacctgaagtcaggaattcaagaccagcctggccaacatggtgaaaccccatctctaccaaaaatagaaaaatttagccgggtgtggtggtgggcacctgtaattccagctactcgggaggctgaggcaggagaatcacttgaacccgggaggcagaggtcatggtgagccaagatcacgccattgcactccagcctaggcgacagagcgaaactccatctcaaaaaaaaaagaaagaaagagagagagagagagagaaaaggaaggaaggaaggaaggagggagggagggagggagggaggagggaggggggagggaggaaggaaagagagagagaaagaaagaaaagaaagagagagagaaagaaagaaaagaaagagagaaaggaaagaaagaaaaagaaagaaagaaagaaagaaagaaagaaagaaagaaagaaagaaaggaaggaaggaaggaaggaaagaaagaaggaaagaaagaaagaaagaaagagagagagagagagagagagaaagaaagaaagaaagaaagaaagaaagaaagaaagaaagaaagaaagaaagaaagaaagaaagaaagaagactgcagcttgttaccagggtgtgggaaagaaagagggactgcagcttgttaccagggtgtggggccttggggctcctggctgcactcggagagcacccaggtagcaggcccagcacaccgctcccagtgaaggcaggacgctgagggaaccccttggaggtctgaggagtgttctgcagtttctcagagggtcgtggcaggactgagcctcaagtgcccacgagcgtcacccacacctccacacctccgcatggcttgcctcccaaccctgctccactttcgcgttctcaaggagaccacctgcactcaaagccttgcctccagatggactttggaggacccaagctaagccagcccggcgcctgggcctaggcactgcccttccctttgctgtccactgtgctgaagtcaccagcaccgcctctctccatctcagccgaagaggggtccaggcacccacacaggctcctgagcctgcagctaacggggcagacagcagagagattctgcctcagcattcgggcccctctaggcctgaacatccaggaggagctgtttaattatttcccccaggacggaaattgagggaccctggtgacatctggtcacgattcttatttatcttacttgagaaattggtggctgtatttctccccaatttatgtataaggacatagatatcaaaagagctgcaaacagaagtcccaccccatggggatttggaccggggcatctgcaggcgccctgggcctccctgcctggccgcgggccacgatctcttggaaggcacagaggtgttggtgacgctggttcaaaatgaataatcacagtctgctatgagacaggaaaatcaccacgtggcgaccaaggctggaggttcttagcccctcgtcaaagggattttcctgaaatagtgaccacctcctttccctgtgcacagacaagggcgctgtgagttttgtctgcctcggttatcactgaatggactcccaaagccacaaagccctgcttccgaagcgctctgcccaccacggagccagcgtcgcccctcctggctcctgacgggacaactctgcacggaggaggagccagaaagcccagcagggctctcatgtctgggagatcgcacaaggagactgtctgatatcattccatgggggggttctgtgcttttttaagagctggcttttaggaactcagctttggaggagggggcctccccctgagctccccctccagcccgtggctcagcccgggcccacatactcacgccgagatgagcccggtggctctcccccgcaagtctcggtactcccgccaggactccatgttggctctctggggcgcagcgccctccgcccggagcacctgagccaccatatcgcggtctgcaatagatactacaaactgaggaccaaagtgagacttgaagatttttccatattcccgtgtgtgcttctgctgcaataccatggagaaatcaaaaaaggaaaaaatacatagatatgatatacctttaacataaacatcctgtgtgctagaggagcagaaaattggggcagagggaagtgctatctaacacagcactgaatcagagcagtaatttacatattgctgagataaacatgttttcacataaccatctcttttttgttgtttccgtttgtttgtttgtttgtttgtttgtttgttttttagagacagggtcttgctctgttgcccaggctggagtgcagtggcataaacatagctcaccgcagcctccaactcctgggcccaggcaatcctcccacctcagcctcccaagtagctaggactgcaggtgcacacctccactcccagctaattttttattttttgtagaaacaggggtctctcaatgttgccaggctggtctcgaactcttggcctcaagtgatcctcctgcctcagcctcccaaagtgctgggattacaggcatgatcatggaagttttcttattctttagggatatgtttttaaaactaccttagctgtgtgaagcaacaagagagaaatgtcattataagagacaaatgtccagagcaaacagagccctgtctgccagcccctttccatgggcccaacagctctacccaagcagtaccaagccaactctgcagagcaagccctctgtggacagtctgtaacgagcctctaaaactgactcccagcaagaaaatgaaggaaaagacatctggattggaaatgaagaagtcaggctatctctattggcagatgacgtgatctcacatacagaaaatcctacggaacctactaaaaaactattagaactaataaacaagttcaataggacacaaaatcagtatacaaaaatcaattgtatttctatacactagcagtgaacaatccaaaatgaaatttaaaaaacaattcaatttacaatacatcaaaaagaatacaatacttgaccagctgcagtggctcatgcctgtctgtaatcccagcacttttgggaggcttaggtgggtggatcgctagagcacaggagttcaagataaggttgggcaacatggcaaaattctgtctctaaaaaaaatacatggctgggtgcaaaggctcatgcctgtactctctgcactttgggaggccaaggcgaggggatcacctgggttcaagagtttgagaccagcctagccaacatggtgaaaccccatttctactaaaaacacaaaaattatccaggcatggtggtgtgcacctgtaatcccagctactcggaggctgaggcagtagaatcgcttgaacccaggaggcagaggttgcagtgagccgcaagactgcgccattgcactccaccctgggcaacaagagtgaaattctatctcaaaaaatacatatatatacaaaaattagcgaggcatggcagtgtgagcctgtagtcccagctactcaggaggctgaggtgggaggatcacgtgagctcaggaggtggaggttgcagtgagtgaagattgtaccaccacactcaggcctgggtgacagagcaagactctgtcacaaaaaaaaaaataataatattcttagaaataaatttaacaggagaagtgtaaaacctatactctgaaaactataaaacattgtctaaagaaatctacaa

SEQ ID NO: 2843 - DNA, 4001 bp, Homo sapiens
aacccaaactcgctaacatggaatacccttggcatggcgcactgcagcctggcatactctcctaagacctctctgacccatgccctgggcaccagctgccccagccaccagtgacattaggcatgaggttctctctgcacagaacttgctgcctggatcacgtccacagacccttccagattcaggacaacttccaaattcatcccttcgggaatgcctacctgcctcccttgggattagccgctttctcctgtggccttttgatacggatctctcatcgccctgctttctactttcccccatcgagctgcagacttctttaaggcaagggctatgctgtgtggcctcatccctagcacccacagcgggaccggtgctcaaaggatagctggaaaatgacttaaagagcgagcagtcaccatgatgaataatatcagcaaatcagagggcacaacattcactcttgctatttgcctctcattttcacctccgagtttccaaagcacttgaaaatgaacactaaaattaactgcctccttgctatgtgtgaattcctcccaaatttctcagctatttgtccaggcagtgttatataactgcaggctgatgtggtattaaaggaatcttgttatataattcagccctactcactgcagctcgcttttcctctttaaagaccgtaagggagaggagcagggaaccagggccagagggagagagctctgtgcactgtcgcctggggctgtccctctcccccaccctccctggggccttttcaggattccttggtgcggtagccacccaggaaggcatcttcctcggctcccagcggctgctaagcaaagcctcccgggcctcagggaggaggacgaggcccttggcatcctccccgagcccgggagcggatgttaaagatcttgttcattcagctctgctggagcgaagacggttgccaaaccagagtgcttgttttattgtttttttagaacagcaggactgttattacgagtattcagggagagagaataggaagcgcaaaagagattccgcagcatcctaaaaatatcagtaacatgagaattgcctgcccagcaaggcaaggatctggaccggtgggcgcggcagggcgcttctgagccaccgtctggctgccgtgccaccaccgccggcgccccgctccagggcggcccgggaaggccaggcggggccgcgggcccgaggggagccgggagcccggcgcgctccgcctaggggtgtccttcctcggccgctcccagcgcgatcgcccccacgcctggacacagacccggagacggggcagagagggaggaaacctgggggcccaggggcggggaggccggggcagcggggagcacgcaagtcggaggctggaagggggcgcagcgcgaccggcgcccagggctggggcggggacgcgcggccggtgagtggggtccccgccgtcccccgaggccctgcggctcccacactcaccgcgctccccgcgaccgcggtgggtcggagccgggctgggcggcgcggggcgggctccggggggccccaggccgccgactcggccagcagctcgtccagcaggcgcagcgtctcgtccctgccgtcggggggcgccacggggctggggtcgcggccgggcgcctcctccgcggctgcccccgggacctcggccgccgccaccggcacccgccggcgggtcccgccctccagggctgccgctccgggccccgcggggaggctctcggggctgcgccgccgcctcagagtccggctgctccggctgctgccgctgcccatggcgcgcccgccgcctcccggaccgccgagggggcccccatgagggggcgcggccgggggcggggacgctagggggtgcggccggggcgggctgcagggggaggcgcggggcgaggtccgggaagcgaccgcggccaggggctagggttcccgggcgggggtcgcggccggaggacgggggtgcgagccggagcctggggaggggcgggcgaggcagggctgcataggcgtcccgagggggcgcacaccggccctagggaggggcgggcccgagaccccggcgaggagcaccgggtgcgggcgcggcctcccctcccgggtctccccctacagtccccccactcccgcccacgggtcccctcgctccccgccgtcgggtcagccctgtcccggccttctggaattgctgaaccctgcggggggcccggctgagtttgttcatttatggaaacgctccccagacgacgctcgccgggcccgtgggaggccgcgggagcttggggggacttcccaaagcctgagccccctagcgatgcgcggggtgggcgggggaaagaccctgagggctgcgcgcgctgcgttcgcgaggtccggccgtcagtgcgccccgacctttcagtgtccgccaggcctgagacgccccgggagggaaggggcgatcctccgggcaccaacagccccctccggccttctccttccctctgttgccccagcggagactggatgtgtgaaggttgagcctcatcaaaacctccaaatagtcactacttttgggaaagaaaaactttgaaaatgaaggagaaaggcaaagcaacccccacctcgccctccccccgccacaggaaagaagcaaaaggaaatacctaggtggtggtcataagtctagcttttggtctcggattttttttttttttcccttaaccgcttttctttttaagtgaactaaccacaacccagactagaaaacactccaaagctgccgaattcaaacccagcgagccttcctgttggttggttctgtgttttacttaaatgtgattacttccttcccttgcccacctcctgcaactttaaattccagcctttccaagacagggcaattcaaaagtcctgggtttaactcacctatcttgacttgacattaacttttatcctgattgattggattccagaataattgtgaaaatggaatttcggctaaactttcccaaccacagacttgaaattctactattttatcacttcaggagtagacattaaaaaacatatgcctaagaaaatggaataaaaatgggactcagattcacatccatttatttttattattaagagagaacaagaggccgggcgcggtggctcacgcccgtaatcccagcactttgggaagccgaggcaggtggatcacgaggtcaagagaccgagaccatcctggctaacacggtgaaacaccgtctctactaaaaatacaaaaaattagccgggcgtggtggcgggcgcctgtagtcccagctactcaggagactgaggcaggagaatggcgtgaacccgggaggtggaggttgcagtgagccgagatcgcgccactgcactccagcctgggcgacagagtgaggctcgtctcaaaaaaaaaaaaaaaaaaaagaacaagaaagtatttataatctagctggacgtggtggctcatgcctgtaatcccaacactttcagaggttgaggcgagcagatcactttaggtgaggagtttgagaccagcctggccaacatggtgaaactgtctctactaaaaatacaaaaattagctgggcatgctcacttgaacccaggaggtggaggttgcagtgagccgagatcacgccactgcactccagcctgggcaacagagctggactctgtctcaaaaaaaaaaaaagaaagaaagaaaagaaaagagagagagaagagaggtgagacagagagggaaaagaaaaagaagagaaaaaaaatgaggctgtaatcccagcactttaggaggctgatgcgagcggatcacttcaggtcaggagttcgagaccagcctggccaataggatgaaaccctgtctctactacaaatacaaaaattagccgggcatggtgaagggcacctgtagtcctagctgctcgggagcctgaggcaggagtcacttgaacccgttaggcggaggttgcagt

SEQ ID NO: 2844 - DNA, 4001 bp, Homo sapiens
ctcagcttcaatttctcccttgctctggaatacccttcaatatctggaatacccttcaatatctcgaatatctatttccaaggctatatttacagatgtttcacttcgatgagagtattcatgttgttttactttgcagaaaacccattctttctgcttactgaattgtaaacagtatatgggtaggaaacattcccttctcgtctttttacctcctacacttagcatgatgtctgtctccttgtaggtgctcagaaaccatctgttgcattgaattgcatgggctagagagtagatcaaatgagtaaggttgcaggtatggaggacatagagggtggaaagttcccaccctgattgaaaaagtacccacagtctccagcaaaaaaaaaaaaaaaaatcatagcctaatcaagtgaaccatagttggtgtgatagtgtcatggcaaatataaagaaaatctgactgctttatatctgaaaactgaaaaaagatgtcagcatttctcatgttgctttatcttcagacaggttgtagattgataaaatgttcatcattacattaaactttgtatcataaaagcactttagattgagaacaatcaataatccaaatcatggaaaattgtgcccttatcttcactccgaaaaataccaaggaatcagctattatacatcactgaaaaaagatcatgtctctcccactatgccatacctctctaatcctgaatttagaaggcttacgagaagcacatgattgtacatgcaagacttaagcgcaaaaattcttgctctagggcaattctaaatattttctgtagaaatgctacatcgaaattcaaatatgtacctggggatttagagcaagttgtttaaaaaaaatcctgaagaggtattatggttaaaaaaaaatttttacatgttagaaattgaagaacgaaaaaatcaaaataaattcagttagacatagatttttccaaatgagttttcatccctagagacaaactttgcaataaaaatattaaaatggcataatctagcatttaataaacacacactgaatgccagtcactgtgttaggcactgcacagttccttatttaaccaacataagaacccaataagggtggttctattattaactccattttagaaaaaacaaaactgaagcttagagaggcaagtggcttgctcaagatcccacagacactaagtggtgagctgatattcaatctggcactcatctatccaaaaaaaaaaaatcttactttccaatagcctgaggtatgtgccagcaacccagagctgaagataattagtcaacaaaatttgtcctcagaaaaagtatttcttatttgattatgaactgaaatgaccatcaaggactgcaagtaaggatggaagggaaagaatcagtggagacacaatggggaaaagagaattaattctcatactggttgtatctatataaaccatcttcaagttttttatgcttaatgatgtttattttacctgagcacttcttcaaataagaaaaacaatcttaatttttgccttgaaaaaaaagtttgattgtggtctcaaatctttggactggttcacctagctccctgagcatctcacctccttcacccataataatcagccagtaattccaaagcctctaaaatatcaccattagtatgaagtcagacaaacatatcactctgccctcaagagaatgtgaacactctaaagggtacaaaatagcaatcatacctgctttcgtccccgaggcagagtagccaccgtgtctgctagcatttgaatccttctattatcgtccatcgtaaggctgccggtgagtgtggagtaagagctatacgctggcccagcgcagaagtccgccaaattgccattgctgctgtgttgcaggagcctttgtaaagacattgtgaataaagatcactccagctagcacatggttgagtggccttgcaggatgggggaagctaaaagtacaactgtgacaagtaatcaaaagtagcaaagcagaaagagcccatgtgacctctgtggtttgaggaacttgttacacaaaccctatcttgctattcactcccatttctcaaagctttttttctttaagctcctgagagaacctggagctaatttttacaatttaaagaaaaatcaacttattttttcacctcaaacagccagaattcttacgcttttatgttctgtggcaagttgcattcacaccaccatttgccatttttttctttagagaagaaagaaaaatgtccccaagtgctaccatttgtttcccatccattctcttacttaacattagcaatgcaatgcagaagtcagcacacgaggacattcagttcttgtgaatatgggcaagaattacaggtgccggtcataatgttctctctcgaagtccttgtaatactgtactttccctgaagtataccctagatcattaatgttcatcaaaaagacattatatctgccactgaggttgtaaccattcagcattcttctggttgtccttttactactttgtccttacaaaaattacccatgatctttacaaagtacaatgggaagggaaagccagcacatttagggcacaatgttgccatttcttagacgagactttgcggcagcatcagcaagtggtcccaggggaggaaaggagtgggcaggaaggtaacaggcaaaccaaggtggcaccaagaacattgcctgttggtccctgcatgtgcatatgggtcaagggcaccatcaccaagtactcaagatcacagatgctttttttttttttcctttggctgaggttgggggcaggtagttttgagagaactggtttcagtggaggagtaggggaggcaagtaaaaggaagaatcgaaacaaaagtcaaaaagagaagttttatatggcacaaaaagtcaaatgtgctttttaaaatctctgaagatcaatactagcatttgaaagagttagcaaatctttgaactaaaatgaaatgtgtgtgtactggaagtgaagatgaattcaactcaagtagaaattgccaaatataaatagtaaaatctgaattaatagtgcttcaaaagttgaagccaattatagattttaaaaactctatcacagcatgactcattatactggaattgaattttgacatggacaaagtgatatcaccacaaacatataacggtctaaatcaggaattaaaaacacatacgttttcagaagccaggtaagtaacataaatgtgtaaggcaaaagggagtggtaaataccttggcaactaaagaatacatcaattataaagatattcacgtaaaatctatatttatagatatgtacagatatgtatacaggtatatgtggggtgtgtgtgtgtgtgtgtgtgtgtgtgtgtgtgtattaggaagacagagagagagattgattttaaaaacattttcaggctaagaggcacataaattaaatcatcactattaatggatgacagcagtccactgtaccctaggaatctgataaagttaggtaaatatttttaatttttattcttaatattttaaaatgccaaatggaaattatacatttgcttaatataaggccacccactcaggccaactgactcacccatttttataaatgactactaaaattgtaccaattcattgtaatactgaccttaagctgatgtaaatcatagatcatcattcaattaagaaactggaaaatacttattacttaactcatgaaatgtgttaagtaaaatttttcaaataatgggatacctggatacaaaacaagggtcaaaagtacctctgacatccagccagcccatatcaatgtggtcacacctgttaattacaaatttttgacctagtctatttttattggtcatttccctgttctgtcagtgcctgtgtcatgccagtcactaatatcatgatcaaaagtgtcccttgtgataaagggtggagaaacagtaatct

SEQ ID NO: 2845 - DNA, 4001 bp, Homo sapiens
tctttataagacaactggagaagagtcacagagaagaaaaacctgtatgaaaaacagaggcagagactggagtaatttggtacctggggccaccaggagctagagctacaagaggcaggaaggagcctcctctggaggctttggagggagcgcagccctgtgataccctgatttcacacttttggcctccagagcttagagaacaaacttgtggggtttggtggggaggggaattctgttttgttttagagatgtagtcttgctctgttgcccaggctggaatgcagtggtgagatcatagtccactaaaactggaactcctgggctggagtaacttttttactttttgttttttcaatcctgggccggctacttttatttatttatttttatttttagaggtgagtggggcgggggttctggctatgttgcccaggctggtcttgaactcctggcttcagcctccagggcagctgagattacaggcagagccactgcgccaggcaaacttgggttgttggcagggcggggtggctcacgcctgtaatcccagcaatttgggaagccgaggcggacggatcacgaggtcaagagatcgagaccatcctggccaacatggtgaaaccctgtctctactaaaaatacaaaaattagcggaacgtggtggcgggcgcctgtagtcgcagctactagggaggctgaggcaggcaaatcgcttgaacccgggaggcagaggtggcagtgagccgacgtcgcgccactgcactccggcctggcgacagagtgaaactccgtgactgcactccagcctggcgacagagtgagactccgtcttaaaaaaaagaaaaaacaaaacaacaacaacaacaaaacttgggttgttctaagcgactcgttcgtggtcattcattccagcagcctgtggcggtgcacacgcccctctcagcgcagccaggggctggcacccccatccaggttgttctcagcccgctttgaagcctccacgggaaggcgcagcggagcagggacgcggaaacgccgcagcttcccaagcctcacccacctcgcagcgtccgcaaccagtccacgttgggagcctgcagcgcttccgggtccgtgacgaccccgccgggcacgatgcgctcaaaggcggccaggtcctgcttagacaccgtggagaacggcaagcgccgcacggggtagcgctcccgggtcagcggcacctcgggggtccccggggcggagcagcagcctctgcgggccagggggccaaccggccgaccccaagaacccgcggctcccggagcaccccgcaacagccacgcgggccacgccagaggccgacggggcagcatcgccgccgggacggagacctcgggctcctccttggtggggggccggtactcagggcccggaggggaagggcagggagccgctggctgcgcgcctggaagtggccaagggtaatttcatgttttatgcacgttgtacaaattgaaacacgcttgcagaagcagggagggggcaggagggcagcgaagggaaggctccgagcacccgggccctccccctgcccgggccgcaaccccgcgagcgcgcgaagccccacgcagcaggcctggacttagcgacgcgcaggctcggggcggcctcgccgggaccttgcccaggaccccgttcctccgagctcgccccccgaggggatcccgcggacgcgcgcgcgtgttccacgcggtcacgtgacgagctgcagcgccgtccccctccccccacaggcaccgactggctgacggcgcccgagatcgcgccccgccaccccgacccgcggctgaaccgcagaccgggaccctcagcccagcgctccgcgcggccgcgcgcacgcacccacgatcacgtcccgagctccaacccgcagcgcccgccgcaggcccagagccgccgagccggagtgggcggggcgacgccgcgcctgcgcattgacggctccgcccagcggccgaagccccgccccgcgcgcctaacgggccccgccccgcctgccctccaggcccagccctgcgcgcctacagtccccgccccgccgtccaagccccgccccgactggcaccggaggctcgacggccaccgcctcgtcctgcgtttcctgagggcctccggcgcgccggctgtcgggcgcatccctccaggtagagaagggactaggctgagcgcagcccaagacgcccaagcagcagctggagggttctccagaacgaggcccgggacgtgggctcggccgagggacctgggggccggcccgctcctccgaggccgagcccagggggcgcccctttccccagcggcctccccagctcctgcacggaccacccctcctgggtccccagccttagcttagggggcagctgcctcctgcaggtgttttcttgcctccctgtcccttctgcctgttcagccctccgtgccctcaaaccctttgcacacctggggagctcctgccctcctgacgcagtaactgctgtcccgaggagcctcccggcctgggatcccctgcctgaggcatcgccagcacttgttttgtgtttttttgagacagggtctagctctgttgcccaggctggagttctggggttgatctcagctcactgcaacctctgcctcccgagctcaaaccatcctcccacctcggccacccaagtagctgggactacgggcgtgcaccaccacacccggctaattttttgttgttgttgtatttttgtagagatgaggtctcatgtgctgcccaggctggtctcgaactcctggactcaagcgatccgcccgcgtcggcctcccaaagcacttgttacttcagctcacccaattccatagaaccctagcgggtgcagaggatgccaatctctgagcagatgagggcagagagcaggagaccacacttggcccgaggcaggactgcggagctgtgcaagaggtggaggctacgcccgtgacagcagatgggtcctggtagtcacacagaaaaccggcgagctggatttgtcctggtgatgaggctctggagcagcagttgcaaggagtcattcctgtcctccttaaccacatccccagaggccactcaccttcttcccaggtgaatcattcatacaaccctggaaaggagacatccacctggcccttcctacctggctggcccttgctctgcagatgagtgtgggagtttgcccattgtcaagggtaactgttgcaattacacattcaggaactggaaagacgaccacagatgaggtctgtggacccccttaccacctgacctccacacgccctccctttgactagcaggccagtggcatcttggacccctgggattaggaatgattcaaaacccataaagattaccacccataccatcccctaaaataactgatttttctgaccaggcacggtggctcacgcccataataccagcactttgggaggctgaggcaggtggatcacctgaggtcaggagttcgataccaactgtgggcggcaagccacccaggtgccgaggcaagagaccgaagacacgagctgttccagtataataaaataagaatagttataccagatatagatcttagatatgattatatatgaatatcattaatcattagttggtagcaattactctttattccaatattataataatcctcgctctacaatcataacctaggaaaaaccaggccatacagagataggagctgaggggacatagtgaggagtgaccagaagagtgcgagccttctgttatgcccagacagggccaccagagggctccttggtctagcggtgacgccagcgtctgggaagacacccgttacctagcggaccgtggtctagcggtagcgaaaagtgtcaagaaacaccacccgctacttagcagaccggaaaagggagtctccctttccccgggggagtttagagacgactgtactcctccacctcttgtggaggacctg

SEQ ID NO: 2846 - DNA, 4001 bp, Homo sapiens
ccagatactttacagaggtgatctcttttaatcattacaacaaacttactagatagatgttatttattgcatcctgtttcagagatgaggaaactcaggctcgaagatgtgaaatgaagttgaggttcaaacccaggtctgtctgattccaaaggctatgtatgtcccaccctccccaccgaatcgtatcttcttcccacttttagggatctgtattttgcttataaaaatcaagtgaaaaattaacagaattttggcacttgtttttgttccataaataaaattttgcaccaccacaaacagattcagacttaaaattagtggcaagacaggctgaaggatgacacttctttgttcccttgtgctcagtggggaggcaaaagtctgccttcatctccattctaattatccaaaacctcttatctgtagtgtcacagttcataataattaattgtcatgccagaggcattgtgacatgcttgatggagtcatggtgtgctatgtacacagagtaattagcaatcattagtggtggggacagaaagttcccggtggtttcattcgaactttcatttggttaagtttatgtctgtgttctttgtgcataaatgtagtttagcaaaacaggtttcatcttagccattttatgaagggttggagtggaaacaacataatgagaatggagttcttttttcttttgtctttgtctatgtaaggagcctgtcttccaatgatttgcatatatacttcctgactattagctagcataattaactttaaatataggtaatgttaaatattgctaaatttgattacaaatataaaacatcagtaatctaccagaggagatcagaccaagatgtctagagctggaaactcagaatgagtagtaaaatctggactctttttggccaggctacccgccggaaagccaccaaaacaatgttacattttgactctctgtgaagacaatacccgccatcaccctctgcagcaaagattattgaaataaccttggcctagaggtgccagagaattagacagtaaatatgtttttgtaaatggagaaaggcaagaacaaagcagtcaagcttttgagttctttcttcagtaaaaaagaaggaaggcagttggaagaatataaaactgactaaaaataggcctgtacacctcagccaatctatatgaacatatggttaagtacaataaaactaatttccatattccagagagtcaatatagatagcataaattaaaaaaaaagacaactatggatgctttgcaaacaccttgacagctactttttccagtcagcctcctcaagtcctgtgtctttatttaaaagtacttctcagcttgttgacaggtaaatacatccccaaagcctgaggagggagaaagaaatgtgattgttgtcctctgtgcagaagctgctttgcctgggtaggaagtcacatgatgcacaggcatcttggggagactgagtcttacagctggaacctctaaagagaaaggtttccatggtagcaaatcatcttcctggtgtagatgtgtcactgctaatctacagccagggccccgtgaaaggaatgctgcctcgagggaggaaaggtgcaacctctctacctatgcctttccacaagccccaaatccatacactgccgtaggtaattaggttttaactcactgggggtctgacaaatccccgggtggatttacatacaagctaagaaggatcaaagacataagaggaagtcaggctgcatggagttaaagtcatactgggtagacagagaagcttccgtctgtcggggtgctccatggaaggcattggtggaagaggggagcagcaacagcctgcaggactgagggcaggtggcagcctacctgcaggaggatgtccccctttccgaggggagagcaggtcttgcacttcatttgccatagcgtgtgccagtgccagtgccagtgctggtgctctggaggctgaatgccagctgtggctgccccaccaccgcaccggctttataaaggcagggggcagggccccttaagggcattgctgagcagcaacagggcttgtcatccagctctctgggaaacctgcatctccttggcaagttttctcttagaagaagactttcttcttcccttcatctgggaaggcaaggtagatgtctgcaggagacaggatattcttttctttcttttttttccacaggaggaaagggagaggatggagttcagtggaattctttttctctccaaccgttgatccctcaagtgtgtatagtgcacctgcaatgtaacaggcttttgtcatattctggcatgacaagggggccaagacaagctctttgcttcaggacatctgtagtctttctaaagagacaggtatagagcaaagtcctgtgcctctgtcccagtttttgcaattataagcatttatactaagaaaataattggaaatgtatacagagatttctgcgcaaggatgggaatcatatgcttcttttctttttaaaatattgatgggaatcaagataaacatctccaaatacagagggatagttaagatgaatcaagaaatcactgtgagagtataccttacaatcatgttttcaaataatatttaatgatgtagaaatattaacgataagatagtgaaaaagtagacaagaaaccaatcaatgccaattttgctaaaaaggaaaaatacaactttaagcttagccattattgtaattccagcgccaataaaagtttagcatgtggcagatatttataaaaatttctttgttcttcagtacagttaaaaaacaacttgaagagcagttgtctgctcttcgaaaaaccctgttaagaaaataaaaacaagctacaaactgggagaaaatatctgtaaaatgcatttctgatgaagtaccgacatttagaatgtataaagaattcttacaactcaataataagaaagcagacaacccaattaaaaatgggcaaaagattcaaataaaacattacaaagtaaggatattgacaacacataatcacacaaaaagatgctcgacatcattagtcattagggaaatgcaaattaaagccacaataaaataccactacatatgtattaggatggctcaagacaagaaaaaaaaggaaaatacaaaatgctggtgaagacgcagagcaactgaaactctcatacattgctgggggaaacgcaaaaaagcaaaggtgttctggaagtcagtttgacagtttcttataaaattcaacatacacttactatatatgactaacaatccaattgctaggaattctcccaagagtgatgaaaacatatgtacacacaaaaccctatgtgcaaatgtttataacagctctatcaggattgccaaaagttagaaacaactccgaagttcaactgtagaatgggtaaacagattgtggtgtatctatatcatagaatataactcagcaataaaaagggaaacatggatgaatctcaaaagcaacacgttaaatggaagaacccagactaaaaaaagctacttcctatataattccatgtacatgacattcttgaacagttgaaaccctaggaacagaaattggatcagtgattgctggagagcggttggggagagtggcttaattacaaaggtgaggaggtgactttttgagggtgatggaaataatttgtatcttgattgtagtggttgttacattcatcatacgtcatacacacatcaccttaaaagggtgaattttaccatatgcaaaatatgcctcaacaaatgacaaaaaatctgtttgtaaataaatgaatgtaaatactccaaaatgttaagagtggcattctgtaggtgggagtattacatgtggatttttaaatcttctttcagtattctgtattactttttaaataaataaaaactaataaaagttttttttgagggaaaagtatggtaaagtgttgcgacaaaggttggcacattttt

SEQ ID NO: 2847 - DNA, 4001 bp, Homo sapiens
cctagatggatttaccatacttaataacattctcagataaaatttacacatatgtacaacacatcttaactaccttcttcaaaaagatgaaactacttcaaagcagggacataaatttcctctgtgaagggagtaggatgaagtaccacagttttattaacttcctattacaggaagaaatgttcaaagagaaccaacgttttgggtaagctttctgagcaccagatgtccacagtttttagaaactggagatgctgggtataagctaactacaactttccttttgtaaaacatcatcaaaaaattcaccagcttcctgtttctaaaaaccagattcaggataccaggttacaggagtttgacactgacaatataataatatcaaatttcttgttacagattagagttaggaacaggaaacagaagacctagggtccaatctgttaacaaaatatacttattaaatagataagtggcctttatttcaatcttactttacctctaaaatgatctaagattcttctagctataaaatggcataactctgccacaatgtctaccttgtatctagacctatactatctgtaagggtacactgatagtttatgtaattaagcagattaagagtacacaaaaataattgccctagtttttacaaggtaacttaagatctgtatgaaacaattaagtttctgtcactttacagctacctgttggaatcctctcctttagagcaggagggtgctggattttgtgtttacaccaaaataaaaccagacatgtttaaggcgcttactgaacaatttaaagaaaaagataaccctggccagagtagagagatacagtcacacaatgaagcctgagggcaacagaaggagattaaattgtgtgaaggacaaaaaagttgcattcataattagtactattaatatttcagtgactcttcctcatttagtattctaagatgaccttacttctcatgttgcttaccacaaactcagaactccttatagaaaaattagggagccagacggaaattaaggcttaacagtactacagcacacataacttgtaggatggtttcaaactttgatttctgaaaagcaccgaaggatcactgggtgttatgaattatccacgtgatttggggtcacttcacctcaaatgcattctcggtaactcctattacctaccttaccgggtcactgagagggagaaagtaaataaaaatgacatgtgttctttaaagctgtcacatgggaaatggtcattaaacatattggcagatggttttgctaagtactgtcattacttgctaaagcattaggaacacgagggctgagtacatatcgattactagtgcttattaaaattttcccagggattgtgcattacgtgcaggacgtgcctaacccagagagactcaagtgtgacgccgcgctcctacttccggggcggctggttcttcccgtcctccccaccccggggacacgcttctagtaggccaaactcccaggtgacccccgcaagaaacgcggtccggagagggtctggccccactgctggggcaagggctctaggcgcccggaccccacgcccgcagcctgcggagaacgtgccgacaaggacctgtagggccccactccccctcctccctccctcggcgcagcccggcccaggggtctgtcctcccaggcccaggaaaggaggaaacccacttccgccgcgtccatgatctcccgcggcttctcctgactcttgcggctggcgctggcgctgggcatcgggacacggaactgggcagtggacaccaccctccctcgcaggcttccgtaaggcaggccaaaggggcttctccctccctcccagtctccgccctcccgaccctggggtctcagcacacgcgctcggactccgcgtggaggtgcggctccagaaagatcgcgagagctgcggctatctcgagatcccggagcgctggcggccgcgcgcagggtctcctcccactcttgccccgcccctccgggagttttcccggagttggagggaattcccgggaattcgcggtagtttcgctggattggctctgggggcgggggcaggggttaccaggtggctggctgtagacctgggcgaatgccagctctcttcagcttcgtcccaactgcgacttctgctccattcttctaacagccctttcaactccgctcggctgtaaccgcagactcgtcactaaaacacccacctaagcgcgggccttggtttctcctctcttggactttcccgccttctctcttcccctgggcgacgtagctgcttggggacggaggaggcctcttcgcaatccattgccctgcttgttgggacagaggagtgcagttggcttgccaaggcagcatgggttaccagtccctgtgtaagtgaggtgtaaatacagtggcaacgacaacaagaaacgcatacaattgcattgattgcctggatctgttgcagtgttagggacagtgcatagtgttggttgcccaatgggcgaatatccccaagttaggcttttttaaaaaactgattttttaaaaaagctatcattcatgagttttgaatcgaaattgaaaataatttggagatttggtttaatactgtttcccctgccagagtttgcactccgtcgtttcaactgacttggtagtgtcttagtctggcacaaagtgttaaggggtgcacatagatcccagcgcaagtgaaaggctctctctggaggctcccccatggagtagtgagaagacagccatggtccttgcttgcctgtagctttccttctaattgcaggtggtatgaaattttattccctatttaattgatcaaagattatttacaaacatctactttgtgccaggcattctatcaggtgctggcaataaaaagataagtcctagttcctgttcttaatattacacaggtacctaggctgatagatgcgccatcttgatacatgcttccattattacagagtcaggaagagaatttagctcttaaaatggctgcctggaagtgacacatttcacattctcctagtttattggcgagaacaagtcacatcgtcattcctgagttcatgggggcaggagaatttactcattccttggggagcaacactgaatattcatgatcagtatcacattccgttaaaaaaggcatcccattatactcatgggattcgaatacagaagggggtctgtgaagttgcttcatcttggaattttttttaaaacttggattgcctcaatcaggtatagtcctaatgtatggactggttatcagaaatctgaatacaaatcccatctattatccctttgctagggtagcgatcttacctttccatctgtccatgaggcctgtccatgtacttctttcttactttggccccgttgccttgataaaagtattcttatttagtcctggaataagactgtaaatatatattcttgtttctggcctcctttcctgatagtgatagaaaagaagcatttgccagatcagtggccacatgtcatatgcctgaggtcttaagaatctgctgtagtaaagataccacagctgcaactgaggctgtgacttggttgaacttgcagtagtctactgtcaagttcctgaatttgtctggtttttgctggagccacaccggtgacaataggaatgtgatggagactaccaaccattacgtctttaagggttgcactgatctccactattccccttggggacatgttattgtttatgatttcctatcctagttgggggctgggaaagtgacttttagagatttcctcttagctttatccggtatggtagcctattccacagaccaaagaataggggaacagctctgctatggtgctctggctgctttgcaggatccacataagccatgtaggcaagggcgggaactgcagctaacctgaatcttggaaaaacatcttgtgatcctgctggaacatgagagg

SEQ ID NO: 2848 - DNA, 4001 bp, Homo sapiens
agaaaatgcatgtcttttctacaaatgtcaacttcccattggagaaagtagctgtccaggatcggtcttccagggaggcagaagcagcatcccttaagattttcagtgtttattttcagtaatttccatacctgacctctcatcaaacacatccatttatccatacattcattcaacaaacattcctgatcttctgtgtcaccaaatctcttctagaagctgagggtgctacaatgatcaaaccacactaagatcttagttctcacgaagtttacattaaatgggaaaggggcagacatttgaaacaaaacaagtagagttttggatgatgacaaatataatttttaagcactttatggcatagagtaaaatcagtgcaggctactttgaataggtaggaaagtctcttcaggtggttgacattgattgaaactgaatgaagaaaaggaagcagcttttcctagctctagggaaagctgggtccaaaaaacgaatgagtgaaaggccctctcttaagtcttagaagaacaagctaaagaagtcagaagtatagtgagggtagacaagtgaagttttagaagtcagcagcacagaatgagccaaatcccacaggttgcggatcgtattctaagcatgataggaagctattggagatcttgaattcagatcccactggctcctagtggcagatggattgtaggagatgagggtgaaaaccaggaatccagttgaaaagccactggagtggctcagccaaagggaatggtggctggaatggagggttggactaggttggcagctggaagggatgttagaccaagaaatctgtgctatggaaagagggataatctgatggattcacagaatattttggacttagagctggcagaatgataacggaatgccgggggttgggggggtgggggaggcagtgaatgatcacaggagagaaacaaaaagtgaccacctaggtttctggcaaaaaacaggctgggtgatgatgccttctactggcagggcacagtttgaggaagcagcaggattgggatgggactggaaaaaagaaatcatgagatctctatgcgatacctcatcggcgatgttgaccaagcagttggatgtgttgcagggaaaagtgagatattcaacctgaaattcaagtcccacccctcataaagctattcttaacaaaaccggtccaaagtatcttaccctcctttgaaatctttatgacacttcctatccaaacttcattgggcaagtgtatttggttatcttctgccttgtggtatgttttgcagatttttttcttttttttctttttttttttttttttgcagatgtttctaattcagaagacgagttctgaattagaacccaagaattgcactcctatttctgtccctaagaagctgggtgatcaatgggtgtcacttattctttaaaggtgaccatgtcctcacctaaaattagagttaggcaaggattaggtaattaatgtattgcttatgttactaagtaatagttaagtaatttatttcataattacttcactcattgaaatcaagcactatgaacttctttaaaggtccatagcagagagcacaaagcgtgtacgcagtaggcactcaataaatgcagacagactgacatgcacagtcaagctaaactctttaaattcctaaaagagtaattgttaatgttttgaggaagagtccagcatctgaaggaatgaggggcacaggttgggaagtgcccgacttcctgccccacctggggaccccgccgcctttcagtggctgcgccctcctccgccccaaaccctcccagtctgggagcccagggtcccacgtggggatgacggggccgggctggtgcgtacctggcgggtaataccggagcaggaggctcttgagcttcattttcttgctctcttatccccggccgatgggcttcgtagccttggaaacggctaaacagcagcgggacgcgggtgcgcatgcgcaggttgcaccgcgcggtcctggggcgcagagctgggaggtctggctccgcgggcggttggtggcgacccggggctccggcgcgcggggggcgagtgttctggaggtgtctagagtgaaagaggtgagggcacctcgtgtcctcactaagggcgacctcagaggagctaggcatggccgggaaccgacggcctaggccacagcctgggctgcatgcacttttttagcacactgcgtttcccaaaaggaaggctgggaggaaaagcccatcgctaattactactctagggccccagcccgtgccctgtccttgtcctcccaaaagaaaaatgacctcaacttaatattttgcatttcctgactctgtgccctacattgctttaaacggtgtatgcacacatactcatacaatcctaacaaggtgtgagttatgcaccacttcttaaggatgaagtaactcagaattagagaaagtggagaactaccagaggtcgcagcctaaatggataggcgggaatggaaggcaggtgcgtcggaacctacaccagaaagcctacacctgtgctctcaacctgggcttaaaactctccaggccttcatgcggcttgtccaatttcttgccagcatcgttgtttgcctgccacgtttccatgagaaagcctgcggagagacagagtcagccaaccagcttgtcaatttcctttaaggaatttggcctcaactggaatttctcaaacttgagtcattcctgtgttatctgcgcaactatgagccatatctctccttacctcttccagagatccatacctaagttttaagttcttaaaatgtctctagattgactcacttattttacttcacttagtaaaatgtaatcttaaaaattacctttacttttacagttactggctgtttactgaaaattatatgaaatttaattccatctgtgaagtttttatttctaaatttaaaattatatgaaattttcagtaaacagccagtaactgtaaaagtaaaggcaattttttaaaggcgttgaattgcttgttaaaggctgagccatcgggaacttgtgcgtccatctcagggagacctggccttcagagatgacagcattcagccccaggaggagcctgcaattcgtcctcggtcttcccagcttgtgccccccatggggatacaggacagtaaggagccaaacagaacctgctgcctgaatgggggaacctgcatgctggggtccttttgtgcctgcctcccctccttctatggatggaactgtgagcacggtgtacgcaaagagaattgtgggtctgtgccccatgacacccggctgcccaagaagtgttccatgtgtaaatgctggcacgggcagctccgctgctttcctcaggcatttctacctggctgtgatggccttgtgatggatgagcacctcatggctcccaggactccagaactaccaccgtctgcatgcaccacttttatatgctagctggcatctgcctttctatacaaagttactattaattgacattgacctatttccagaaatatgattttagatatcattcaaatttcatgaccagtaaaggctgctgctataatgtcctaactgaaagatgatcatttgttagttgccttaaaataatgaatacatttccaaaatggtctctaacatttccttgtagtaccaaatacttcttacctctttgccctgccctccccacaaaaactacttcttttttcaaaagaaagtcagccatatctccattgtgcctaagtcatgtttcttgatacatgtaattctaccaaggtcttcttaaaagttcttttaaacaattgaatattatcttcagattattaaagaccaatcctaatgtggaccttaggatacagttttgagtagagttgataaaaatcaattaaaatagtctctttaaatggaaagaaagcctctttaaggggaggaaacagagggctgaaggaatggaagtt

SEQ ID NO: 2849 - DNA, 4001 bp, Homo sapiens
cgctgttgcctcagtatccacccatgtttcagggacttagggacagaatgaaacctgcccaaggcaggaaagatgttattacagaacatgacagtccaaagcacagcctcaaaatctgcaccaagatttctgggcagggaaaaagttatcatcaggaaggcacagacttgttagcgaaatgctctgacctagcccaagaaaccaggtgcttctctgctcctgacatcaggcttggccaggctgtcaagtgctccaaaaagtgctccaactttgatcctgcccatctagggcagaagctgaacggctcaacaatgatactactgagctgagagccttcagcaagtcttttccaagctgcagcctttgcttcttccctagtagagagtagctgctggtgataaccagtaaagaccttctaaaaccaggatttgaattctgttactactggagacactgagaatccggaacatggtcttttccacctcaggaaccatcaccataccccacctgaagagtagggcctcaggcagtttgagagtgaagttcccagggacttccagtctgagctgctgagcctgctttgatgagcagatgcccttccaacccccgctctgcatacctgtatttatgtcgcccacagttgcttgtttgtagtggccatagatgaacagcatctcctcatccgatggcttggtcttaaggtgcctaacctcctctgcagctttctcaaactcagcctaaatggaagggagaggagaggattgagggcctcctctgggtgggagagggtaagaatcctactgtggcctgatgacagcccagttacggggatggagaggtgggaaaggtggcacccttcgggcaatgcagcccctgaagtgtgtctgcccctccctgccccaacagggcagctagaaagattcagcaacacaagaaggggaagcccctccagttcactcattcaatcgaaaaccatatatccagagctctcacaaacgcaggcatcaggtctggaaatacagcagtgaagagggcaggccaagccttcgcccccagtgggggtcccctctgcgggagaagcagcgcggccaactgcctggccaccaccgggccaggcactagggagtggccggggctgcagcgaagccctggcctgaggacagacggggcacagtatgctggaaacagctgaaaggggacagggcatgagtgccgcggtgtcagcgccggagcccgttggtcccctccctccccctggggcccgcgcgttcaacaccgacctctgtcccagtgcccggattggcagaggcaggcgggaggagccagaggtcgccccacatagctcggtctcagacaagggtctacactggagagaagggaggggcccctgggtcacctctccccgggccgcgattctcctcgtcccgcactctgagcagccggccccgtacttcccctgacctccaagctctcggccacggactcctcgcttccccactccgccgcgacgtcctgccctgtgcttcgggatggggactgagtctcctcgctcctccaatccgtgcaaccccttcccccatctctccatcaagcaccctcgactcccacccctctcccgctacacagcgaagtccaccccatgggcaactttccggcagttgcggggtgggcagcagatttagaaatccccaaacggaaaatcccgctcacaaggctctgtccaacgaatcagggctaggcatgggcccatgagcaagtgaggggcacggaaggaaagagcccgagagcttctggcagccggctgagcccccaacgggcctcccgcccgctgcaccttcgcagcctggctgtgcacgcgctgtacctgagacatcctggccgacttgcaagaactccagggagacagcggaggaggcgaggaccaggaagcgatcgcccagattgcactggcaagcgcctttagaggcgcggtccactcgccccaaccctgctcgggcgagcaccggaaagccaatcagaagccagctatgcgctaggggcgtgcccagcccccgccgcggcgctagccccgcccgagcccacgtgggaccgcttgcgcaaacgccgggagtagccgaaggggacgccgggaacaggtggggacaacggaagtagggtgcttagttttgctgccgggagttggtcgagagttgggttcagtcctggcccgttgtggggacggcacgcgggggaaggggaggggacggagaccgaagaacggaggtccttatgtttcttttctttccttaaatcttgcccggcctgaagaggccggaagttgcatctctggacaagtaaactctgagacctgggaatggcgggcgggacccgctcctcccttggggtctagaggagacccccggagatggtccctgatgagcagcgtgatggtggaaagctggactggtctcccgaaaggcgaagccgaggcttcttcctctgaacttttggcacgttctttgacttgcttgtggccgtagtgtcaggcctgtattgcacatttatgtctgtggtgcatttctccatctggtgcgttaaaggcagggacggtgtcttatttgtcttgatttaacaaacttggacgggacgaagtgctcagcaaatatttgttaaatgaatggctgtttattgaactcctgttgggtaacttgcactgttctagaccttggcagacagcagtgaacaaagcgggtgaatccctgcaatcttggaacttacaagtagggacagtagtttatacaataagttaaatatagagtactttaggggcttagagagttggaagtttatagttttaaatggaggagggggagtattgagggaaggtgacatttgagaaagttcctcaaggaggggagggaagattccaagcagagaacaagtgtaaaggcgtgggcaaggaaccaggggaagagtagaaagatgaggctggagagttttggcggtggcagactggctaggtgatgcagaagttggccatcacagggactttgactgtcatgctgagtgagatgggaaatcgtaaaagggtttgaaaagaggatgaggagacggaggggaacgtctttgcgagattgttacacagcctaatctccatgggaactgaaaggagcagcacaggtgtctggaagtgttttaggatcgatgtttaagaagctaaaggaagacttctctggcagtggttgcaaaggagctgggtgaagagagggaaatgatggaaaattctctggagatcattaaaaaagcaaagtcattcctctctaattcataatttgtggcaagagggctggactacaaatctctgccctgcctacaccttccccctccccagggaaggtagacgctttcagacttaacttgctaacttaatgtaggtcacgttttatggaatgtttgggaagaaatgaagatgcaatagggaacaaatctagggttttcagtctgagcataattttgtttgagaaaggaaaaccaaacaaattaacaaaaatcttggagttaaatatggggaaagtacactgaagtgtaagaaatgcaggtttcttcgaaaatcacaattcagagctgctttttccatttgaggcctggatttgtttttgctctacttggtgcttacagcttccttgatggaaactcagattattgcttgtgtgggccagatttgcagtcaaatacatctcctagtcagcaggttttaagttagggtattgttgagattaggtactttgagaatgcagttatcacttctcaaagatcagttgcttttagttttttagtttttgttttttaattattttcgcgtgtgatgtggtctcactcttttacctaggctgtagttcagtggcacaatctcagctctctgcagccttgaactccaggcctcaagcgatcctcccaccttagcctcccgagtagctggaaatgtgggcacaaccaccatgcctggctaatttttttatttt

SEQ ID NO: 2850 - DNA, 4001 bp, Homo sapiens
tagctgggactacaggcatatgccaccatgcccagctaatttttgtatttttagtagagatggggtttcactacgttagccaggttggtctcaaactcctgacctcatgattcgcttgcttcggcctcccaaagtgctgggattacaggcatgagccatagcgcccagcctcagttaaaatttatatagtcatatgtggctactggctattatactaaactatcgtgtttggactatcatgttttataatcgtgtaatagggctgtatagtacagccctagagagagccgatgacacctctttgatcagtaagtgatagattcctatgccagtctatctagactcatgtgaaaatcggtaactctagtacgggcacaggccagtctctgtgaaaatactgtttgtcagaaaagcatcttggcacctctggcctcccccacttcacctttccttcccctccctggaaggacagagtttacgaactcactgtaaaactcaccttcgccataagaccttcttcaactaagtgctccatgtgaaccccagggtttgatatggtactgcctgtgatctgtcattctgggtactatttcctgcttccagctggttggcagccagcccacctgctccatcttccaccccagctactgcggaaatagggaccatgctcgccttcttcctcagcaggggcaggggagacctcccttctgtgctgccatgataaccctgagtccttgcacagaatgcactgcgctgttgcctcagtatccacccatgtttcagggacttagggacagaatgaaacctgcccaaggcaggaaagatgttattacagaacatgacagtccaaagcacagcctcaaaatctgcaccaagatttctgggcagggaaaaagttatcatcaggaaggcacagacttgttagcgaaatgctctgacctagcccaagaaaccaggtgcttctctgctcctgacatcaggcttggccaggctgtcaagtgctccaaaaagtgctccaactttgatcctgcccatctagggcagaagctgaacggctcaacaatgatactactgagctgagagccttcagcaagtcttttccaagctgcagcctttgcttcttccctagtagagagtagctgctggtgataaccagtaaagaccttctaaaaccaggatttgaattctgttactactggagacactgagaatccggaacatggtcttttccacctcaggaaccatcaccataccccacctgaagagtagggcctcaggcagtttgagagtgaagttcccagggacttccagtctgagctgctgagcctgctttgatgagcagatgcccttccaacccccgctctgcatacctgtatttatgtcgcccacagttgcttgtttgtagtggccatagatgaacagcatctcctcatccgatggcttggtcttaaggtgcctaacctcctctgcagctttctcaaactcagcctaaatggaagggagaggagaggattgagggcctcctctgggtgggagagggtaagaatcctactgtggcctgatgacagcccagttacggggatggagaggtgggaaaggtggcacccttcgggcaatgcagcccctgaagtgtgtctgcccctccctgccccaacagggcagctagaaagattcagcaacacaagaaggggaagcccctccagttcactcattcaatcgaaaaccatatatccagagctctcacaaacgcaggcatcaggtctggaaatacagcagtgaagagggcaggccaagccttcgcccccagtgggggtcccctctgcgggagaagcagcgcggccaactgcctggccaccaccgggccaggcactagggagtggccggggctgcagcgaagccctggcctgaggacagacggggcacagtatgctggaaacagctgaaaggggacagggcatgagtgccgcggtgtcagcgccggagcccgttggtcccctccctccccctggggcccgcgcgttcaacaccgacctctgtcccagtgcccggattggcagaggcaggcgggaggagccagaggtcgccccacatagctcggtctcagacaagggtctacactggagagaagggaggggcccctgggtcacctctccccgggccgcgattctcctcgtcccgcactctgagcagccggccccgtacttcccctgacctccaagctctcggccacggactcctcgcttccccactccgccgcgacgtcctgccctgtgcttcgggatggggactgagtctcctcgctcctccaatccgtgcaaccccttcccccatctctccatcaagcaccctcgactcccacccctctcccgctacacagcgaagtccaccccatgggcaactttccggcagttgcggggtgggcagcagatttagaaatccccaaacggaaaatcccgctcacaaggctctgtccaacgaatcagggctaggcatgggcccatgagcaagtgaggggcacggaaggaaagagcccgagagcttctggcagccggctgagcccccaacgggcctcccgcccgctgcaccttcgcagcctggctgtgcacgcgctgtacctgagacatcctggccgacttgcaagaactccagggagacagcggaggaggcgaggaccaggaagcgatcgcccagattgcactggcaagcgcctttagaggcgcggtccactcgccccaaccctgctcgggcgagcaccggaaagccaatcagaagccagctatgcgctaggggcgtgcccagcccccgccgcggcgctagccccgcccgagcccacgtgggaccgcttgcgcaaacgccgggagtagccgaaggggacgccgggaacaggtggggacaacggaagtagggtgcttagttttgctgccgggagttggtcgagagttgggttcagtcctggcccgttgtggggacggcacgcgggggaaggggaggggacggagaccgaagaacggaggtccttatgtttcttttctttccttaaatcttgcccggcctgaagaggccggaagttgcatctctggacaagtaaactctgagacctgggaatggcgggcgggacccgctcctcccttggggtctagaggagacccccggagatggtccctgatgagcagcgtgatggtggaaagctggactggtctcccgaaaggcgaagccgaggcttcttcctctgaacttttggcacgttctttgacttgcttgtggccgtagtgtcaggcctgtattgcacatttatgtctgtggtgcatttctccatctggtgcgttaaaggcagggacggtgtcttatttgtcttgatttaacaaacttggacgggacgaagtgctcagcaaatatttgttaaatgaatggctgtttattgaactcctgttgggtaacttgcactgttctagaccttggcagacagcagtgaacaaagcgggtgaatccctgcaatcttggaacttacaagtagggacagtagtttatacaataagttaaatatagagtactttaggggcttagagagttggaagtttatagttttaaatggaggagggggagtattgagggaaggtgacatttgagaaagttcctcaaggaggggagggaagattccaagcagagaacaagtgtaaaggcgtgggcaaggaaccaggggaagagtagaaagatgaggctggagagttttggcggtggcagactggctaggtgatgcagaagttggccatcacagggactttgactgtcatgctgagtgagatgggaaatcgtaaaagggtttgaaaagaggatgaggagacggaggggaacgtctttgcgagattgttacacagcctaatctccatgggaactgaaaggagcagcacaggtgtctggaagtgttttaggatcgatgtttaagaagctaaaggaagacttctctggcagtggttgcaaaggagctgggtgaagagagggaa

SEQ ID NO: 2851 - DNA, 4001 bp, Homo sapiens
acctctggcctcccccacttcacctttccttcccctccctggaaggacagagtttacgaactcactgtaaaactcaccttcgccataagaccttcttcaactaagtgctccatgtgaaccccagggtttgatatggtactgcctgtgatctgtcattctgggtactatttcctgcttccagctggttggcagccagcccacctgctccatcttccaccccagctactgcggaaatagggaccatgctcgccttcttcctcagcaggggcaggggagacctcccttctgtgctgccatgataaccctgagtccttgcacagaatgcactgcgctgttgcctcagtatccacccatgtttcagggacttagggacagaatgaaacctgcccaaggcaggaaagatgttattacagaacatgacagtccaaagcacagcctcaaaatctgcaccaagatttctgggcagggaaaaagttatcatcaggaaggcacagacttgttagcgaaatgctctgacctagcccaagaaaccaggtgcttctctgctcctgacatcaggcttggccaggctgtcaagtgctccaaaaagtgctccaactttgatcctgcccatctagggcagaagctgaacggctcaacaatgatactactgagctgagagccttcagcaagtcttttccaagctgcagcctttgcttcttccctagtagagagtagctgctggtgataaccagtaaagaccttctaaaaccaggatttgaattctgttactactggagacactgagaatccggaacatggtcttttccacctcaggaaccatcaccataccccacctgaagagtagggcctcaggcagtttgagagtgaagttcccagggacttccagtctgagctgctgagcctgctttgatgagcagatgcccttccaacccccgctctgcatacctgtatttatgtcgcccacagttgcttgtttgtagtggccatagatgaacagcatctcctcatccgatggcttggtcttaaggtgcctaacctcctctgcagctttctcaaactcagcctaaatggaagggagaggagaggattgagggcctcctctgggtgggagagggtaagaatcctactgtggcctgatgacagcccagttacggggatggagaggtgggaaaggtggcacccttcgggcaatgcagcccctgaagtgtgtctgcccctccctgccccaacagggcagctagaaagattcagcaacacaagaaggggaagcccctccagttcactcattcaatcgaaaaccatatatccagagctctcacaaacgcaggcatcaggtctggaaatacagcagtgaagagggcaggccaagccttcgcccccagtgggggtcccctctgcgggagaagcagcgcggccaactgcctggccaccaccgggccaggcactagggagtggccggggctgcagcgaagccctggcctgaggacagacggggcacagtatgctggaaacagctgaaaggggacagggcatgagtgccgcggtgtcagcgccggagcccgttggtcccctccctccccctggggcccgcgcgttcaacaccgacctctgtcccagtgcccggattggcagaggcaggcgggaggagccagaggtcgccccacatagctcggtctcagacaagggtctacactggagagaagggaggggcccctgggtcacctctccccgggccgcgattctcctcgtcccgcactctgagcagccggccccgtacttcccctgacctccaagctctcggccacggactcctcgcttccccactccgccgcgacgtcctgccctgtgcttcgggatggggactgagtctcctcgctcctccaatccgtgcaaccccttcccccatctctccatcaagcaccctcgactcccacccctctcccgctacacagcgaagtccaccccatgggcaactttccggcagttgcggggtgggcagcagatttagaaatccccaaacggaaaatcccgctcacaaggctctgtccaacgaatcagggctaggcatgggcccatgagcaagtgaggggcacggaaggaaagagcccgagagcttctggcagccggctgagcccccaacgggcctcccgcccgctgcaccttcgcagcctggctgtgcacgcgctgtacctgagacatcctggccgacttgcaagaactccagggagacagcggaggaggcgaggaccaggaagcgatcgcccagattgcactggcaagcgcctttagaggcgcggtccactcgccccaaccctgctcgggcgagcaccggaaagccaatcagaagccagctatgcgctaggggcgtgcccagcccccgccgcggcgctagccccgcccgagcccacgtgggaccgcttgcgcaaacgccgggagtagccgaaggggacgccgggaacaggtggggacaacggaagtagggtgcttagttttgctgccgggagttggtcgagagttgggttcagtcctggcccgttgtggggacggcacgcgggggaaggggaggggacggagaccgaagaacggaggtccttatgtttcttttctttccttaaatcttgcccggcctgaagaggccggaagttgcatctctggacaagtaaactctgagacctgggaatggcgggcgggacccgctcctcccttggggtctagaggagacccccggagatggtccctgatgagcagcgtgatggtggaaagctggactggtctcccgaaaggcgaagccgaggcttcttcctctgaacttttggcacgttctttgacttgcttgtggccgtagtgtcaggcctgtattgcacatttatgtctgtggtgcatttctccatctggtgcgttaaaggcagggacggtgtcttatttgtcttgatttaacaaacttggacgggacgaagtgctcagcaaatatttgttaaatgaatggctgtttattgaactcctgttgggtaacttgcactgttctagaccttggcagacagcagtgaacaaagcgggtgaatccctgcaatcttggaacttacaagtagggacagtagtttatacaataagttaaatatagagtactttaggggcttagagagttggaagtttatagttttaaatggaggagggggagtattgagggaaggtgacatttgagaaagttcctcaaggaggggagggaagattccaagcagagaacaagtgtaaaggcgtgggcaaggaaccaggggaagagtagaaagatgaggctggagagttttggcggtggcagactggctaggtgatgcagaagttggccatcacagggactttgactgtcatgctgagtgagatgggaaatcgtaaaagggtttgaaaagaggatgaggagacggaggggaacgtctttgcgagattgttacacagcctaatctccatgggaactgaaaggagcagcacaggtgtctggaagtgttttaggatcgatgtttaagaagctaaaggaagacttctctggcagtggttgcaaaggagctgggtgaagagagggaaatgatggaaaattctctggagatcattaaaaaagcaaagtcattcctctctaattcataatttgtggcaagagggctggactacaaatctctgccctgcctacaccttccccctccccagggaaggtagacgctttcagacttaacttgctaacttaatgtaggtcacgttttatggaatgtttgggaagaaatgaagatgcaatagggaacaaatctagggttttcagtctgagcataattttgtttgagaaaggaaaaccaaacaaattaacaaaaatcttggagttaaatatggggaaagtacactgaagtgtaagaaatgcaggtttcttcgaaaatcacaattcagagctgctttttccatttgaggcctggatttgtttttgctctacttggtgcttacagcttccttgatggaaa

SEQ ID NO: 2852 - DNA, 4001 bp, Homo sapiens
tccatcttccaccccagctactgcggaaatagggaccatgctcgccttcttcctcagcaggggcaggggagacctcccttctgtgctgccatgataaccctgagtccttgcacagaatgcactgcgctgttgcctcagtatccacccatgtttcagggacttagggacagaatgaaacctgcccaaggcaggaaagatgttattacagaacatgacagtccaaagcacagcctcaaaatctgcaccaagatttctgggcagggaaaaagttatcatcaggaaggcacagacttgttagcgaaatgctctgacctagcccaagaaaccaggtgcttctctgctcctgacatcaggcttggccaggctgtcaagtgctccaaaaagtgctccaactttgatcctgcccatctagggcagaagctgaacggctcaacaatgatactactgagctgagagccttcagcaagtcttttccaagctgcagcctttgcttcttccctagtagagagtagctgctggtgataaccagtaaagaccttctaaaaccaggatttgaattctgttactactggagacactgagaatccggaacatggtcttttccacctcaggaaccatcaccataccccacctgaagagtagggcctcaggcagtttgagagtgaagttcccagggacttccagtctgagctgctgagcctgctttgatgagcagatgcccttccaacccccgctctgcatacctgtatttatgtcgcccacagttgcttgtttgtagtggccatagatgaacagcatctcctcatccgatggcttggtcttaaggtgcctaacctcctctgcagctttctcaaactcagcctaaatggaagggagaggagaggattgagggcctcctctgggtgggagagggtaagaatcctactgtggcctgatgacagcccagttacggggatggagaggtgggaaaggtggcacccttcgggcaatgcagcccctgaagtgtgtctgcccctccctgccccaacagggcagctagaaagattcagcaacacaagaaggggaagcccctccagttcactcattcaatcgaaaaccatatatccagagctctcacaaacgcaggcatcaggtctggaaatacagcagtgaagagggcaggccaagccttcgcccccagtgggggtcccctctgcgggagaagcagcgcggccaactgcctggccaccaccgggccaggcactagggagtggccggggctgcagcgaagccctggcctgaggacagacggggcacagtatgctggaaacagctgaaaggggacagggcatgagtgccgcggtgtcagcgccggagcccgttggtcccctccctccccctggggcccgcgcgttcaacaccgacctctgtcccagtgcccggattggcagaggcaggcgggaggagccagaggtcgccccacatagctcggtctcagacaagggtctacactggagagaagggaggggcccctgggtcacctctccccgggccgcgattctcctcgtcccgcactctgagcagccggccccgtacttcccctgacctccaagctctcggccacggactcctcgcttccccactccgccgcgacgtcctgccctgtgcttcgggatggggactgagtctcctcgctcctccaatccgtgcaaccccttcccccatctctccatcaagcaccctcgactcccacccctctcccgctacacagcgaagtccaccccatgggcaactttccggcagttgcggggtgggcagcagatttagaaatccccaaacggaaaatcccgctcacaaggctctgtccaacgaatcagggctaggcatgggcccatgagcaagtgaggggcacggaaggaaagagcccgagagcttctggcagccggctgagcccccaacgggcctcccgcccgctgcaccttcgcagcctggctgtgcacgcgctgtacctgagacatcctggccgacttgcaagaactccagggagacagcggaggaggcgaggaccaggaagcgatcgcccagattgcactggcaagcgcctttagaggcgcggtccactcgccccaaccctgctcgggcgagcaccggaaagccaatcagaagccagctatgcgctaggggcgtgcccagcccccgccgcggcgctagccccgcccgagcccacgtgggaccgcttgcgcaaacgccgggagtagccgaaggggacgccgggaacaggtggggacaacggaagtagggtgcttagttttgctgccgggagttggtcgagagttgggttcagtcctggcccgttgtggggacggcacgcgggggaaggggaggggacggagaccgaagaacggaggtccttatgtttcttttctttccttaaatcttgcccggcctgaagaggccggaagttgcatctctggacaagtaaactctgagacctgggaatggcgggcgggacccgctcctcccttggggtctagaggagacccccggagatggtccctgatgagcagcgtgatggtggaaagctggactggtctcccgaaaggcgaagccgaggcttcttcctctgaacttttggcacgttctttgacttgcttgtggccgtagtgtcaggcctgtattgcacatttatgtctgtggtgcatttctccatctggtgcgttaaaggcagggacggtgtcttatttgtcttgatttaacaaacttggacgggacgaagtgctcagcaaatatttgttaaatgaatggctgtttattgaactcctgttgggtaacttgcactgttctagaccttggcagacagcagtgaacaaagcgggtgaatccctgcaatcttggaacttacaagtagggacagtagtttatacaataagttaaatatagagtactttaggggcttagagagttggaagtttatagttttaaatggaggagggggagtattgagggaaggtgacatttgagaaagttcctcaaggaggggagggaagattccaagcagagaacaagtgtaaaggcgtgggcaaggaaccaggggaagagtagaaagatgaggctggagagttttggcggtggcagactggctaggtgatgcagaagttggccatcacagggactttgactgtcatgctgagtgagatgggaaatcgtaaaagggtttgaaaagaggatgaggagacggaggggaacgtctttgcgagattgttacacagcctaatctccatgggaactgaaaggagcagcacaggtgtctggaagtgttttaggatcgatgtttaagaagctaaaggaagacttctctggcagtggttgcaaaggagctgggtgaagagagggaaatgatggaaaattctctggagatcattaaaaaagcaaagtcattcctctctaattcataatttgtggcaagagggctggactacaaatctctgccctgcctacaccttccccctccccagggaaggtagacgctttcagacttaacttgctaacttaatgtaggtcacgttttatggaatgtttgggaagaaatgaagatgcaatagggaacaaatctagggttttcagtctgagcataattttgtttgagaaaggaaaaccaaacaaattaacaaaaatcttggagttaaatatggggaaagtacactgaagtgtaagaaatgcaggtttcttcgaaaatcacaattcagagctgctttttccatttgaggcctggatttgtttttgctctacttggtgcttacagcttccttgatggaaactcagattattgcttgtgtgggccagatttgcagtcaaatacatctcctagtcagcaggttttaagttagggtattgttgagattaggtactttgagaatgcagttatcacttctcaaagatcagttgcttttagttttttagtttttgttttttaattattttcgcgtgtgatgtggtctcactcttttacctaggctgtagtt

SEQ ID NO: 2853 - DNA, 4001 bp, Homo sapiens
aaaaggtagaaacaccaatgtctaacaactgataaacggatacgtaaaatgtggtaattgatacaatgcaatattattcaactttataaaggaattctgatgcatgtgacaacatggatgaaccttgaaaacacgcaaagtgaaaaagccagttacaaaagaccatatattatatgattccatttatatgaaaagtacagaataggtgaatctacagacagaaaacagactagtggttgcttagggctgagggtaatggtggtactgaggtgactgcttaaaggtacatggttctgttttgaagtgatgaaaatgctctaaaattaactgtggtagtgattacatgtatctgtgaatgcattaaatattattgaactgtacactttaaatgggtaaatatatggtatgtgaattatatcctaataaagcctataaaaaaagctcatttttttaaaaatgcaaactgatgtatgtttagaatatgctttaaaagaggtcatgcaaaaggaaaagtgggttagataaagcaaatgtggcaaatcttgatagtttttgaatctgggtaatgagtatatggggatgcattgtggctttccttcccccctcatgttggacagttgtggatgaggctgactgttaaacattttggatctctaaatactaggcttttgtttgaaaaaatttctctaaaaaaaaaaaaaaaaggcaagtacttccaaaacacaatccatcaattctccaaagcagcatctaattatttgattggcaactggatttcttgactgtggtataagtagactaaacactaaacagtactctgaacaatctgtggttttgcctgcactgtagttttgctttaagttggtatttacaaaaatgacacctgcaactttagatttaacaagattttaaaattacatgcattttttactgcctagtcttatttcggacccatttttttcattctatttcactaggcactaatgtaggcatgtggttctatacaaattatagttaagatcaacagtgaggtgaattacagcaaaattatcaataaaaagttacctgctgacacagcgccgataattgtcaaaatatattcttcctctctcataggctataggtgacctggaatgagttgtccagacattcttaaatttagtactttcctaaaagacataaagaatttccgttcaggaaagaactcttaggctttaagttagattttaaattttcaaagcaacataatgtcacctatattattttaaaactttttgcatccttcctccactctgccctcatgttttggcttaatgaggtgaccaacttttagaataattgtttccaggtaagacataagaagcgtaaaactaaaagcagctggtggccctattaccacctatcccagattccgggcttgtatcctcctccccatcacatgtgaccctataaagggaggccccagcgcgttaaaaccgcatccccgcaggaggctcggccgccgcgcgcccgcggccctccgtcccgccccggccggctggcggtcacctggcacaccagcgcccgcaggatgcccaggttggtcctctgcaccacgcctgcgtcgcgcgagaagcagcccagcgcccggcgactcagccggctgcacacgttgggcttccgggtcgggcccatggaggcgcgggccgggccctgggtaggctgggccgccgagtggcgcgccccacactcccgtgctgggcagccgccgctgccttcgaatttcgaggcccagactttcccggcggggcccagggaaagctgacacggggaggcgggcagggagcacccgacggcggggcgagggaaagcagagccgcttgcaccgccagagcgcggagagaagggaagaagcactcccttttcgatctgccccaggctctctggccgctgacagtgcgacgctccggtaccgcgcggccggccggagccgctctctcaccgggaaatgtagttcctagtgcctcgtgaggcagcccggcttctcccaggaactacaattcccgtcaggcggcggggagcgagggcttgcccggccctgcctctgcctgccgcggccccgcctcctccggcccgcggaggctgcgctgtcttgcgggcgcgcttctctgtgctgcgagtggctagctgggcagagccctgggggcgcggtgctgccgcctccaggtctccgccccgtgtgtgcgccctgcacttagggatccctccctcactgccccggtactcacaagcttctcggccccgaccttcgccctgggaggttctggccaggtgccgggaggggcgctgtgtcgagggcgatccccccaaagcagcgtcccgtgctaaaggtacgccccgcggctttcccttcagccgcatgttggctgagggggacggtaaactgtgcttttgtattaggaagatgctggcttcccattcactcttagtttcaccctccaaactgggattgagttactctttcccggaggcttgtccttgggtggcctgcggggacactgactggttttgcgataattgcttcatttcatttcctctcgcctccattcttttttctttatagggaataaaatatgaaatgcttacattcttattggacggcctaagatattcctcgtcgatgtctctaagtaaaagatatactttgttaactagccctgcctgtatgttcaaagttcccagcacactaaactttcagcaagcttgcaccacatgtgtcccaccgccatgctctaagtcccttaagggtggggccgctgtatctcccacgtggacttgggcatgctacctcttgttcataggtgctcaaagaaagccagcgatcgcacctgactggcagagcaaaaagtacagtacagcaggtccttgaatcgcattttttcgttcagtgtcattttgtataacttgatgagaaaaaataataatttcctaccggggctactgtttgtgtggatcttgccccttctccccacgtctgcatgggttttcaccaggtaccccagggtactgcctcccacatctcagtgcaggctggatgaattggccttgtctgtgtttcctgtctgagtgtgagtgtgagtgctccctgcgatggaatgtcgtcgtgtccaagggttggttcccaccttgcaccctgagctgaggggataggcttcagccaccctcgaccctgaactggaataattaggtaaataactatcttacttgtttttattaatcttccttaaatgtatgtatagctcccatttatttcaatgtttaatattagaagtgttttggtttgtatttaggagtttggtgatgtttttgtgaccagaaatatgttataggaacttaacttttgtttatatcaattggcctatggtaaaaatggttttgttatatgtcattttgcttacagtcagtttccaaaaatctgttgatgacattaagtgagtacttacagtactgggtgagtgtgttgggtcacagtttaagtgtttagtaaacattggccatatctctttttaaccctgctgaatttccttcagggctcgagcttttgctgatttttcatgacttatttacagcatacggtagagtgctttgtatatttttagagagtgctacaatagttaatttggtaattcatgaatgcagctgtcactgagaaaactggaacccagaaaagataactgggttttctttggcttaaatgaaattcaaatcatttctgaattgaattcatcaactctctcatttctctttcctctttgcccccacttgtttgtcttctttcttgtggcctttatttcaccaccaagtcgtcaccaagggagagtcatcctggatgccttgctgttcctcacccacaaccaagtcctttagactcttatccatctcatcttcatttcacctaagtaatttagggcctcaccattttttatcacattattaagtagtctcttaatttctgccttact

SEQ ID NO: 2854 - DNA, 4001 bp, Homo sapiens
taaaacacaggccaattttacaagaaaatgtcttgggataaaattaaatacttttcattatatatgtatcgaaagggactttaaaggcagtttttgtagagatatattctttaattgtaaatcagcactgaacactggatcctgggtaggatgtcagttctagatattcacaccatctgactagcttggaaaaaataatcacaaatcacatggctataaaggaatataattttgtccatgaattctaatacataacaggattatcatagtaataaatttcaatctgaaatatgctaatccagattctacctcttagcaactgtgatgcctgtgacttacgacttttcttcagaaacaactgaatggtaaattcacatctttgcaaatgccactaagaatttggaaccatacaccagccctcatactaaatcctactactttttcaaaaaacaacaaacaaaactcaagctgctgatttaattcagagcatttttgaacggagagcatttgaaagaagaaaatggaaattctctctggggaatctcacttttatctcagccctgaagaatgtccccacacaaagctatacaaaaggagtagttcacagtcaaaaaataagtaaacctacaaggaaacagagaatcaggagagaaaagcagctgagatcacagaaagcagacacaggctgcaataatgggattacagacacaaaccgtgggagggcaatagtttaattaaaggcaagcttgaaaatgcacgcaggaccaagtgatggacacagagtgagaggggtcaccctgagcgatttcaaatgggaactgcccaacccgccccattcccaggccctgccccccacgcccctcccccccacgcccctcccccctccccctcccctacactcctccccacgccccccacgcccctctccacacccctcccccatgcccctctccacacccctcccccacgcccctctccacacccctcccccacgccccccacgcccctctccacacccctcccccatgccctcctccacacccgtttctgccccatgcccctcccccacgcccctcccccctccccctcccctacactcctccccacgccccccacgcccctctccacacccctcccccatgcccctctccacacccctcccccacgcccctctccacacccctcccccacgccccccacgcccctctccacacccctcccccacgccctcctccacacccctgtttctgccccacgcccctcccccacgccctcctggccgtctctggggcggtcctgaatcgctgccggccagggcccgccctgccccataggaagggaccctgggggcggggctgcctcggcttcgcccccaggaaaccacgtggcctggggcggcccgacgccggctgcgctggatccacgccgaaagatgggcgcccgagccgggagggaagcctggggaggacacctggggggcacggccctgaccacgctcagacccaagagggcggggaggggcgcagggcgcgtggggggcgcgggcgcacttactcgagctccttgaagcgctcgcggcccgccgccacgtacttgccgcccgcctgcagcgcgtccagccccagcacccggtgcccacgcgtgggcgtgaagaggcggcgcacgccgaacgggacgtccacctgctccgtgagctgctccagcagcgcctcgaaggtggccgcgcggcgccgcgacagcacgaacttcttgcccacgtagaacgggtccccgttgcggtacaccacgatggtcttggcgggcgtggtgtccaccggcgcggagggcccgcgggttcccatagccgcgccccgctcctcgctcgccggggccgagaggctgcggcagcgcgggcagcgacgcctgcagagccgcgcccaggcccgggcaccgccgacgggaggtccgctccagccgctggcgcaggacggggacgggacggggacgggacgggggctggacggggacgggacggggctgccaggcgggcggaggctgcgtgttgacgcgaccctgggcgattgtgaccgcctggccgccagggcgaggggctcggggccggggcaggagacggggcgacggggaacccgggcaggtgagcaggcggcacggggcagggacaggtgattgggtaatggggagcccaagcaggtgaggcgcggcacagggcggagacaggtgagggggcaacggggagcccgggcaggtgaggggcgtggcggcagagctcaggaaaagaggaggaggaggcggctagcatgattgtgctgagcgccccgggacgcccaccgtgcctcctccccctacactcgccgccttcctctgtagaagcggtagagaggagggttagggagggaccaggaccatcttgacaatcaacattggatgggtgctgggatctgcttcacattttttgagcctctgtttctttgatcttaggttgaatttgaccggttcagccccagtgtcttccaggactcctggcccagagtggggaatttgagcttttccaccagaggaggaggtgtgcagagccactgggaggccgtgaggaaccgcgctatagccgctggtgtgcggtgtcaggcgcgtgccattcagaacgcatcctcattggggaatgattcaaagggagagggggtctttggaagaatcgttcctactctgggtaaagataggccagtccccttgagtgattctagacagtcagtaggctacatgttacggctggaagtccacaccgaaggtacagatattgatattatgagtattaatatcttataatgttcaaaaaaagtagttccgtagagaccaccagtcacagccatagccagtatgtaagctactaaatgcctcatagcaacattaaatacagagatcaatttgtgagacgaccactttattaaatcaccaggtgttcaaaacatttgaaaagaagactatgactgggaaattactgctgtgtgtccgacaccggggctttgtgtgtgttaagggtttgctttgaagctcaccgagaacttcaacatgggcttctcccggggcctcaggaggcagatggagctggggaagccccggagccgaaggcggctcactcccccgtcggggacgatggtgagcctggcgtgagtgatgacatcttggagctctagggtcaggctatcgaacagatgactttggttgggagacaactgaaaagcaagcagatgcagaggtcctagtctgttaacaggacatgtgtggccgaatgagcccacggcccgggcaaacctttggcttagacttaaccgaaggggctttaaaataagttattaattgatgataattgggctttccatgaaaatctgctagtagggataggatgcccaaataatacatgaataagcaggccccaataaacaattgatgggcaacctaaatgcccatcagttgtttctaatagttgattatacataagcaaattgataagaaaatgaaggaagagaccatcttggtctctcccggagattatttcctatctttacatgggagcagctctcacctctagcctgaccctctttctaaatcaaagaagacacttgtggaatatctcagagcatccatcctgcaggtggacacgccattagagctttaaatgtgctagtcgccccttctacaaagttaaacatgatgcagagacatgtttccacgtatgtattctgaacatttaacaattttgttctaataaaatttggaaatacaaaagtggagagaaatagagcctttcttcttaaagtttgcagataggggttttaaacctcattcgttttaccattaaactgagcagaaactttggagcgtatcctaatccttcaaaagagaatcttagggaaatagcacagtctgagtgctggatccgaataacatgccacacgaaccttggtcactggaagcagtggtttccacttgtgggccgggagaat

SEQ ID NO: 2855 - DNA, 4001 bp, Homo sapiens
attttcttaaaccccatttacagaattgggtggacccccaaattcccctttgaaaaaatgccaatgatattctaagatttctccaaattcctctggaatctgctagaatttttaagtttatattttttataacaaatcagaattcattgaccagtctgtgaatgtcaccacatggctgctttctcaggagcactgtctccttaattctcttctcaggaggggaaataagatcaagcaaataactcagtttagaccaggctccccacaacccaatgccctgactcaggagtctgagctgggaagacaggcaattcagtgggtgatcctacagaatcctgtttccccttccactgtcacttgtctcctctgtgtttcaaatggttttcttaggcctcaccctttcagaggcacacaattgtgcctccttccagacccttaagtcaccacctctccttcctgatctgactcctcccacccccatccacaaacccaccatgaaaccccagatgcttcaccacagcccattcaaccattcaactccccttctacctggcctgagtcttgtttggtcaactctctatccccaagctctggagattcttctccatgctatgttgctataaaaaggaaaacacaggccaagtaaattgggtggatctacccctcgctctgtccccaagactctgctcagtggtccaaatgaatggtttatcactccacagatgggcaaggcaaaacaacagactaagacactgtccttgggcagctcttagcttcggcacacccatgatgactgaacacaatagaaaattaggtcccaaataggcccatggtttagaagaaaatcacacttaggtcatttttagcaacagcaactccatgaaccaggggccttgcagcaaacagatgaatgaggcatgatgaagtgataccatcatcctaaagactctatgggagacccttctgatactctcatttataatagcttcagaagggagccctggcagagccagggaagagccaggacacctcccagcctatcactgcctaattcccttccccaaacagctcatccaggaaggtgaggatgtagttcccagaggctccaggaccccaaatcacacctggaacagcaggatggctctcatggacctgacaataaaaggaattgccagtgatataaaaggctgaacccaaagtcagagactcccccactttccaaccccaataagcctctcagaaccagggggccacaacagtagctacagattctatctcagaagagaaagaaagcaagtaacaaataacaaagcagctcttaagaaaggcttcactgtaagacctctctgagccatcatccccattctgagtccccaggatagtctggaccccctcaggagcccctggtatgagggccaattagagtcagaggtcaggccttgctagtccccatttagggatcaactctgtaaagggaagcctgtccagccttacaccaccagggcttcgagggctccttagaaaacacagtctgagtgccctcagctgagctccagcctatctccccagcccccacagcaatgatgtccacaggcagccaggccttccccagcagccctccagggccatcccagattagggccacttacccggctgtacacgtgcctcttgctctgtgccatgttgctcacccggcctctaccccctcccccagctggccaaagacagagagaaaaggtagaaacctaggcaggagggtcagggcgctgggccctcatagagggacacaggagtcgtcaggcacagccctccccagtccatgggcctcactcggtggcctacacgggtaggggtgggggcagtgatgggggctgaggagcaagtcccctctgctgcctgaggattcctgaacccagagacacagaatcctgcttgccagctgatgagtctcactctgcgctagtgctgctctagacttgtcaggaaccgtgctagcctctgggtcctagtgcccccctgcttcacgtgggccagaaactaagggctgggcatacgccacagaccctcagcactcaactcttgaatacactgtcctagggctggaagcagtcttgacacgtcctcctagtctgtacccactcaccatcactgttcccctctcccccaggatgtaaggcctcagcaggcccataagcatcaagtgacacttcaaagcgatcagctgcctagagcctccacacagccaaaataagggtctctcatctacctttctggtgctcttctctctccctcccctctctaaactctggactcagggtccaaattcatgtgagtagggcctggatttcaatctcacactgagccagaggaggcaggccctgcccaggaggcagcaagagaagggcagtaatgaaggcaacttcacacacatagcaaagcaagccaagtaccctagccccctcccacaaggctggcaaaggttgccatagtcacccttcaccctttatggttgttataaggggccaggttgtaaaacacaagagtatcagactcaactggattactaaaggcagtagtcaaaagcagagagcccttctttcttcttgtagcacaaggcccagtccacctcagtcatctgccccttgtactcttggccttgcctcctagcatctcagacccaatgaaatggtttattttctacgcttttgtatttcacaaaaattcttcagtaaccatgtattacttttataattagaattgtttaatttaatgagattatgcattctaatgagaggtctccaagggactatgttaccacactgctttcattcactggcccatctatcatgggctagaaaccaaaagaccagggtccctgcccctacacagccaacaaggttggcctggggtctgacctatggctccactgagtatggtatggatctagttcccttgggcctagggacgcctgtcttttctgcactgggcttacttcactggcagaacagtgactttaccccgctctaccctcttaagataggccaggtagcccaacaggagaatgacagccaacattcagaaatatggccccaaaacacaattccaaatcttcagtcctggccagaccccctaggaaataatctctctcctccctgcaaaatctccatgtcgccccctcctttccctattcgccattacacaggtgggcagggccaggcacatccttgcagcctggacctcacatgttcggagcactttacagtctataggacaccttaaaaaaagacattttatagaaccatggttgagtactggttctagactcaggctactttcctggctttatcacttggtagctacataaacttggtctagttacttaacatctctatgcctcaatttcctcatccgtcatagggaagtaacaaagaacatatctcagagaggtatcgtgaggattagctgagataatccaaacaaagcatccaggacaccgcctggtatttaataagtgctaaataaaagttagctaagaacaatgtcatcatatatagacattacaataaccccattgagaggttggccagggatgatgctgacaaggcaactgagtctttgagaactgagcaacttccctgaagacacacagactgtgaggagtagagccaaaactggaaacaacctgacccagagccctctgtgctttctactacccctcaccattaccacagacatatctaggcttccaaggccctgctcttcctgtaggccacactgccttaaaaaattcaaaagagctcagatctaaaaatagcctcacaactcactaaccacataggtatcaatagtcccctaatttcttggaatctgtttattttcctatgaaatgaaaataatatctgccatatctacgtcagtatcatgaggttcaaaaaagctaaagcatatacaggtaccttgtaggccaggtgtggtggctcatgcctgtaatcccaacactt

SEQ ID NO: 2856 - DNA, 4001 bp, Homo sapiens
cctaaaagccaaaagccattttccccaggaggtgcctgccagcactgcgaacccccaccctttcctctgaagagaacccaggatacactatgacgaactttcacttgctcatacacgtgccctcatacatccacatgcctgaaacgtgtgtgtacactcagcagtggctcacacaggggcctgttttctcaccttgggtcgccgagttgtggtctggacaggcaacaggagccagaagagaagtagtcaggaaagaaaggacaatggcagaaagacagagagcaaaagggacagcaatgagagcagaagaaataacaggaatggggctacagttagccaccctcccccccatcccatccccttctcccttcagtgaatcactgtattcctacttcaggaacccagaattcctgttccccttggttcctgctcccacttttgtccaatccttgcaggcctcaccccttcagacaccccagaaatcccagaagtccatctctaggctgagccatagaacaaggaagcagctagtgagaaggtcccatgagaccagtcctcctgctaacgatctctccaactccagtccagagccagaggccccgcccagccaccactcccaaggactttcccaggtcagcctcttccttcaagtgctagactctacacagaactccctagaaaccccatgtgacgagcgtaatctaagcccagaaatgggagatcaggtccctagggtagaacaatgctgctgtcctccctcccccaacccccttccccagaaccagatcctgcagcagtcccgatcactagggaagagggctcaggtgtcaggaccatgaatattgcattagcagaagcccagagctcagcaaagtaaccccacccagctgtaggaaaggaggtgggggtgggcagcagcacagagaaactacagccccttcaggttactgcaaaatggtaagtggacaattaactccaatttccaaatagtgttcttgctacccagtatctcactgctctagccaagacaagatttggcttgggccctatttccagcatacactgaggccaattcccacctcttctaccctgggctaagcttccacagctgtgggtcaaagactattctaggttccccatcccaccctggtaaagtgccctgatacaaatcctggggattgggggatactgggagaacaaccaagaggtattctagcaaaggttgggtgaggcaggcaggcctgctagaggcactgagatacctgggcctgcttccctaggttctaccacaggaaaccctcccagatccggtatgcggtagaggctgcctgaagcccaagcctgtgaggccactgggtgttaaggcctggaacacaggcagagccaaaagcaggcaaggcagtaagcaaatgcccagggtgtggggcatagtggtgacacacacctctccctaacccaccttcgtcctcacccgcctccccgaccaggtagacagatgaagtcaatcagcccccacccccaccccagcagcctgctgccaccattgccctggcaacccagcagcaggacgagagcaagcaagagtacctttcgggctgtcggtgcctgtctcatcattgcagaaaaccaaagaaagcaaggagaggaaagaggagggacagaggaggatagacaaacacacggaggaaggacagacgaagggagggagggcaagagaccgaacagagggaaaggcggcggagacaggagattagtgcatcaaatcccaacaatgcagtctcagcctcccggtgcggcagcttcccagcctgcaaacggccgccgctctgacacagaggcccccgcagacgtgcagctggatcgccaggctccggcaggcaccggagcggtgcctggcccagttcaccagcttaggctgatggcagcctcagtggccgcagcaccagctccacctgacgtcatgcacccaccctcctctgctccatgggggtggagccactgctcctcagtcacctagcaaccatctagggctttgctggctcctcctcctcatgacagtcatgcgcagagcttgtcctgcttctttctccaaagaacaggttttggctcctctcttccctcccttgcccacccccaagagcgtgctccaaaaaactgggccaggggctatcccagaaatggcattctatggggccagggcatcactggggagggacacatggcctctctgctccagcagtctctctcatcatactcacattctgcccccgccacccacctacccacagccccattaactccacttctgtctcttatacaacctggcaacacccttacagtctctcatctggcacacacatctagagtgcccctccagcaacaggcttcagctctgaggagcacacacagtgactacgaaaccctgcggaacacgcatctgggtagcagcagctctaatgactgttgggctcctctccaaccatcccctggttgtagacaggttaaagcctgtctctaaagggtttccaaaaagaactaggcactttgcagagacatctgagttttcttctgccttccccttcaaagcatattcttttgctctggaaccagctccctgatccacatgggtgagagcaggggccctctgctttgaaaaataactactggagaggaagactggggtgctccggggtgggggcactcaactgtctgattgacactttccaacgtgagtgcagaagggcagcatgggtggcctaggctgggctttttcacatttccccaggcagctgccaaagcccctggatttgggcattgctcaggccccagcccagggtcagaccaggctggggccagaactccataaatatcagaccatagtttcatgctcttctctattcaaggcctgaggtgaaatggaagccccaaccaggagacaataatcaaaggacaaagccaagtttctatgactctgaaatgggcccaggatccttcacagcattattttccttatatccccattccctaccaaagcaagtaccagcatgtggtctctaccatggcaagactccaaaggacccatcaccaaccaggagctggtttccccctggaaaaggagatgttttcctcttccctcccacagccccaatccagcagctctccatgcaatgtcagaatggcctgagataggctgacgacaaggaaatcacagaattgtacatacagcacagtacatacaggccagacaggcacatgcaggtcaaaaacagcttgggcagaggcccaaggcaggggctggtttgaggaagtggtcatggcagtgatctaagagtttaaagagtctatggtgggaaggggaggggacgtgacatgattgagccccactccaatgatggttgatgaaaggctgcaaggggtaggaggtaggcctcaggcacaccaccagaggaaggagacagggacagactgatggggcagagttgtggggtgtggggatatttatggctgtgcccatccacaggcaggcacatgaaggctcttaggttttccaacttgggactgttcttcctaggctctgttccctgacctcccatcttcctgcaaaaccccctcacttggtaccttcctcagccccattcccccagtctatccttccacagtcgtccaagctcgggctaagtgagaacacactgtaacccagtaaatgatctatttcacactgctgctatttacagtcaaatgcttatagtttttgattggggaatctttgacttggagtcctggggcagagagaatcatccctaatgagtgctacctgggtatggacactgagcctgatgttcttgcacccttcaaaggaactctgaaagccaaggccaccatttcctctggccatcccagcccaaggtcacacacacatgcatgcagcagcccagggacatgcaggacagctggggaaggggctcatggcccccatccacccaggcacaaatagtaaacac

SEQ ID NO: 2857 - DNA, 4001 bp, Homo sapiens
acttttctagtcttgcaagccacacccatccttcaaagtccagccaaagccccactacactccacagagaacaaagacaaatttaagaaagggatttcttaaacataatggaagaattaaatacaattccgcttagaaaaatcatagtaggcacagctgtcatctaatacttggagtcaacattttaggaagacgggtaacacttctttcctgtttgattgttaagagataatctaggaccaacagcatggaagttgcagagatgtatttcagcaacatgaagaacttccttcttgagctattccaagaataaaatgggatgccctatatgcagataattgcccattattttaaatgttcaagccaagctgcaaaatttgccaaattggcaagaatatttcagatagaattcaacactacagggataactcgactagactcacagaattttaaatctgaaagaaatatttgagatcttgtagtccagactcctaccttataggcctggacagataaagtgactctctcaaggcagcacatctgttctggaaaacatggtctctaactttcaatccagtgatctatacttttgctactcagattgtgttccatgggccagcagcattagcatcacctgggaacttgttagaaatgcagaaccaatcagaatctgtactgtaacgagatcgcattacatgtgcacgccattaaaactcaaagcgcactgacccatactgccccttctaaatcctgaatttctaattctggaactccaattcccaaacggttcccacatgttagccagaggcatcacccaagaataacagtatatcctagtaaaattttcaaaattctacataccatacccccagttggagattcatggtaaatattattagcatattaaaggctctgcaatattctgtagtaaagtttaaccacgaattttccaacagctttcgaaaacaaaatgccttttttaaaaataaagttatcattatctcttttaacatctcatagcttaggctttggcagtacattaagtaaaggatgtcaatctctacctcctagctcttcgcctctcggtaccttaagtatacctgagtagccagtggtcaacatgggtttgctgctctcctcactgcaataaatgacggtaagttttcaaatccctgcctctgaaacagcagagatccttatctgtgtgatttagctgtggttctgtctaaagacaagggatgcgcaagatgacctcaaggatcatcttgccagctaaggcggaccccaggagtaggatcacacacacaagtcatatccagactcccatgctgtgagtcctttacgatttttctccccgtttgagacgaatttctcaaccatgtgcccacaggaaacctgtagctcagtatggattcaggggcgcctcagacgctcgcaggaacggaggggagacccttgcagttctggaggaactctaaggcgcagtcactctgatcccaggagaacaatgctaggctgaagagctgaggtgggtcagaccggcctcggggcaaacgctcaggcggagcccccggaccccgacaagcgcccacccctgccagtccccgccccgcacaccgggctcggtccccagcccaccgccggcaacctcacgaacacgtagggggccggcggagcagacggttggcagagtcgcgcctccgtacctgcactgtgaggggctccgcgcccagctccgaccccaccgacgaccgacgcccaagaccctgcggggccggccccgccctccccgccctcgtgggctgcccgactcgccgccagacccttccaggaccgcccagaacccttcggcccagaggcccagaggcgttctgggtcgagtgaaccctcttttcccgcagtccagccctgactgaaaactgcgcaccgaccgcagccgggattacatcaatcaggcacaaagctggacacctgggacaggataagcgcacgcgcactgtgcctgggaagccgattaggaccataagaaatcggcgtgtcgtggcgagcgccctctttcggcggaggggagaaagcgcagaagggctggaggacttatttgcaagtgttaaactgctaattaaaacaatagcgataaaccatatctcctccattagcctgggggagaaaattaaatgttgctgctactcagtgttacctgtcatatggggatacaggcattctcatgcgcttatgatgggaatgtaaaatacaaatttacataatggcattttaaaattttagacataggttcaaattcttttttttctgtttttaagacaaggtctcgctctgttgtctagactggagtgcggtagcacgcacaatcatggctcattgcggccttgacttctcaggctcaggccatcctcccacctctcagcctccgtagtagctgggtctgcaggcgcgcaccaccatgcccttttaattttcgttttttgttttttgtttttttgtaaagacggggtttcacaatgttgcccaggctggtctcgaacccctgggctcaagcgatccaatcgcttcggcctcccaaagggctggaattacagacatgagccaccgcacccgcctgggttcaaattctaactgcaatttactagccgtgtgaaatctagagttacttatttaccctctctgtgcctctgttttcttatttgttaaagtgagaatgtaaatgatggtacctatctcattatgttgttagaaggattaagttaatccatgtaaagagctggaaatataactattgtaatgttatatttatttcagttaatctcagatttaaaacaaactgaaaaattcataaagttgctgtaaggggcagtaagcagtagaagggatgcattgagtatcccctttattactccccccttttccctatttcaccttctaaatatttataattattattttgaatagataatacgtttacatggctcaaaaatcagaacactattttagaatatacacagagaaacctcccttcaaccctggttcccatcgactccatcccccttgcctgctacagataatgcttattagtgtcttcttgtttatcttttcagtgttttgtgcaaatataaactcatatgaatatatagtcttactcctcccatttcttatgccaaatgtagcatgccagatacaattggcataagttctgttcacttaatctattctgaaaatctttctaaatcaataaattagagatcttcctcatttttcagctgcttagtactctattgcatggatacacataatttattaaccagtttcttctagttacatactttatttccagtcttttagtattacaatcttgcaatgaatcactttgaacataatgacattccaatgtgagcaggcatatctctaggatacatcttggtcaaataataaatgtatctataattttagtagaaatgtcttccatctccttcaattaaagaaaaataaaaagtaaatataaagactttaaaagatactgcatatacatatttttaattgtcgtaaagcatacataacatgaaatttaccattttaaccatgtttaagttcagtggcactcagaacattcacattgttgtgcaatcatcaccactatccatctccagaactttttcacctttctgtaccaaaaacaaacatgtaagcaaacaaaaccctctgtgatgatctgacaaaaaaactaaagtgtatgatagaatgtgtgtaggttatatataaataaaacacagttggccctctgtatctgtgagttcaaccatccttggattgaaaatattaggggaaaaatggatggttgtgtctatagtaaacatgtacagacttttgtccttgtcattattccctaaacaatacagtataacaagtgtttacattgtattaggtattatacataacctgagattatttaaagaaacagttcccgacctctttggcaccagggacgtgtt

SEQ ID NO: 2858 - DNA, 4001 bp, Homo sapiens
cggaatactgcaagctgaagctctttgcaaaattgttatacaagaaacaacatatcattttcagtaaattccagacaatctcttgtaccattctggtcatgttccctgcaagttttctttgaaagcggaccttaagtataatacttttaacagttaaggaaaaattagaaacattcgtgaaattccagttttgtcttatttcatatcacagactttttccagtcctttacctctaacattcatgaaatttgtgtatgactcccaaagatgtgaacctataaaatgactacctagaactatcctacagaccttggctctaaaatcgttttaggagaatgttgggaaaagaaaaacagcaacaactctgagcagtttccaattgaatcctattagaagatgtaactgaaacagtcagaaatcttacatgactgttgcactttgggaagccgaggtgagcggatcacctgaggtcaggagttcgagaccagcctggccaacatggtgaaacccccgtctctactaataatacaaaaatgagcagggcatggtggtaggcgcctgtaatcccagctactcaggaggctgaggcaggagaattgcttgaacctgggaggtggaggctgcagtgagccaagatcacaccattgcactccagctggggcgacagaaggagactacatccccccacccccccattctcccccccaaaaaagaaaaaaaatatcttacatgactggagatatggaattcctaatattcttacagaagaaaactaaaaaatataaaatactacatctgaagtcatcttaaaaagttaataacattaaaggacattaggcctaacgtgatacatttatatagcaataaacgttacataagtgctacataaatgtatcacgtttagcgcatttaaggctgattacagcttcctaaaactggatgcctaacaggaggatgataaagcaagaggcgaaaatatcaactgtagggttcgataagccatatcaaatcatatttggaataaaggagggtagcagacggcaaataaatatgaattttccaaacttatgttggactggtgcgtacgttaatgaaaatgctttccctttagcttcaacactgaacattaatgttgatataacaacgtttaagaacaaataaagatcaggtttatgcctgggacgttttggaagggcctgaaaaaactggacagaggcaggatcgtcatttttccccaatgactcctccccacgccgtctcgcctctctgcctggccaagcccagatgagccgcgggcagaaaagggttcccaaagggtcactgccacgttaagaggcaggaggcccaggcgtctgggagccgccagagcaacgccgccgcctagattttgcagccgaaggtgcactggcaggaaagccaagtggagactggtagaagggaaagggcagggggagggacgttccggcccgctcctgggaagaatcgtcctccgaacccgagccgcggccgcccctgatcccgcaacgcgggtccatcagggactgcagcggacagcgcccttctgtctccctgacccctgtccgctcccgcccctttagctctccgcgggcggccccagggctgaggcgtgcaacaagccgccccaccacccccagagtttccacaaacgcaccggagaaggccgccatcttcaccccgtcctccgcggcttcgcctgctcgctccctccctcccgactgacacggcgtggcagtggcggcgcgcgcttccggcccctggtcttcggcgttcggagtccgggcagggactcagccccgggagaacggttccgatggaaggaaaggcccgcgccggccccgccttatgcgcctgccgctgagcggacctctgggacctagggcttctggacgccgccttcgttctgggcaccatgtgttcggagcacaccacgcggtatcagggtcacagctacagagaaggaagcagatgtttggtgattagggtcatccagtgggctcaggctgacaccacaccgtgccctccccactcagtcccccagctttccaaaggtgagcagggccttggtgtgtgaatgacccggagagatggactggattcattgccctgagcaccaatgccagtgagtgcctggcagccagtaggtatttgttacattttttttttaaactaagtaatgatttaggtctccctcccttcacccatgtttgatgtcgcttttataatttcgggtttgacttccatgcaattttaactcctttctctttgcagagagatggggaaagtaaatgaggaatcctcccaaccagacactcactctgtcaggaaggtattagaatctttagatgaggactctaaaattcgggaaagttaagtcacttatctaaagacacatatctaccgaatggcagcgtgggatctgagccacatctgcgcaatgcgagggcgcgtgctgtgctatctgtagcctgccccagagtgtcatggagaaaagtggaaccctcaggcaagatagaatagggttgcagcggccgggcgcgggggctcacgcctgtaatcccagcactttgggaggccgaggcaggcggatcacgaagtcaggaggtcgagaccatcctagctaacacggtgaaaccccttctctacaaaaaatacacacacacacacacacacacacacacacagaagaagccgggtgtggtggtgcatgcctgtagtcccagctactcgggaggctgaggcaggagaatcgcttgaacccaggaggcgaaggttgcagtgagccgagatcgcgccactgcactccagcctgggtgaccgagcgagactccgtctcaaaaaaaaaaaaaaagaaaaaagaatagggttgcagctactccggaggctgaggcatgagaatcacatgaacctgggaggcgaaagctgcagtgagctgagatcgtgccactacactctagcctgggcgacagagggagagtctgtctcaaaaaaataaaaaataaaaaagatagaatagggttagaagtacagagttgggaaccatattctgagtttggattctaggtctgccacttgcttgctgtgtgaccttgaacaagtcatgaagcttctttgggcttcagtttacttacctgtgaaatagggatgaacaatagtacctttctcatatgatagttatgaggatcaaataaaatacataaagcatctaaaatagtgcatagcacatggtgacaatataactagctctgttattactattacatgtaacaggattcacctgaagctccaaaggcccaggacaatacactcagccctgcagctttacacttccagggggcactattcacattatattctctattcttgttatattttgtctaaataagaccctgagagttatgcagtgtaccagttttgaatggataccaagtacccccacattccaaggagagatacaagacccatattatgcaggacttgccaaagggaaatctgaaatctaatttttgtgccttttgccaatgcccacctttaaagtgtgaaaaatcggctgggcatgatggctcatgtctataatcccaacaccttgggaggctgaggcaaggggatcacttgagcccagaagttcaagaccagcctgggcaacataatgagacccccatctccaaaaaaaattaaaaaatagttgggcatggtgcacacctgtagtctcagctacttgggaggctgaggtgggaggatctcttgagcctaggaggtggaggctgcagtgagctatgatggtgtcactgtactccagcctgggtggcagagcaagaccctgtctcaaggaagagataaagtatgaaaaaattaaagatgcaaattaagagaaaagatttctgtgaaaagaatgcatttcagggaaatactctgagaacttttgatctgagagtttgggaagcgtaaggactgctctgagaagccgtccctaggaggacctg

SEQ ID NO: 2859 - DNA, 4001 bp, Homo sapiens
ttgtttatgtgtttactatacttttgatcatcattttagagtttactccttttacttattaaaaaaaaatgagtcgactgtaaaagagcctcagggagagaggtattttagaaggcactgttatcataggagatgacagctccatgcctattgttgcccctgaagatcttccagtgggacaagatgtggaagcggaagacagtgaaactgaatgtgtctgtgtctttacatttttaacaaaaagcttaaaaagaaaaaaaaataaaataaaaatcacatagaataaggacaaaaggaaactttttgtacagctgtatgtacaatgtgcttgtgttgtaagctaagtgttattaaagtcaaaaggttaaaatttaacaagtttataatgtaaaagttacagcaggctaaggttaatttaagaataaaagtattaaaaaactcaacagtgtagcccaagtgtacagtgtttataaagtctatagtgtacagtaatgttctaggccttcacattcactcaccgctcactgactcgctcagggtaacttccagtcctgcaaactccattcatggtaagtactgtatacagaggtaccattttctaaatctctcatgtcatagtctttttactgtaccttttctatgtttagatatatttagccatacatacacttaccattgtgttacaattctctgagtatagtacagtaacatgctgtacaggatgacagcttacgagcaacaggctatatcatgtagcctgggtgtgtagtagatttaggtttgtgtaactagataaagttcgcaaaacgacaaaagcccctaatgacacatttctcacaatgtatcccccctcctgttatgcgatgcatgactgtacctgagaatgtccttaccaaaggttccctgtttgtttactgaaaaagataaaacaccatcttttgttcaaatttacttacatatgcgctgaaaagtagtaatgctgtagtattattctataggaattagaaatacaagagtatttcaaaacatattcctaaaattcacaaacctattgcctcctgcagaattttttttcaattaatgtctgttgaaaaccaactggggcaaggcactgtgcctccaaactttccctcggggagtttgtatcttaacctggacaacaggttaacacaattacttcaagatctgtggccccactgtcaggacactgggactgcaaatgaggtaggtaagaaaggtgacattcagataaaatccttttcatttaggtcactgtgcgggacacaaatacgtagaagctctggtgagaaagtgctacgagaacgtgtggaagtgggtagaggaaggcaatagtatcaaagaagctctgtggaaacagccagacgggcttttggggaaagaaatacgggaattaaatagatgtgaaaagtgggtggaaatgagacgtttcatgcagcataaccggaaatgagggatgaggtgaggtgcgacttgcaggtggtgagggaaccaaaagctaaggtggaaatgcaaaaggcagggttagtcgtaagcctagaagtgaacggggagtcctcccgctctaacgttgtaagaagacactgattgctcagaaaggtcaggagcagcgctggagccacgcgacgagtgggcagcagcgcgggtcccgagtggaagctgccttttcactctccccaatcacacacgctgcaggggaagctgcctccgtcacacagagcagctgggcccccggccgcccgaacgcgccagggctcgcgcgtgggtcttctgagccaccgcgagtcaacgcatctcaccctgaaactttaggttccgctgccgcaatttgaggttccgcttctcgatcttcttacgcaggagtttcatcggcaggtgtgacattctgcccaacaagtgcctagaataaggcgccacacagtacagctactcagttctcaggctgacgttacttcccttccggccgcacgtgcgcagctcggccaacaggaaacgcgtcacaggaacgctggcacccggcggaacgaaaatgctccagagcggaaatgcttccagacgcgcgcaccgtgatatctttggcgaccaaaatctttgcagcgccccctggagaagtggaagcgagacgctgcactggcttcacactgtgctaaagctaacttgagctccccctagaggaagactgaagaaagaacgtggaggggaaggaggccttagggagtccgcatttttatgttcctatcctctgtgggtgcagaactagagttggccctccctgtacctgaattccctgtctgtggattcaaccaactcccccattgaaaacattaaaaaaaaaacaattaaaaataatacagtgtgataactactttcatagcatttaggttgtataaggtattataagtcatttagaaatgatttaaagtatacaggatgttgtgtgtaaaataaatgcaaatattacactattgtatataagggttttgagtatcctaagatattggtacccatagagggtcctggactcaatcccttgtggatactgagggacaactgtatttgggaaactgaatagaactaaattatatatatgcatttccaaacttgtttggccactctcctcagaaatacaatttctgtgtcacttggtacacatacacacataaatataacatttctcaaaataatattcttgcttttcactctttttccttcaattccattcattccatcctaaattattctttttagcttactaaaaatactgattcctatgaatttaaattaactttactacattaataataggttgactgcagtttgaaaaagaggtttatatattccttaagtatacccaaggacccttcagcagtccaggacagaaattgcaatgtggctagctaatagtcatctcttttttgggatggggaggaagacaggggtatgcatatagtatttaatttttaaaaaaattgttatcaacattaaaatacttggagatttccataaaaattcatatttgtctttaaaaattggcccaatgccctcaaattccccttaacagtaatcaatttgagctgaacaactggaagagtccatgaaacctggattaatttgtttacttggaggggcagaacatgagaccctggagattagacctgatcatagtgaggaacagagagggagaaaacttgggagggagtttaaacagaatgtgaaggaattgacttcgaaatcacattggattggactggaaaactaagacaaacaaataataatgtgcttagattaatttgttaatgatcaggcaggctgaagaatgattcagaaatgtaagagcgcacacacacacgcaaacatttatctcagtgtaaatatatatgccagtttaaatttatgcatatatcagtatatatatgcatatacacatatgtatctatttctatagctctatgtacatacatatatatttacctgattacatgtgtgagttttgggtctgtgactttgaaatagatacaactgaagtatatatagaaagtgctcaaaatttgttatttcttttatgttgtaacttaaatttgtggggctatgttttggtagtagtaatggaaaggtactcccttttttctagagtgtgactttttctagctagtagtgaagattggcagtcatttcctcaaaaccaaaaaaacccacatttacgaggtgtttaagacatttagatcagagaagccgatcctttcaggtgcatggaaatgcttaacgttagggattgataaccttttaagaaacatagataaagctactgatgccaattcttctggatttttagaagaagaatgagaaattataacttcaaatcaactctcaaaattagggttgagagttatttttaacagagtgaatttccaaggccacatcatcagttactctagcaaagaaaacaatgtcattgggttagctactcaaaaattacctgtgag

SEQ ID NO: 2860 - DNA, 4001 bp, Homo sapiens
agtgaccccaggaagaggggccaaggtatacctcttcatgcactttcttaaggaacgcgatctcctcgttgagagattcaattctgcgctccaggtcaatgcgagctagagtagctgcatccacgtcctgggagaggccaagcgagaaggacatggtcaccgccacccaggtggggcagagcaaggccagaggccatgcaaggggaaaagaagggcactcaccgctcggaaggcagccaaattgttctctgcttcttccttcaactgaatctcctcctgcagcctgggtgggacagacagaaagacagacagttgcgggtgataaagctggcagtggaaacgactggccgggggctgaccagggggtgggtccaggacagagcgggagggcctggctgctgggtagaggcaggagagacagggagtggagaggccccacccacccagggagggcacaggaagtggcccaatctctgcccaggagccacacccttgaagtctatgtccccaccagactgtgtgacctccctggggttagaaactgtgtctattttatccacctctgtgtttctggttcccagctccagcctggccaatatagctgctcaattaatatttatgactttggtggcaggagggtgactgtgctcacttggcctgtcagaagtgggaccaacaaatatgctacacttgctgcccttttcgttcttggagcctggtgaagtctacagtcaggtcctcccaagctctctgagagctgtgacccccacctactccctttttctccagcctgtccattcaccttgtaaaaagacacagtctcggcaaggccccagggccaagctcccccctccccccacctcccccagggcctcatcacagctgagctgagagctgttgcttggactctgggcccttgccctgctttccctgtctcctatcagcctcccttctccctctggctacactgccctctgggcctcctgcagcccttcctctgcccatcaactacctgaccccataaatatcgccccagcatcttaaaatgctttttaacggggctgtccacagggcaccgggtcccctaaattctcccatatccaccccctgatctatgtccccaagaaaactcctgtgcaagatgggatcgcagggggagagacctggaggtcacggccccttgaaacacacaggtggaggaccctttctccacatggggcaggagagggtcccgggccccgggagaaggcaggtgctgacagcgggaccccagaccccaggcctagcctcctgtgccctgcccgcagaaagaggagtctggggtgccgggccctcacttggccttgagccgctgcaggtcgtcgagcaggttgtcgcgctcgacgtcgacgcgcgcgcgctggttagtgagcacctccacctggcgccgcagctcccgcagctcctcctcgtagagctcggccactcgcgtcggctcgcggcccttgagccggttcacttcggcggcgagcgccgcgttctgctgctccaggaagcgcaccttctcgatgtagttggcgaagcggtcattgagctcctgcagctccaccttctcgttggtgcgcgtggtcagaaactcctggttcaccgcgtcggccagtgagaagtccagcagctcgcctgcgccgtaggaggagggcgtgcgggtggtccccagccggctggcccgcagcgaccccaggcccccggccccgcccgacgtgcgcgacacctggtacacgcgggacgtcaccgagctggaggagcccttagagccgaaacccgcccgcgggaacacgggcgaactcagcggggagccgagtgggaagcccggggccccgccgaaggtgcggcggtaggaggacacgcgctggctggacgagtaggcctggctcatggtgacggcgcgggcgaggctggcgggcgcacggaggaggcggcgggcaggcggccggccggagagtggatgcggcgaggggagacagggcccccagccgtcggcactatttgtatccctcctgacatcagcccccgcctcccctcccctgacagctgcaagatcccgctgtcctgccaggaaagggcggcccgtggccgtgggggcggggaggccagctcccccgcaagaggcctgcgcccctgagtcagccagcgggggtcctgtgacgggcaagcctgccaatccttcgccagggcaggcagcaagcatgtctgcagcccccaggcgggcctctttcagccctggttatctcctcgtcctggggtgggggggagtggggtcaggggagacagcagaagagaggcttccctttagtttgagggtcccctttttggtcaaggagagactttgggtcatttcttaaagggtcaaggcctgttcccaggaaaggccctaaaccaccttgttcctaaatattctcttgaagtcgaagaggtttgggtctcaggcaaagaccagccaggcttgagggtgggggtctctaggcaggaagggagggcagggagacgcctggcaggcggagggatcctggccaaagcctgcctgccatgtatgtctatgggcgagctagccctgagcctcagtttccctctggactagtgcaggccctcttcctccccggtactgtcgagggtggggcctcaagtttataaacagtgggctgatttccagaaagggtctgataagctttcagtttccaattgctatgtgcgctcccacccccgcacagactttgtgtggctcctgccccctgggtcccccgccccctccctgattcatccccctactcacaccacccacgcccacacacaccaggggtttgtgttttgtcaggagccgcatgtcaacccaaccatctccctggcagcaacagctgccaaccccaaataccagagcgggtatttatagaggagaacgcatggctgggaaacaaggcacaggagaggagctgtggggggcagggggtacctgaggaggcatgggtgggcgtcagataaggaaggctagggtgacagccccaatcacttcccaccccctataatgctccagcccccacccccacaaaaatggagccccacagagggcctgcccaacctccaaagccccctccttagcacacggcacttgctaacccctaaggacatccaccattctccatgggtactggccgtgcctctacacctccacttggcactccaggtccctcttggacctgacccttttggaatgcaaaccctgaaaatagagtgctcgattaggagccagtcactggtcctaccctagacctgccatcaccagctggaggggttactagtaggtgtgtccttgtctgagccccagctcaggcacgtcctctctgagccccagcttgtcagatataaagtgaggatggttagccttgccatgctaccctataaaggtttaaagaggcccaggccctactaatgtatgtagcaacaataataccttacatgtactgaccacctagtgtgggccaagctgctgagcacttcacacccatgacccccaattctccaaccctaggaggtagacactagcatcattcccattttatagctcaggaagctgagacagtgagacctcacagcctgtggctttggcctcaggatgggtgtgaatgtgccgggtaaattgtaaagggggctttgttactgcactcttttcaaagccctttcccattaagtgtctaattttcatccaagagacaagcttctgaaatagatgggggagttccagatattcttatccagccctcgagtcagtgcaagctgttgtgttctggttatttttgtgtctcatctcccagactagactgtatgctcctggaggattttggagaccatgtggatccttaacacactcaggcagcaccgtctttctcattgtcattcaaagtagcctgcaagctttcttttgcaatttccttattttgatgacatgctgtgcctcctccccatccctc

SEQ ID NO: 2861 - DNA, 4001 bp, Homo sapiens
aaagctcttggtagcagcagcaaacatattaaaatcaaaacgtcatcaactgcaacccccagataaatccatttttaaagaggaaaatcaggcacaaaattaagcattgcttgtttttaaatataattatacatcttaaaaatacaaagcatggtttcaccaagtagtttaccactgtataattccctgcctctgctcatgtgctcaggtaatgaattatagatcaacggtgtaaaatgatatgctaagagcatgtttaacttggaatggcaggctatagcactaaaatatacacagaaaactaataacgtaaaaatatgaccaatgtctatgataaggatcacagtagatagtgatttgccactggcaatgggccaattttaagggaagcatatagtgctgtgggaagcaatgcaatttaggcactaacgatagtcccggatacaatctacagtggacctagtccaaagggaattccttcacaagtccaccaccggaattttggcaacaccaaagtgctgttttgaatcctcatggcatacagctcattgattgagcatttcattcattttccatcttatatgcttacaaaactgtgtttaatattaaatataaattcacagatataaacaattatatgcaaatctttatttaaaaaataaagccacattacatataagtaactatataaactattacctagtggtttcttactctgaagttgggcacacagactctctctctttgaaatggagtcctgctgcatctttttgtttcattattatcccagctacttaacctttaacaagagctatataaagttctggcctgtttttaagtaattttgtggcaaaaaatgaattttacctgagtgctgaaatgttttgccataggtgttatgcggagttcatatattgtgaaatactgactatgtagcccttccaataagatatccattaaaacagtgatggatagtaatctatatacatacatatatagacggagaggaagagagaataggctctaattaaagcatcagatgatataatttgattagattctgaacatctttcacttgtttcaagcatccagggcttacatgctaacaaaacaacaaatcgcttttttttttttttttttttttgagagggagtctgactctgtcgcccaggctggagtgcagtggcgcgatctcggctcactgcaacatttgcctcccgggttcaagcgattctcctgctttagcctcccgagtagctgggattacaggcgcatgccaccacgcccggctaatttttgtatttttagtagagacagggtttcaccatgttggccaggctggtctcgaactgcttacttcaggcgatccgccagcctcggcctcctaaagtgctgggattacaggcgtgagccaccgcgcccgcccataaatcacttttaataatatcctttcgtacgaatagcattgtgcaagcaatcttccataacaccgagtaagcacaggggagcatttctgctagtgcctagcaagcccctggagaagcgacacgtcatctaatggcccaccaaaggtgctgcatcccaggcaaacgccattacaaccgactacccaggtccccggaaaggccttcgtttactcctaacgtgttttgctgggatgcactgacccagcgttccatctcgcgacgaaagcccagaagacaaaggagcccgcccggcgggagaggagcgggtgtttggacgtccccgcgtgttcctaaacacagggctcggggacccgaagagcgcaccgcagccccctggagcgtatatatccggggtctcaagcttcaggaccaggcccgggagactccctggaattctgccttcgtaattttagaatctttttcttaaagtgacccagcccccaatccgtcctccccacaaaggcttaactttaggcctcaacgaccctagacccacgccggacaatccctctaatccctctctcccggcaagaaacggcctcctgctaaggacaaagaactgcggcctaggggccagttactacaggctggtcagggccggcaggggcgggcgcggagaacccccgggagcccaatgcctgtgcccacgcgggagcggggcggagccgggcgggaagggggcggaccctggaagggacaggggcggagttgggccgggacggaggcccgcagaggagcagcgagggggcgtagccggagctacggcaccaaggctccgcccccaccctgcctgccccctcgctggagcaacgcaagcaggaggcgggggagtcggaggaggtggcggcgctggagctcctcccggggaccagcgacccggggagcgagcacgtcgctccgcaccgctcttcctccagccgctgagccgtcccttctcgccatgtcccagagcaggcaccgcgccgaggccccgccgctggagcgcgaggacagtgggaccttcaggtcagcgtgcgggcagtcagggccccagggccgggagcgttgggcggcagggccggggcgcggggagccggccctccagaggcattctgggtaaagccgtgcccggcgcccacgcctccgcggctgtgggtgctcggccccgccctctcggcggcgagggttggggtctgcggccgggccccgcccctctcgtggtccctggcggcgcgcggggcgggcggaggtgacgctcggtcggcgcgcccgggaagggatcgtcaggttttccctgagaggctgcggcgctgctgccagccctgttctgttgagaatctctcctacccgcattcaagtgctctctctaaagacctcgctcaccccgcctgctcctgcggagtgactgccgcagcggggccggaagacaggtgcgccccagcctcgccagctctggccctggcctccggggaactcggcgcctccctcgtcaccgtcggtggcggttaaaactggcctctacgcttctgcttcaatctccaatttggcatgcaaagcacacctttttgtggtttttgcagtttggggaagatgataacagctaagccagggaaaacaccgattcaggtattacacgaatacggcatgaagaccaagaacatcccagtttatgaatgtgaaagatctgatgtgcaaatacacgtgcccactttcaccttcagagtaaccgttggtgacataacctgcacaggtctgtatacacagttaacctggatgaccgagtgggttggcagtcaatacttggtgttgcttttcagttcggaaaagttctctttttgccagacagctgtgaggaacaggctctgaaactgagacctctcatctcaggtcgttagggcttttcagctgcatctgattctcttcctaattttctcttccccacataccaaggaagcttagaaactaaaaagttacccagccggatggctggatcctgcatggctcttctcataccctaggatcctcctagggttcttcttagaattagagggaagcaggaaaggttcttggagcagtcatagctgggtcagtaggtactgtgaagtttcatagattatagcggatgccaggaggcatgaccccagaattttctgagcgtctctcctctctgtatggactcatttggcactttaggtccattgtgctacttttgattctgtatccaaacaaaatgaggaaggggagaaggtcctcatatattacataataacttctagtttttgaaactgaacagatattttgtatattatccactttttaaacaagaagaaacaggttcagagagattataagtaacatgcgtatagcaatgaagtcacaaagcaatgaaattttaaagttcatgctttcttttggtctgtgagcttgagcaaatgataactaaagttgctcatttgtaaatgtggacattatttttcttatgtatctatttaattgcaaacacagaaaacattggatgctaaatttaatttggaagaatgccaagaaaaaaattta

SEQ ID NO: 2862 - DNA, 4001 bp, Homo sapiens
cattagtgaaggaagaaagagagagaaccaaagcaaacaacccaatgctggtatttctgtatttactactgtcaataccagtattcacttttacatgtgaagtatgttctcacacagtgttttagctgagggaaggccggggtctggactgaggattccgtgtcctcctggcttgttcctccagcgagcacatggagggggaaggtcctggctaaaacaaattcttctggagaagagagacaggtccaaatggaaagggtctggccgtgaaaggaaacaagggagtagagcagaaggatcctggtcctggagagaaagatgctccagggcagggctgggagtcaggcctggggacctcccccgtctccctctccactccctacagggtcccccggcacagcccctgcctcctgtttcccttataccatcccctctattctacgatggctctatgaggaaccctggagaaaatcaaactaataactcagaaaagaaactcaatcttttaagtaacctttcccctccccgcaccaccagaactaactgtaaaaggttattttgtcgtgtttttttttttttttaattgagggaagtggtcagaaccctttctaaacaagctgctttgttccatttcaaattttaatgcagtaactttctagggatatgtctcaaaatgtaaattattcagactccagatttcttaaataccaaaatattagtactgacaccaatcctgataaaaaacacaggtattcagaatcccagccaacacactggtgtctgaatgtctaacaccacatccgcttaaacatggcagtaatctgtgactttcactggctgctcctcctccagcagcacccacctggtgcttctagctttaaatctacctacaatagggcacacagaaacaaggttaattgctagaaagcctaaaaataaagaatttcccatttctgttcacacatcaagaagctcagctccttctactttggctgggcacagtggctcatgcctgtaatcccagcaccttgggaggccaaggcgggcagattacttgaggtcaggagttcaagaccagcctgggcaatgtggtgaaaccccatctctaggccgggcacggtggctcatgcctgtaatcccagcactttgggaggcagaggcaggcagatcatttgaggtcaggagttcgagaccagcttgacctacatagtgaaaccccatctctactcaaatataaaaattttagccaggcgtggttgcaggcacctgtaatcccagctacttgggaggctgaggcaggagaattgcttgaacccaggaggcggaggttgtaatgagccgagatctcgccactgcactccagcctggacgacaaagcaagactccctctcaaaaaaaaaaaaaaaaaaaaaaagaacttcaatatacttaaagaataaaaattatttaataataagaagatgaaattcatagccccgtgattccctccgcctttctgagagagagatatccagctgtaacgcggctgtctctgtgacccttttttccttttccccattaccgatgacattaaagaaaaggaaaatgaacagaaattaattttgataagaaataaaacatgccttgagacaagtaaaacctgacagcgtggagtgttacaaaactcactggcaataacagatctgagaattgaagcttttcccacacaaggactcagcacccccagttcctcccctgggacggctcctgtgatgtcctcgcgtgtgctttcctgcatggggcctcacctttgccgttttggcatagtaaagcgttcgccctcgaagcttaaagtatctcctttttgatcgctggaatgaattgttctgtttggtcagcatcccctctttgatgatggtctgaaagtacagaaacatattcataaacttgcgttttcaaggtgccctttcactcttccggctgaaacgcagcctgttgcggctgaaacatattcgtgtctctaacagaaaatatttctcacactctcaacagaccttgacctatgcacaggcccagcacgctgccgggggcatggggggttgcaccaatcctgtcctctaaggggcaatgtgtgcctgtgtgggtgggggtgtcaagaggcccagggtgtgccctggacgcactggcagacatgaagaagggacactgaggctcacagggccacagtacacagcagctgggaggacactgggacgcggggccagtgcattctccaacttcagcatttggtatttttcagctattcttggccctgtctctgtgttctctggccccctgccatttctcaggatgctgctgccaaagctgtctacgtcagcggctctggggctcagaagctccaggcccgcgccctcagcccaacccaccactcacaggcctggcgtgtgcatctgcacacaccatgagaggaaagtgcctcggccacagacactaaaactcctctcaacccgaaaagctgatgagttcaccccaacacaagacgttctcttacgagaatccagaaatggattatacggtccactcatcttggctcaattaaagccaagaatgaagggggctctacttctcccggagctgctctcccgccttacgcagcccatgccaccaaaacatcaaatgcgtaactaactacttggtcatgagatgttttgacgtactcggagccattaacacaatcaaaaagaataaacgacaagcatgaagacaagaacctggctctcggcgttcgcacactatgttacatcccacctcacggaaatgcccagtccacaaggagcctcagcatggaaatggagggaggcttcctaaaaattctgttcaaagacaagcacattggttcagagaagcttttgcttaactacctaatctcatatagctctgcactttacgtaaatgtttcaaacagtgcatgtacaaagttcttaagtatccacaaacacttaaaactccctaagataaaaccagcaaaagcaagacacaggaggctcatgtcccccacctatgccagaatgcaagcgcagaacactgcgctgcctgttccatccaccggcattcacaacaggagagacagtggaacagggaaggctgcagaaagcccccagcccgacacgccatcaacatgtggacggacaccaggaccacacccggacagcacaggccaatgcaaactgcctaggggtctcttctccttatcccgcaaccagccatcctcactgtgcccttcctgggttggggggaactggctgcactcacgaccacttccaagagcttcttgctcaccagcatgtgccaatcatggtgaactctgcttttggcactgacccagtggcacaacagcagccctttccaactctagaggatcagcgcagggcagagctgctgaagaatctactgactcattcttggcttatacattcacctcacacttctgaagaaggcacccaccctctccccagtaattaaagagtgccaggaaggaaaaagagaggagcccaacattatccaacgatcaagcattctgatgacgcttgtttgccagaagtgacctccccacccccaccccctcccctagagacagcggggatccccagcatacagttagcatctgaggtcccgtccaaaacagaccaagggtgatccaaggcagacagaaagtcccaccccgattctggtagcgaggatataaaccagtcttcagtgtgaaggactgggaaatggtatttgtttccaaacatccttttcacatccaagtacacatggatgaaactcatttcaaatacatctgcacagaacaatgccatccatggaagcctgaaacatataccacgagaccctttctctgttgacctcaaaggcctcactgtgaagacgtctctcctggccccccattcatcttccttacctttgtggggaaagcaatcacttccatctcttccctaaatgggaaaaaaaaaaaagacaaa

SEQ ID NO: 2863 - DNA, 4001 bp, Homo sapiens
atcacatgatctaccccacactggtcagtaccttgcctgggcaacaggagaaagcaactcctatcagtatcatttagggctatgtggagatcttcccaaaagcacatctgatccatcacccccatactttgaacaatcctctgtggccacctcttgcccaaggccaaaaagcaaacccctcaaaggaccaccccttcgaaattcagccctaaccaacccttccaactaataagtctaatcaacgtgatccacctctggcccaacttctgatcatttcgcagttgtgcctaaagctctagacgcaaggttcaaatatgtagaaggccatttcttacccacttagcctggtgaattctttatccctcaagatctcaccttaaaggaaaccactcctgcctccccagggcaggtctctgccccgagtttccgcggcacttacaatgttgtcatgtcaggtgcacaggcgtccatctcccaactagactgagaatccctaggtgtagaaactgccttccatcttacggtcctgaccatggttccaacacacatccacatttacgacctgtgacaccctgggcaagtcatttaaccttgattctatttctattccaattccaaaagacggagatgatagcatccaacttattgggttctcaccagtactaataaactaaccatgtcaagtgctgtaaagctaacccaagaaagtgcctggcacatagaaggcttattaaagaattgttatttgctattgctatcattatcatcactactgctactgttatacccggaacaaagcaggtgttcggtacctatttgctgaataactggagcacttcacaacaaacctgtttgtaacatgttaggacctcaggttcccccatcgcaggtatcaaaggctgacagaagagaaggctcccacggtgaagggaacggctgaacctaatccgccccggaggaaaagcgcactgcagcaggaggagaaagtccgtgccaaccggatctgccagagctgccccagggacccagcctgctcgcagccacctgtccagccacctgcctgaggaagcagtgttctaaccgggcgggctcacctggagcaaaaaccgtaagctgttttcaataggaagcacaatgggaaaacaaacggtgcaactttcctcctgcaaaaaggacgtgcgtctttatctaacatttagcgtcaggagttctccgtggagagttgggtgccaagcgggtgcgcggtcccggctttgctgagagagacggtcactgaacgcgcatcccttccttcccttttgggatgaaggggtgaaggggtgatccctcgcacccgggtccgagcggacttctgagggcaccacagggaagtctgcagggcactcgcgggacaccacccgaccgctcctgagaaacgtgcagaaccggggtttggggaccgcggacgcccgcggggcgcagccgggagcccccgcgtgggacccgctcggtggcacgagcgcagtcccctgcatctaggcctcagtttcctccgggtcctcgcggcccaactcggcgcgcgccccccgcccagcgcgcggcgcccggggcgcccacctgcgcgccccccgcccggccccacagccgcccgccgtccgtcgggggccgcgcgctccgcccggggcgccggcccgttacagcggcggggcacgctcgacaggggcggtgacgcccgcgggaccccgggccgggccgagccgggcctgggcggccgctcgggcagggccacgggcctcggccggggctgccgcggcgtgaggggcgcgcgcccgggccgccgcgccgcgggctcaccttctgtcggatctgacccgacgtggacaccttgcggatgagcttctgtggggagccgggctccgcctcgggctcgctgtcggacgactcctcgggcggcggcggcggaggcggttgcgggggacccggcggaggggcgcccgccgccgccgccatgctgccgggccagcgcgcgcaccgcgggcgggggcggggcggggccggcgggaggggcggggccgagggcgggccgggccgggggcggtgggggcggcctcccgcctctccccgccgcgccccctgccggccatgcgcgcagctgcagacggcgccgcgcggcccctccccgcccccacctgaagcgtcccgggccccccgcccacctctccgggccgtggcttctgtgtgttatttctggaacgccgtttgtgttcttgtttctatattcacttcttaaaacatctctactcttccgcatcagaatgtaggtaacctcaggcaggctggggctgtgtctgtcctgcccagccttgtgtggccgagtttggggcgagctcgaatgcgcgcgcgcgtgctggaaagagaccccggtactgggacgggcctcgggacgccagagctgggatgcaccgctccatctgggaaggcttcctggagaaaacggttcttaaggagagatggaaaatgtgagcaggagttgtgactagagagggaaccatgttctaggcagagaccagatttgtgcaaaggcctggaggcaagaaagaacgagtgttgggcgaagacgggggaagaaagggaagctggtgcttagagcaaggaaaatggcattaagatatgagcctcggggcgggcaggtcgaagcgggctttggaaaccagataaggggatggaaggcagcaggaagcccttgagggatttaaccctgggcggggctgggtcaccacgctggggcctgtgatccgggctttgaagttatcagggcaggtggacgccctggattaccgaggggctgagagatagagacgtggactgagatccaggtggggagtgaccagcgactggagggagacagaggtgaccagaacgagtcccatgtttcccaggggggctgctggatggtgggcgggtggggtccagcgctgctctgggcagaagaggaggaagcgaagctggagatgagatcagctaagtttttggtgccatccaggtggagcagggcttggtgccacccagaggaaatgctgtccatctgtctgccctgctctgaggggcaaatcagtaagggactgcccaggtgtgccctctccctgtcaaagggctgccgctagagacctcgcctgccaataggcattcgctggccgcgccgccctgggcagtgacctggggctgcagagtggcatctggcatggggacacggccaggggcatgggctcacggccaggacagaggaggacaaggcctaaggcaggaacagtccgggacaggccgaaggccccatggtgccccagggtactatagccactagccacatgtggctacttaaatttcaattagttagaattcagcattccgttcctcagccacaggagccacatttcagggactcagtagccgcatgtggcttagcagctgccacgctggatagcacaaatataaaacacttcccccgtccccccagaaagttctgcagcacagtcgcatgctgaactgtgtcctcccgtaattcatatgttgaagtcctaacccccagtacctcagcatgtgactgcatttggagttaaggtttttaaaaaggtaatgaagttaaaatgaggtcacaggggtgatccctaatccggtatgactggcgtcctcataaaaagaggagatgaggacacagacacacacagagggcagcccatgtgaagacacagggagaagatggcatctacaagccaaggagaaaggcctccgatggaactccccctgccgacaccgtgatctcgcacttccagccaccagaaccgagagcgtcaattcctgtggtggaagccgcccggcctatggtgcagtgctctggcagccctagggaactcatgcaggcacaaagggctccagcctccccacagggttgggacttttctatcaattaactacatgtggagtgatacacagaggcaaaaccctggaggagtgtgcaaggcgga

SEQ ID NO: 2864 - DNA, 4001 bp, Homo sapiens
tattgcaataccacttaacactcttcactttcaatgttatcagccacagtgatctttttataatctaagtaaaactgtcacttgactcctcaaaccttccaatggctacccatctcggtaagattaaaaacccatgataaggcctataaaatctggccaccccttgggcttttgccctaatttccctcccatccttgctcactcgacttcagtcacaacgatttccctcctattccccgaacacactttccacctcagggcctttccaattgctcttcactctgcctagaagattcttctcccaggtatccacgtgatttgctccctcatcttcagttttttgctcagatgtcaccttctcagtgaggccttgcttattttatttaaaatgacaacttcggccaggtgcagtggctaacgcctataatcccagcactttgggaggccgaggcaggcggatcacctgaggttaggagtttgagaccagcctggccaacatggtgaaaccctgtctctactaacaaaacaaaaattaactgggtgtggtggcgggtgcccctaatcccagctattcgggaggctgaggcaggagaatcgcttgaaccagggaggcagaggttgcagtgagtcgagatcgtgtcattgcactccagcctgggtaacaagagcaaaactccatctcaaataaaataaaataaaaacttccctcaattcttcatccctaatttttctccatcatacttattactctctaacatattgttcaccttgcttaatttatgttgtttattgtccatctctccctacttgagttccatgagagcagagatttttatttgttctattcacagctgtattctccaggccaagaacagtgctggcatatggaagtggctcaaaaggtgatttgttgaatgaataaaaaaagaaattctcagtttgctgctacgtcttcagtactcaacacttgctaagccccttttaggggctcagtgacttggtagataaaagtatcaagtcagaatttattaatattaaatcgaaatgctttgccttcattttgctttctgactactttttattcaagatactggatctcactcttttaacaaaataatttttaatttaatacatgtttttaagtttaaaaagtgaggttcttctaagaaaagccttaagaaattattatgcaactagcacaggcacagggcaaaaattgtgaatgtggtatttgaacgactgaaatttaggaactctcttcgaatagggttgccagataaaatacaggacacagttaaatttgaactttcaatgagtgatttcgttgttgttttgctgtaaggatgtcccaaatattgcattggacacacactaaaaattattcgttatcttaaattctattttaactggatattatttttaatttctgctaaatatggcaaccctatctaggagaacaaataaactgcacccgcttgtcgcttcaatttcgatctattacaaacagctaatacaattcttgtcctatccactaactgcgtggcttttatgccccaacaaatatgttcctgtgggcgggtactgaggcccgatatcctaaaaacaaggaggcaaagatacacagtgcactttgcgaggggaaaggctctcctcgcagcccagaaaaagaggccggccgcatcagacgcaggccattccgggcccagctcctttcccagcctctgtcgcctgcgtggcggaggccaaggcttggcagccgctttccggcccttaccaatgttgccttcgatggagagccttcggggcccgcgccccgcgtgcaggcctctggaggaggaaacgccctcgagtgggctcttggccatggaactgaagggtgctcgaagccgacttagaaagaggcggcccgcggccatcccacccacgattcacacagcgatcacttccgccgagagcacttccgccctaggtatcgctgctcactcgctccagcgcaccgttgacgtaaggagatcgtcagacaggaagtgggtggggttgaacatgcggcggggtgcgcccaagagaccgctccgctatcgcgatgtttgtaaagaagcgttgagtgaaggaagttttgcaacggtgcagaatttgatagtaaaaggagttgcggtgcgagtggtttttgttcattggacaaataacattttaaaagacgtaattccacaatccaaccacttcatttttgtataactttaaaataaattttataactgaagacaaaattaaaaatagaaattgtaattttaagaggggatttccccccccccaggtgcttgttgtctggtttttattttaatatcggaagaaaatggaagttttaaagtaggaaaatgactcaatctgatgatttacacaaatttaactttttcctattccctgtaattcccctgcacaatgctggcatattattgactaaattaacaaattagataatcagttacaccccatctcttagtttgtgtcttgaataagtaaataaatgttcggtcaatcgatttgcattatacccaaaaatcccttcaggataaggtggtggtggctcaggtatgtgactggaaattgtttaaacctggtaggctgggttcttggacgtaagcaatggcgagtagagacttgtataaaacctgagtcctgctgtcggtgaagtgtgctctgcaggagggcagggacctaagctgctgccacaggtgaagccggactgccacaccccgtcgtcataacaacctcagaagtaatgatttacaaaatgttgtcaaatggtgcttccagttccaatcgcttaaatcaccaacagtcaaaaccaggagtcaacaggccaaaccggccttcaggcagcgctcttaggtgtggcaggttttagaagacaaggatctgattgcaagggggctggggaggggccgggggctgggatacctgtcttgaagctgttcccataaaaagcacgggacctttttcttatgttgatgtatatataggatggctgaggtcatgtttatatattaagaactttttttttaatcgaattttttaaggataaccagggtggggcgttaatggctactggagcggctaaagtcctacccattcccatctccactccagcagccacttctgttaaaacaaaacaaaacaaaacaaaacaaaacaaaaaacaaaaaaaaaactgcttacatttctttacctatgtaaactcagacttggaaaatattcatccaaaaaagcttgagaggctctctgcctcgccaggatcttgctgcctcaggggtgttgtgaaagttaaatgaggaagttgtctgcaggcaggcattaatctcctaaaagctacgaggcaggaaaatagggtctggagacagggaacctaaggccgatttaggctgacttcctagaactaaatcaaaaggaaaaccccaactttctagcccaagtaacaaaaggaccagaagctaatccctcttctgggtggcagataaaaaattgaaagtacctctgactggtccccgcgggcaatcagtcaggctggtggcaggccaagtctttagttgcatggggtataacttcataactttacttcagcctctgattggtcccctcctgcaaccaatcagactgatcgctggccactacttcatttacatagggtgtacaccaggtaaccaatgggaaacctctagaaggtatttaaaccccagaaaattctgtaattgctgcttgcttgggcccttcctaccgcaaggagtgttctttgatgtacaataaatctgtgcttttgttgcttcattgtttccttgctttgtacgttttgtccaattctttgttcaaaatgtcaagaacctgggcaccctccaccagtaacagagctcctaaaaattatttttaaaaattttatggtgaagtggcctggcgcggtggctcacgcctgtaatcccagcactttgggaggctgacgagggcggatc

SEQ ID NO: 2865 - DNA, 4001 bp, Homo sapiens
gtaacagcaactaaaaggctaatagggctacctcaaccacactacgccagctgtggttacctctgcacggccccttggtcccaacaattcagaaactccaggaactgacctggttgcttgagttgtttgcttatctgctgtgtcttccaatttatcgcacaacaaattgcttaatagggcgtaaatctcttggctcgaggcagtagagcagtagttaggagcccagacctcagaagcaagcaggcagaggttccatcccagtttcactatcatcagagggccctcggacaaattaacttttcttagcctccattttcctacctgtaaagtagaaatacaacatctaccttggagagtactgggtgaagtgacctaatgtctgccgttacagtaagaactttgttatcttcatggcagggtgaatcactttcactttatgaggcagtctgctctatgtattgctcatatttaggcattgattcctctaactgagtaattttgatattttgggccaggtaattatttgttgtggggtcagtcctgtgcatttagcatgtttagtggcatctctggcctctactctctagtcagcagtagcacccctccccaagttgtgaaaaccaaaaatgtctccagataatgccaaatgtcccctggaggacaaaatatcccccagtttagaaccactgttctagaacttcctagtgttgggagtccagaatatcatagcactagaactacttttctggaaacttagtcattggttccttggtagtatcacattgatgagtttctttttttaatggcctcatggaaaagttgggttacttataaaaattactcatatcctgctgctgcaagcattaatttccctctatataaatattttaaaatgtctttttgtcatcaggaggataagaggctgatatggtttggctctgtgtcctcacccaaatctcttcatccaatcacctcccatctgttccctccctcaaggtttaccccatgctgttgacccccagctcctctgggggtaccctttggtgggtggccaactgaccctacagaattcaaaatatcctcctagcaaatctatgattctcaagttcctggttgaccaagtcagggaggaatgataataactgctatggttcattgagtgcctaacatgttgtaggccgtttcctaggatctataaatatttatcttatttacaccttacgacaaaattatcttcactgtatagaggaggaaacacattcagaagctctgtttaattggctccagctacagttgtagtggcaattccgggactgatacccagaccattctgttctaccactgcagtctgtattcccactcaactctgggctctgcatatacttctctacattaccagttccttgtatgatacttggcattatgttgatgtttagtaaatgttgtacagcaaagaaggaaaaaaggaaggaaagaaggaagtctccactgtagctccagagttctagtgataattggattaatctttgagacctctgaatcgctggggcaaaaggatgatagcaattataataatacataatattcacacttccaattttgataacattacaaagttttgggaagtgtttatgtaatatttatctcatgtaattgtcaagatatttctggtgtagagtagaggtcataactatggtcacttgccagagagtgaccagaactaaaactctctgaactctaaactgtgtgaaagagaaggaagaactgcaaagagatgaacacattatcagtcgacagcaggcacaagaacactttatcaaactttctctaccatatcacaaagattcaaaagaaaccaagaaaggagaactagttttgtctttcatacaccatgcacaatgctttatagtaactgcctgtcagcagccaaaggaaaatattgcaactcgagcgctctccttgatcacttctgcttttctttttcttcctgagtttgttttcctagtaaaaaagttaaaataggattatttaatttcacttctcttattcaccttcctctgtttcttaaaaataaatgacacagtttaaaaaaaagaacagaaaatatctcaatattattgtgaggtatactttttataagcaatgtagagttctttctagatagttcctcccagaccagttgattttatttccacataacttcatgaagtgtttccttttagaaagcgataccaaagctagtcaaccacactgtcaggagtttgtagaatctttatttacttccaatgtgttgcaattgtggcccaagttgaatcaacaactatgttgtttaccaaaatacatcaaatagaaaacattgagcaatgattttctaaagtattctctttttggagttctcttgcatggctttctgaatactgaaagccactgaacatgtatgcctcttgtatatttgaatattgtaaacccggttgacttaacacaacattcctttttcattttttccttttcattgaagtaaaaaaaaactggtttttgttttgttttgtttaaaaaaaaaaaaaaaacccaggtggcttttagagatttcttccacacttaaaaaaaaatgaacactggaacctattgacataaactaaaaaattatgtttctgtgagaaatgtgttcaaatggtccacccagaaatctgaaaaaaaaattttttaatggcaccaagggaccctacattaaatgtgcttgcattaagcaacgaatgcttttttgagagtctgactgaaataacaattataataattattatgctgctgatgatatagttgagttggtatttatcgtcgtgggagggtaagttcccttactcaatggatgaagaagctcctcctctggttagttacatttgcccttgattcctgcttccctgagggcaggaggtaatccttggcagccagactgtgctttgggtactgggacagcgaggcatggagttcgtgtgtacttccactacagattcactcagacagcctcctcaggatgtagcttccctccctcctagcagaggtgtaccaactgcctcaaatagggaagatctgctggatttacattttgcatttttagttctaaggataaaagcatctctgattttcttttgccttccttcaaaacgtttaaattataattcaccatcacatccctaactattcattaattatcccaagtccctcctaggtttattattttgacaatgtttcctgacagtattagcaggttacaaattattgttaaagctatgattactttatttatggtcactgcataacaattgctatctgggaaagattatatgttgtgtacagttatcatttgtagtcacaaggctttaaggaaagcttagaacatagaacatatgtataggttccaaaagtgtgtttaaaacttcagtatatttcagccacagtgatctttgagcagaagaaaaggtctgagttttttgttgttgttgttttttttttttgagacggagtctcgctctgtcgcccaggctggagtgcagtggcgtgatctcagctcactgcaagctccacctcccgggttcacaccattctcctgcctcagcctcccaagtagctgggactacaggcgcacgctgccacgcctagctaattttttgtatttttagtagagaccaggtttcaccgtgttagccaggatggtctcgatctcctgaccttgtgatccgccggcctcggcctcccaaagtgctgggattacaggcatgagccaccgcgcccggccaggtatgcgtttttaaacactgtcccttaagacagtgacatttgttataagagttttaacaccagttcccatttcctactcttgaaatatatgagttaatgatttttttgtgtgtacttaaacattgaaatttgttctaaaatctgagcaccctctttgaatattaaaaatagaatagaaaggtggtataacatttaactttgatttg

SEQ ID NO: 2866 - DNA, 4001 bp, Homo sapiens
gtcaaatactgaaactctgtgagtgagtctttctgctttttaatctcagatgtagagtaaattgatctatttttcttattatactttaagttttagggtacatgtgcacaacatgcagtttgttacatatgtatacatgtgccatgttggtgtgctgctcccattaacacgtcatttaacgttagatatatctcctaatgctatccctcccccctccccccaccccacaacaggccccgatgtgtgatgttccccttcctgtgtccatgtgttctcattgttcaattcccacctatgagtgagaacaaattgatctatttttcctgccttgctagatagtaaggccagagaatatttatataatgttctgtatggacaaagagtgatatcaatctacttcacatttatttttggttaagaattcagtcattcacttggcttgtttaaaatgggaaacatttagtatttttaaaggtgttggaattcaagtgttaaaaatcgaagccttatcaaatcattgcttttgagcttcagagtctcagctacatgatcaagatgtgctagaaaaaaaatcgcaaacatttgttttttcctttgtgaatcctaacatcttaatccatgagaatgtttcacacttcattcaaagccaataaaaattcttctagttcagaatacagtcaccatagcagaatctattgcagaatggacatccaaaggctcactactctaccttaactatgtaagacactcatactcaaattctcaggccattttcaaccttgcccattgaaaatgtgtgagctttagaatcattttgcagggagaagtgggtgccaggtatccagatggcaatttgggaattgcccccatattctcctgtacattttagtctaaattcctttgctgtatatggggcaggggagaatagccctttacaggagaagaccatggaaagtcaatactttcatctcagccctgaattcacccactgagacttaggcccaagggtcttctgggctgtgtttctcatgcacacagacagcctgtacttggaactactcagaagctatcctaagattagagaagtacacagccggtatttaggaaacattttctcgaaaggccatttaaaacttgagcatgttttatttagctttggttacctccctatcccctatccctgtcccatcctacccacttccatgtctctcacctttctccccaacttggttcttcacccactgggcagtcctcttgacattctctgggtcggtcacatccagaagcacagtacgaagtctctctgaggtttctgcctttaaagctgttgatcctgattcagtcagacaggcagcgattacatgaaatccctttttatcaaaagttctggctgccaagtttccaaagcccgagtcacatccagtgataaaaatgtacttatcagtgatgtcttcaatctttagttttcctttacgagtccacagaaaaccacagaggattaggaggcctagcacccaaaagagcatttttccccctgtgtgtgataggtacactcctttcttgtataatacaagaagatggtgtcctgagtgttcaaagtgaaaaagaaaattcaaattagaactaccaaggcattataacccaggactgatgaatttgagatattttaatgcattagtgtggataaatagaaagttaaagaaacaataactcttatttggttgtttgttgggaagatggccatctaaatgataaatcgttcctctaaagtaatgcaaaaactaaccaaggagtattcagagaaattaaatggaagagagggagaggggagccatggcaaaattgacacaagccattgagttgccacggccagctggagctatgtggagtgatggtattaatctcaggagtgaactcgtctatcaggaagacagaccctcacagtaaaatcttacctcttgctagttcatgaaattccactgcagaatgggcttaaaatctattagaaacaataattcaattttaattgttctgtcagactcccaattatcttcaaactgtcaggagaagaagagcattttttgttgccactaagatattcccaacttggcttccattttcttattttaaatgggttaatgtcaatcttcaacccaactctgagatcattacaccccaatgcagatgagtattaaagtgggaggcaacaagtgagttcaccaagaaagggcaagataaatgggaagtgactgagagggaaatgctggccaatgcaccatgtcccaaaccagactcccacatccccaaattctgtcttctgtgaacaccagtctcctgtgagaaaaaaatcacatggacaaaggataaagccaagcaaatgtatgctgtaaaacggaagctttgaccatatgtgcagcagaactacttggaaaattaattttgtcagggctagaggtagcctagggcctaaaatcaggcaggtagagggctttctttcctttttcttcagaagcctgcatctgcgtttcccctcagcatatattactcttaccatggggtactggtgccagagaaaagcaagccatccagaaagaggaagtgaacaagaacctgaggtttatgcctgggtgccaaggctgtatggccagctgcctcaggtctgagtaccatgggcccagccctccacactcagtgatggggcagcccaagagaatgagatcatcagctccctccccacagaggagcaggtctgtgttggctctctgagcctgtggaagggagaggggctaaagagagaaccacatgtgggaaagaccttattttcttcctccatgacccaaaaagcttcctcctgtgtccacgcaatatctttgcccttaatcttgacccaccctgagactccagaggggctttaaaatgcctcacagaggacaatcaataggccctgagttgaagttcagaacttgtgggtgcttttggaatcatggctgttcctggacactgagttcaaaaaggaactgagaggccaagcgagtttatagactttggactttattttctttctttctttctttctttctttctttctttctttctttctttctttctttctttctttctttctctctctctctctctctctctctctctctctctctctctctctctctctctctctctctctctccccctccctccctccctccctccctctctctctctctttctttctttctttctttctttcagatggaatttcgctgttgtcgcccaggctggagtgcagtggtgcaatctcggctcattgcaacctccacctcctgggttcaagagattttcatgcctcagcttcctgagtagctgggattacaagcacctgccaccattacaggcacccggctaatttttgtatttttagtagaggtggggtttctccatgttggccaggcttgtcttgaactcctggcctcaggtgatccacctgcctcggcctcccaaagtgcggggattacaggcgtgagccaccacgcccagcctggactttattttcttacaattatttcctaatttttccttcgaatccttttcaaaaatcatttatttttttctgcttgtaaaagtaatttatcctcaagaaaaaacatagaaaaaaagaagatagtaatgattataacacttgattcaatattttagtgcattttccccattttcttctgtatttgtaaagttttctttctagatcaagaaatataaacatacacacagaattttaaacaccacacacacagacacacacacactatttttactgctgtttgagaaacagactatttcagattaaaaaaaatcaatgtaatgtcttcttcacttctcaagaaaatttcgggctctgcttttatctttcttcccccagaagatctatagctaaagaaaaaaaaaatgataaaagaattgtcagttcagccgggcctggtggctcactcctgtaatcccagcacttt

SEQ ID NO: 2867 - DNA, 4001 bp, Homo sapiens
gcttactaaagtggtctctggaactgagaccgctgagaataggaaaggatgcctcctcccctcccagagtttgtctgtgtcagagttgatcacagttgacctggcgtatcctgggaccacagtggaaagtactgaggccgcaggcgaggaggggaggagatggtgctaatctagcctgccacccttcaccttcaccactgtagccactcaggcaggtacaaataccactttgctgatttttcattttcagtttcctcgtataccagtttgttgctatactcttctgatttcccagactctgtattcctcctttgaaaattgcagttattatggttcaactggaatgagcacatgaatgaacatatctgtctaggtagagtcaggacactgctatcaccctttaaaataagtagtggtcttttttctttaaaagaacaacaaacccactttgggaggccaaagcgggcggatcacttgaggtcagaagtttgagactagcctggccaacatcgtgaaaccccatctctactaaaaatacaaaaaattagccaggcatggtggtgggcacctgtaatcccagcaacttggtaagctaagacagaatctcttgaatctgggaggccaagttgcgtgtgagccaagatcgcgccattgccctccagcctgggtaacagcgtgagactccgtctcaaaacaaacaaaaacaaacaaacaaacaaactgaaatttactcaggttcacatttagggtgccccaaatgtgctaaatatgctttttcctctttagcatttcataagtatggcttaaatataaaacctcatagacaatacattgacttagagccacatgaagtaaggtataaataattaatactgaacccttcctgtgagcctgttattgtcactaagaggagaagagagcctcatgcacctgggtggtcatgcagtgttaactgaaaagggcaaagaaaaagttataacaatagttaaaattttgctacttaatgaactcgcctagtgcagccgtgtttcaaaaactttccaaatagacttaaaaaaagtcaaatgtttagactgatttgcatattggaaattagaattcttgccatctatctggcttgtccctcaattcctgtgggcccaactcatgggttcagtttcagtatatggcaccacagccagaacaccccctctccttgtccaatggtcccacataggcgatcagttaatgaagtcatgttagcagtgtcttatccagactgtaaccatatacacattcaaattcatatctcaagtgccaagttgtctttcatttcacctctttaatatacaacctttgaaagtgctactttgttcagaactcatcctacattgacttcagatcaaagatcacattaaaaaaaaaatctggaaccaaattgccatttgagttttttcctagttcctttttaaaacaaaggagtgcactgtgcattttattttaatgtttgtaggtggaatgtaagtatacagtggtaaggctagatgccaccacagacaacacactaaagatagagttatcctttttcttctgaatctgtatgcctcccatacttctacccaagagtatcttctccacccctttccaaataccaaaacataaggaggaaactcagatctgaggctgtctcaggagacatacgttaggcttcctgcaactacaccattctggggatggtctaagtcacagatcattctaagatgagcttcaactggaggaaagcacttactccagtgtgcaggctgtggtgggtccaacttctggagtatatccagtgtcactcttgtaaggctgaccaggagggtgaggctggtgatagagcatgcacagtggcttcttccttctggcataatgatgtaatcctctctctcaagtcattctcagtggaacatgtttctctgaacgactataagctgctatgaagacttcatgttttaaaagtgtactttatattttcttcctcctccctttgtcaacagggagttctcttatttctactgtaaagggaacctgtactttggttccctttttatacaaacaatgcctttgacatttgagtagcttctttggctaggcttggtcaaaaccaggagctttgttacccatttggcctttcatgactctcccagctgtaagatgaagcagggctaatcttttgtttttctctactatgcaatctttagatatacaaatagagatggagtcatgggaacatttgatagattctttgaataaagatttttcttatttacagagcacatatccttttagcttacccaacaagaggtcctgcgttgaaaagtgaagtgagaagtattatatggggaattattgttctggtagatggagcaagagagaagataggtgagaatgaaagtaacaaatgaacagaaacactgtggattttcagcaacttgaaagaaggaaaggtgaaggctaagaaaatgtgtctgtcacagagggagggaggtgggtgctccttctggtatgaccatcacatgttcacatgtgagcattaaaaatttttttcctggcttaagaatgatcttcctgccaagtttcctagtttctttcaatccctttcaaaaagaaggcaacttctttttcccagaatcttaactgagatgataaaatatcaaatgaaattaagagcagatgctagatgcagctgattgtgtaatatgcaagtactatccagtgggaaagaactcacggggattcatgaagtggggaggagtgagttagagacaactgtcttcagatcctgtttggcttgttctggactttgttttgggttgttctggacttcagaccctgttttgggttgttctgggctttggttctgtgtgaggcctatttggctaaaaagatccaaagatgaatagaaaggggcctttctattgaggaataattcactgttagctcatttattgctgagtaaggaatctcatagactttcccctctccttggagaacccctgattcttgctggctccttgagactatttaagattgtgggggaaagggcgatcttatcctttgctgatggatatgtgaattgctacagccttttttgaaagctgtccagaaaaaaaatctgttaaaataaaaagctactatttgagacaaaaatcctgctcctaggattctatcctatataaatgtatataagtgtatatgaacaggatggggcaaaaagaactgggagcaaagcaagtgcccactagtagtgagataactgaataaattgtggtacatatgcacagtggaatattattttgcagccactaaatagaacaaactcgagctctactatttgacttggaaggctttccatgacctcatttttgtaaagcaaactctgtgtacatatgtaaagatacctatgtgaatatggagaaaaatatgaaagggtatgcactctgtttttaatatgggttacttgcagatagaaggtgtgggcaaaacaaaggcaaggatgaggtaagagaaaatagaaaagttagcttttaaaaactgcactgaaaatgataggatctgacacaatgaaagcaagaaaatatcctgcctttcccccaccaaaaaaccccaaaacaaaaaatcctgaattgaatggggcctttatatccaatgaccaattcacagggaaaacagagaataaaggaaacaagtgcaactattctctaatcatcaaaccagcaggggaatctgaaatacaaacaaattgatttattcaatagaaataaattacacacacaaaatggagagggaatacggcacgttctcacctataagtggcagctaagccatgggtacacatggacacaggtggacataatagacgctgcagactccaaaaggggggaggttggagggggatgagggttgaaaaattaccttttgagtacagtgttcagtatatgggtgatgagtacactagaagtccaatatcccccattaca

SEQ ID NO: 2868 - DNA, 4001 bp, Homo sapiens
agattttaaaggacatccggaagaaattgacagaatgagccatgaaatagtcatccctcggtatacacaggggattggttccagaacccccatgtataccaaaatccacggatactcaagttctccagtcagccctgtagaacctgcatagaggaaaagttggccctctgtatgtgggttttgcattccaggaatactgtcttttcttttttctttctttctttttttttgagactggatcttgctctatcacccaggctgcagtgcagtggtacgatcatagcttactgcagcctcgatctcctaggctcaagcaatcctcctgcctcagcctcctgaatagctgggaccacaggtgcaccaccacacccagctactttaaacattttttagtagaaatgaggtttcgctttgctgcccaagctggtctcgtactcctgagctcaagcaatcgtctcaccttggcctcccaaagtgctgagattaccggcatgagccactgtgcctagttgaaatactgtattttttttttttttttttttttttttgagacagagtctcactctgtcgcccaggctggagtgcactggcgcagtctcagctcactgcaacctccacctcccgggttcacgccattctcctgcctcagcctcctgagtagctgggactacaggcacccgccaccatgcccggctaattttttgtatttttagtagagacagggtttcaccgtgttagccaggatggtctcgatctcctgacctcgtgatccgcccgcctcggcctcccacagtgctgggattacaggcgtgagccaccgcgcccgacctgaaatactgtattttcaatctgtgttgggttgggaaaaatccacctgtaagtggagccgggtagttcatacccatgttgttcaaacgtcaactttactcacaaaaatgtagagtcattaaaatcttaacaggcaagaaaaataacaggtcaaactgaattctgtaaggttgtgcaccaataattacctattatttctaaaatttagggaaatgaaataacaaatcagttagattagaacttcatctcaaaaaccatgcagcccaggtaaatttgtgtactgagaaacattaggaaaaagcaagaggatacttacgctgaatcaaaacaagttgtctcacaccaacccagaaaatgttacttttacaactagatctgagatatgcgcttaacattttaaacgaagatttactgactgtaatggtgtccaataccactctcccagagttttcaagggaataggaattaggttgtataatccacgtggttagattccactatctattccatctagcccgggaagactccaactatctttcttcaccatggatacagggacctaagtttggctgtaagagtattctttgtttgatagccaaggcactgaaaagtgactacacactactctcctcccaggcagatctctgactgatcacaatatatccagctccatccagatatccagatctcgtatcctttttcgaactcacatcgtccccacccttctccccaaaaaagccacacagacggagtcagagaacggagcctgatcccttcaatcaaccccttagcctgctccaagactgaatttcacgccccgccccccccggccccaacctgcagtttgagcgtggacaacctcagcggcagagcccgccttggttcggtatcagggcctgggatcctgctggtccagattcaccggccccaggcagactggatgaaacacactgggccgcgatgctcgtcagatcccgaccactcctggagcaggaggcggcagacacactgacaaacagggtgacgcgcacaccgtgcgcacaacgcgcatcacttgtccgcagaagtggaagacgtacctggctcgcagagttgggtcccgagccggctgtcgggaggtgctgcccaagggtcagaggtccaaactggacttggccaccctcacgattctcacttggagcagccctgcggtggcccagctgcagcggcacagtcccggcgccttctgattggctcagctacagcccctcgcgtattcgcttccgggtgagaggtgcccggtcgccccagcaaccaagtcgcacctggagctgtcctagcgcctagttctctcccggccgcagagctggccgcccagggggagtcgcagagtttggaagatctctctaacacctctcggccaagtgagtgtccctcctcctaacgacccgggcagagaagagctcctttaagtcgaactagcgtggagtcagaacctgcttggctcccggtaactcctgtgggggtgtgatatatttcctgaccgtctagccgaggggcacgggggaacccctggtctgggaatctagctctgattctgttgttaattcgctgttgagacacccgaggcgcgtgccaacctccctgggcctcagtttccgctatggtgccgggtggtctctgtgaggttccctctagctctgacgttcccaagtttcgaatgtagaacattttagcggcaattgaaaacagtccagtttctgatatgattacgtttaatgctctgcttcataggcacttaacgattccttccgaagtgcccttcattcactagacgttctgttactattagtactaaacacggagtcggacagtggggtgagaagagatttgactaatctgccatccgtgtcctggaggaactgggtgggataggggatcccgatacaaaagcatggttttaatagaaccttaagtactacagtaggaataggcccagagtgccgtgggggttcctgaaggagtctgaggttgacaagtaatgagaagaaaggctttgtgggagagctcatacctgagctggggctacaagaatacaatagctaatatttacagagtttagacactgggctaagtgctttaactagattagctcatttacttgatttgccccatctaaggatgaggaaactgaggcataagataattatttgtccaaggtcagagaaaatggtggagtctggatgcaaaggtaggtagtccgatgccagagcatgaacccctaactactacactctattttgccaactcttgaggatgaatagcagttaaccaggtaaagaagagaagggtgttccacccagagtacggcatggcatctgtgggaaactacaagcagatctggtaatctagttagttatcattagttaaacacttagaaagtagctctgacgcctgtagttccagctacttgggaggctgaggcaggagaatggcgtgaacccgggaggcggaggttgcagtgagacgagatcaagccactgcactccagcctgggcgacagagcgagactccgtctcaaaaataaataaataaataaataaattaaattaaattaaattaaattaaaaaataaaaaagaaagaaagtagctctgtgtccctgctctcttggaatttcacatcttgcagacatgtaaataactaattaatgagcacacatggcaatttctgtataccaccatacttcaccctttatccacaaccaaatcttagaaattatggggaaaaaataagcaaacataactaaattcagatttttctaagatttagtgttaattagtgtctatatttaacccctaaacgagatcagaattctagcaagattgctctctatcctccacaccatttccatattgatattacctgagttttagttacagattctttttttttctttttgagtttttaattttggtgtagatggaatctcactatgttgcccaggctggtctcaaactcctgggctcaagcagtcctcccacctcacccacccaaagcgttgggattacaggcatgagccaccagattctatttttaaaacttaattttttttattttattatttttttaagacagagtcttgctgtctcacccaggctggagggcagggtgtgatcggactcactgcagcct

SEQ ID NO: 2869 - DNA, 4001 bp, Homo sapiens
gttaaggatctttgctaataattacagcaaaagagaggggagtaataaagggagtgtactggaaatcacagtagacaagatcatgagactaaatgctagacttgatgattctgacaatatttatctgtatgggaatggccaaatcttttaagattattggaacttggtattcttatctgtaaaaattaggactattatttctaaaatatttcaccatataacttataagattatacccagctctcagatcctgtaattctaatcaacacatagaaagacatgaaaaaacagaaagaagtagacgaatatttattaggtcggctattgtaagaatttatggatttaagaaacccatattcagtcttcactttatcactgatgttttgttttcatgtcattttagtaaaaatgtttgctgatattgtcaagggatttcctagctaaaatataattaaaagatctctcagtgtcatttctcttctaattgcagttccatcacattaatctcctacaactaactgaaaatagcaatgtcattcacaaatacaaagaaatatgtctaatcaaacttcattgaaataacacaattacctcctttccctaatgtttggctgtaagcaaaatccaagagctgtatcttttatttttctttgtgttagttcctgttcatgtgtgggagaacattggtcagtgactcacattactgacacacagccagcacagctggataggcacagaatgcatttcataataaaagggacaaagaaagaaagatagagaaaaaagtttatgtgtttggtttattttaaaaatctatacagcttaatgctaaaaagcaagaaccaaatttttctaaacaaacagcttcaaggaaaaataattttggagggactaattaaaattactttaagaactcttaatatgtaaaatacttctttaaggcagctattccctgtggaaatcttaccctctcccatgaaaaagaaccagcaatttatgactgtcatgagagtaaaactctagtgagaatttagaagtacacacaataaaataaaaatactccacaatagttttgaactcttgaagaaaatgacaggaatagtattatgtgtaaccaaatatatatatatacacacacatatatatacgtatatatacatatatacgtatatatatacacatatatacgtatatatacatatatacgtatatatatacacatatatacgtatatatacacatatatacgtatatatacacatatatacgtatatatacacatatatacgtatatatacacatatatacgtatatatacatatatatacgtatatatacacacatatatatacacatatatatatatatactcagaaatatctgcactccagctttgaaaatgtgagttagctgacacataacaatgtcaaagaagacacatttttacagaagaactttccttaaataaaataacatttcccaatccattaaatgtaaatgacatagtcacttatcatatattttgtctatgctgtatagaagttaaattaagttgttcgctgtatacttaaaactaaaggttttaggatatgaggtactttacagcatgtctattatcactagtaagaaaagactctataaatgtaaaaggaaagatcacttcttcagactatgttaatagagtagactgtcctggcctaaaatcttatgattgagaaatgagtgccatagccaacccaccattttgacagagctcacctgaatttttccttctggtgatgagaagcaatgccagaatttctactccagccatcttcacacttgtggagagaaattcaatagtgatacatttgtagtgaggagaaagatgtgttagcttaacaactgatgcagggtctatcttttaaggaagatattgtgtttgtggaggaaaacatcttggaaggtatttagaagtggaaagtaagactttaagggcaagagaaactctgcccatgtcaagagacacaactaaactgctttgtatttggaaatcaataggaatttggagagagaaactaaaaacatgagtaatcaacaaaagatgatttaacctacatgatcggaatctgaagcccaagatttggaaggagagagggaactttaggaacatcaatatctaacatagaatattacatcttgagccttttggcagtgtaaatctctacatcccctataactcagtagtcctttacacatataagagtttctataagtagtttggcataactaagaaaaagtatagtgatccacatctaaaacaatataatgcaaaacataataatacatattggacatttagattatccctaaactgattcacactaagcaggacttaagagctgaaagtgatcataaattctgatgaaatttgaaaattcttgagatacaggttgaactcagtggaaaatacattgaatcaatcttactgatctcaaaaggcagggaaatgctgttgaaatttagtttacataattattttctctttttctggctgtccttaaagctaacacttggcatgatactaaaaacattgttttaagagaaaatctattgtggacaaatacaagctttaggaataaattaaaatgtttagaggaattaacacatctgtgtaaaattttacatgtgtgccaaactggtccccaagctaaaactagtgacatattaaaacccaacatattagctcacacatttacaatgaaatacaacacttttcgtaatactatagtttgtgacagttcaagaagtgatgaattggaaaacatgctatgataggcatgggcaatttagagctcagtctggacaatcggtgatgattaatcttaagaggatttctgaagttcaggcaacaaatgattaaaaatcaacttcaacaatagtcaatgatggctgaatgtaagatatttaaacatgcattggaaaatacaatggaactaattgtagtcatggacattgagagaagacttctggattcagacaaatttttgctcactcaaatccctgtaacattgtttaccttatattacatgtcataaattgactacgttatgaaataggaagggtaatatctatttttaaatgtaataattataaacaatgtataaaatatgtgacacaaagaagactggcagtttatagtgactattgtattattattttgattttagtagttgaacaggaaaaagagagaacagcacagactgaagtatttatatctcaataattaaacttacttaatattttctattatacatttacctaaaaagtacagggctgatacttccatatttatatggaataacagttcttaaaatatataaagcaaaatattattgaaataaagagatgatcgataaacttgtaaaattatcatcagagatgtaaataccacctctacaataggtagaccaaaattagtaaagatacaaaataatttaacaacacaataaacttgaactaattaaaatacaaggtctctatcccaaagaactacaaaataaatatcctttttaagtagaaaaaaaattcactaaaaatatatatttcaagccataagacaagtctgaataaatttcaacaacagaaatcattcatagtacaaaccctgactacaaaggaagaaagttagaaatctcccaattatttgtaaacaatgcactcctaatcaacccaagagtcaaagaagaaatcagaatttgcacaaaacagctgaaagaattctatcacttatctattgatgtgtagtgatccaccccaaaatttagttgtttaaaataaaaaccatattctttgctcataattctatggctccacagttggagttgaggaaaagggagtgttgtctgagcaattcacctgttggtctcacatgtaggaagtttatacagaatgtggatgactgatttcttctccacatggtcttatttactagttagctagttcaggtgtctttacttagc

SEQ ID NO: 2870 - DNA, 4001 bp, Homo sapiens
ttctgcacagcaaaagaaattatcaacagattaaacagacaacctacaaaatgggcgagaatattcacaaactatgcatctgacaaaggtccaatatccagaatccctatggaacttaaatcaacaagcaaaaaacaaataagcccatttttaaaaatggccaaaggacatgaacacttctcagaagaaatacaaaaagaaaaaaccacgacatacaagcagccaacaaatatatggaaaacatgatcatgactaattatcagagaaatgccaatcaaaaccacaatgaaataccatctcacaccagtcagaatggctattatcaaaaagtcaaaaaacaacagatcctcattaggctcccttggaaagggaacatttaaactactgttggtgggaatgtaaattagttcagccactgtggaaagcagtttggagatttctcaaagaacttaaagagccaccatttcacccagcaatcccactgttgggtatataaccaaaggaaaacagaccattataccaaaaagacatatgcagttgtatgttcacggctgagctattcacaatagcaaacacacggaatcaacctaggtgaccatcaatggtggactggaaaaaaaaaatgtggatgtacaggatggaatactatgcagccacaaaaaaggaagatatcatgtcctttacagcagcacagatggagctggaggccataatcctaaacgaattagcacaagaacagaaaactaaacaccacacgttctcacttataagtgggagctaaacattgagcacacttacaagtgggagtagaaacattgagcgcacatggacataaacatgggaacagtcggccgggtgcggtggctcacgcctgtaatcctagcactttgggaggccaaggcgggcggatcacgaggtcaagagatcgagaccatcctgactaacatggtgaaaccccgtctctactaaaaatacaaaaaaattagccgggcggggtggcgggcgcctgtagtcccagctactcgggaggctgaggcagaagaatggcatgaacccaggaggcggagcttgcagtgagccgaatcgcgccactgcactccagcctgggcgacagaatgagactccgtctcaaaaaaaaaaaaaaaaggtaacggtagacactgtagactactggaaggaggggagagatgggggatgtgggttgaaaaactacctactgggttctatgctcaatacctgggtgcaatatacccatgtgactaacctgcatgcgtatcccccatatctaaaagtttattaaaaaaaaaaactctctatgatcaataaaggagataaagtgtatcactgtggaaagcgcaaacgtcaaggacatgttataattaagcggctgcccttcaagattcccgaggctccccatccctgccagtcctgaacatctcgatcaagaccctagagaacgcgtccacaggtgacccgagcctcgggaggcgtcctctctacagcaacaggctctaattctggtctcgctcccctcacgccatcctaggctacaagggccccggcgctataagcgcggcctgggaggccgggtcggtcaggagcggagagtggggagctggggacattgagggagatgcgggacagggaagacgcgtgggccggggagcaacgccagaggcggaagacgctcgtcccgggccgccaccacaggtgccgggcgaagcgccgcggagccccccagaggccagaccccgggtcggtcccgagggggtcgtgcagcactaggcggtgcagggggcaggcgagtgagggcctcaccgtttctccccggaggccggcgccgccgcagtcccgcagttgctaaggagaatgctcttccgggtcacgggcgcggcgttctagagagcgacggtggccgggcgaggccgagagcgaagcgcgcggggtgtgtgcgcggtgcaggagctcgtagtcggcggttcagctgcgacaagggcgaaatggccaggccaggggccgccgcgccttctccggcctcgctcgcggggacaactggctgcaacggttggctcccagtgggcggcctctgagacgccttgtgccaggcgccggctggctccgggcccctcttccaccggaaggagccttccagacccggctcctgaacctccaggctctgctccactgggccaggtcttgcacggcagacgccgccggcccctttcctgttacaaggctttgctcattctttcatttactcactgctcatttattggacaactgcttggggcgaggtgcagtgctggcactggggatacagagatggacaacccccgcatggtccctgccctcaggatgtgaggctgatggcagagcaagcagatgacgtcctgcacgtggggatgatcgaaggaaaggagactaggggagcctgcccaaggggcccacccagacacgggtggggagcagctgatgttggagacgtcgacctagtataaagggttgggaagagggtttcaggtgagagaggaagcgcagccgagaaagcccccgacagttcagcccgcccagggaagcgtgttgagaggaaacaatcgttaagtacgggacctaggaaacaccaatattgtagatgtgagcaaaggaaaaggaaatccaaagagcagccagaacgttcgggagagcacaagaggaaagaatgccagtgaggggatggccgccattctcaagctatggagatcaagtgtccattggtgaccatagaaaaatcaaacttccctttgggaggccgaggcgggcggatcacctgaggtcgggagttcgagaccagcctgatcaacatggagaaaccccgtccctattaaaaataataaattagccagacgtggtggcacatgcctgtaatcccagctactcaggaggctgaggctggtgaatcgctttaaccccggaggcggaggttgcagtgagccgagatcgcaccattgcactccagaaaaaaaaaaagagagagggaaggaaagacgggagggcagggcagggtagggatcaaacttcgggaatacaatgtggacagatgcttgaaccaccgtatgctccatattgaaaaaggaaaagagatgcattaaattgtgcctatatttctctttttttttttttttttttttttgagacggactatcgctctgtcgcccaggctggagtgcaatggtgcgatctcggctcactgcaacctccgcctcctgggttcaagcagttctcctgcctcagtcccgagtagctgggactacaggcgcgtgccaccactctcggctaatttttgtatttttagtagagacggggtttcaccgtgttagccaggatggtctcactcttccgcccatcttgtcccaaagtgctgggattacaggtgtgagtcaccgcacccggccagtgcgttgcagtagtctaagaaaattcagggtttcccttagtaactatgagctccatgaaggtggaaaactttgcatctgcagtacctgccacacacacaggcctcaatcgatgtttgcttaaagactaaatgaacccaaggaacctttgttttttaatgttcacacagacctttctagaaccctcaggaaaactgtgatttcagcaaaacttgtctttgaaatgtagagggtagaggaaacccagcaaggacaggaggcagagggtgtcaggcatccagggattcagtggataggagaggggccagtggggacaggaaggggaagacctagaagaggaagagaacaaaggattgaaataaaatctgtggccggatgcagtggctcatgactataatcccagcactttgggaggccaaggcgggctgatcacttgaggtcaggagttcgagaccagcctggccaacatggtgaaaacctgtctctactaaaaatacaaaaaattagccaggcatggtggtgggggcctgtagcctcagctactcgggaggctgaggcaggagaactgct

SEQ ID NO: 2871 - DNA, 4001 bp, Homo sapiens
cattcttgcactagtgtctgtttgctttctccagctctgctccaaatcccggaccggacgtcggaaacccgcgcccgccgccgtcaggaacgctcacgggctccccggagtcttacagaaagccgggaaggaaggtcccgtttcttctctaaggtctgggacttgagaggtgagagggcggaggaaaggatctccccccacccccaaccggtaagaaggaggaggaggagggaggctgaggcgcggacccaggccccgagtgattagtcacacaatttaaaggcaaaggagggattaagcccggagtctattgttccagttgtttaggcacgtgtgacctctgagttcccaaacaaatcgtctggggaaatccttcctgcgccctaatcagattgtccagggacagagggccggacggcaggcagctcgggataccgagagcagtgacagagctagggcagagggaatgagggaggaaggagacacgctgagagccaggggtggacacaaacacatacacacagtgacaccccgaccctgagtcccagcgagcaacaaatgaagacccgggcgcaggccggccgcggaaagcctgcgtggcagaacggagcggcagcggcgaggtacctgagtctgtgtgagtcccaaagaggccgcgagctccgccctctccggcagagctaggtactgagtttgctggaacctccggttcaaagcctgcaactgcaaactggaataaatcgtcctgggtttacggatcttttttcccttgccattgaagcgcacttcaccgccttccaccaccgtgctcttctccgagtccgcccctggagggacagcagaagtagggcccgttgttaatacgaggggccgcctttagtgcgaacagccgagagcgagtggctaccgaagggtggcggaggcagcaccagggagagaacgttcaagaaactctgaaagccagggaagggtcccccaaaatccgagggcctgtcccgggacgctgcaggagggatagagccgttcccaggagctcagctcctgcctttgcagggaaagtttgctatttttgcaggcggtagttgaggtttaattacccttaattgcatacattgtttatagcgctacgcaataaataattaccgagactaatacgtgcacatgtgggtttctgttttccagcggggcattgtgtgctctgcacaccgagccgcccagaggcccagccagtgccaggagacgctctgggatttatccttggctggatagttgcaaattgagggaatttttaaaaaaatttatttgctgtgacaaggatctatagattgatattcgaaacctccactgctcccgcgccctccccacccccaccccacctcgctctcctctcttctctttctctctctctccctctcctcttctcccccgctccttctttccctctctcccttgtacctcctcctctccctctccctggcaagcgcacgtacctgggtcctccaggcggctctgggcgaggctggcgctgcccgggtaggactgcaccgaactgatgtaggggctggatgcgtggctgctgaccgagttgacgtaggggtagcccagcggtcgggagaaggacgaggctgagctgtaggcgccgtcgggctgcgaatggcccgccgagtgtaaacagtgcatggagtagtgcccgtgggacatgggagaaggagacatttgctggttgggcggcccaaactccataaacaccgccttgcccgacacggggctgttgagactttctggcatggtggtcatggtcatctcttctcgcggggtctgggtgtgggactttctctcctctgcttcccttttgggggtctctatgtttctcaggacaggaaggaacccaatttaagcggaacaggggttttcactttccattcataagaaaatggagtttgtctctttgaaaagtctaagcatgatgctgctgagctccccaaactcggttcaaagctttgactcagcgaaggtcataaatattcatgagctggcggagctgattggtccgctgtcttgcataatcactggggattggtccgaggcgctcgggctccgctggactagagcgggcgaggcggcccggcctcgggtaagacgcatccacacttcccggccggggctcctctgcaacagagcgcgccgggcaggaagcacaatgggctgcggcgtctgcgccggggcccctgcggcccgcggctcatcggcctcccgcctccctcgcgcgctttcctccccaggaaccaaccagcggctccgcgccgccgcccccctaccactgtccccacccttcagcggtccctaacaccggacacccgggaccgcttctcgtcgctgccactcagttcggcgcagagctagggcggctcaggaggagactgacctctgcctctggagcgcggagtcgcgcactgggggcgcccgaggcggccaacagacagaggttctcctaagagccttgtgcctagcgcagcgcctatccggccgcgcctccccggtacgctctgccgcatccctggagtcggggcttaggggccctccctgcgaactcactcactcggccgctgcgccaacgccgctgtcgctccctggggcccgctcgcattgctccaggcccagctggccactccagctcgaggctgcacgggtctgattaaagcagtgcgcgtggagagccaggaacccgcgcttctcctcccaggaaaggcggctgcaccgccccctcccccaacacacacatcctctttccctcccagccttcctcctcctccccctcccttctccactccccatgcgcggagagccccgggctcactcgccccgagagcgcggctcagcgtggagcccagggggcctaggggctcagatctgctggagccaccgacgccaggtggtcattttccggcctcctgaggtctagcgcgacttccagagtttaggagtccctgggggacaccgaaacccgcagcaaacccaggcctgtggtaggctcccttatctatgtgtagacgtctctcgttgccacccaggatcttcctcacctccagtggccaaagcgcgcgccaccaggcctagggggcagggctagtggaggcaagatctgccgctgctccttctgtcttctggggtgctaggtacaaaaaagtgcacaagagcccccaccccatcgccactactaccaatacagccagtccctcgcggtgtggcgtacaccaccctggctgtaagtggatgttggttccccatcccgccagccccacggtgaatcccaaattactttgttaggtaattagaaagtgttgataattatttctttcataatttagcggtgtgacgggaacggggaaatgatcttgtgaaagttcacacgtgcagatgtattagttactgattcatttgattaaatggtagtctcaagtgctcagatccgcagctgaaggcgccccattagcataacactgatgtttaattttcatacgcataattagccatatatttaacactaatagcaacatgcagcctttcagcgttaaacagcccgggatttgatctggcctgagctgaaccttcatcgctgcaccttcccctgtctggagtgtgcaatgatcacaggacaaacctctgtaatcaagcacattttggcagagggaacaccaataaaaatgaacattcaaaacaaattacatcggtgctgtcgttacagatattagtagagggggtttctctttttttttaacttctgtaccagctgctgctgcccgcagaattcctctcctttggtttaagggcacaatgctgggggcagaaatatttcaggcagagtggttggagcaaaaagaaaagcaaaagcaaaaaaaacccaatacgccaaaccaataacgggtttgccaacgtttaaaagattttttttttcttaatcaccgaaccacacggtgaggctttgtagcaacagccagcta

SEQ ID NO: 2872 - DNA, 4001 bp, Homo sapiens
ctgccgccactgcccggaccaccgccgcccgccatccgctgcggcacaccaaagtcccaggaggccggcgctgagactggcggcgaagcacaaggtggagaagcgctggccccagggtgctgctccgaggggatctcaccacttttccacatcttcttgaacttggaccggcggttctggaaccagattttgacctttgaggaaaaagacctgagcattagtggaggaacctagtcttggggcagtaggggttcgaagaggagaaaaaagaaggcagagaaaaaccgctggctagcggtgggcagcgagcgccctggggagataagaggatcacgggcggcggccttcgaggctctgccggttcctgctccctggggaggtaattgccaaaaggccaggactgctggtgtacgtgcactgtgatgatggtgacagcgggagggtgaggagggccagttatttcacccgcttaatcagtagcgagaggtacgggatttctgtccacccggtccctttccttccctcccacggcggccccttgggggtttccagctttgggcctagaagcttacttagggccgctcgaggcgcaggcctggaaatccttaaaagtacttaaaatgaactttaaaaagcattgtcctaaacccgcctgcttcccagccatctcaggcccgcgctctcctcgcccctgcagggcgcgagccccacctgagtctgggtgaggcccagagaggccgccagctcggctcgctccggcaaggccaagtattgagtcttttggaaacgccgctgaagagccgccagctggaaactggagtagatggtgcggggtttccggactttctttggcttcccgttcactatccgaatttcaggctcaaggtcctccttctctgcaacgataaagaatcgtaagaacagcgcaacccaggggtcctggagttcccgccctcctagagggcccggcgggggggacttggcttgagcaaagaggtgggtgcactgaactgtggcgccacgggcaggcgcaacttcgcagcgtgcgatcggagccgccaccgaccccgggagctgtaccctccagggaagggggagacaagtgcacacccaagagaaagaagctggtggcaaggagatgcccttatgaggcaggcagagcacgcccacttggctcttgaggccaccaggtcctaccaaaggagagagggacgtaaccggcgacctgcggcagattggaggctggggagggtaaagggcacaagcgggcggtgagcaggcagcgtgaaaatccagagctttcgaaggccccccgccccaaacacgtttacccatccatcccattaactagaccgactcggcactcttgacttcagcgttatgcataccaggctcgttgttggctggggacgaactggttccatagggagcgtaggaggtgtaggcggcggtgtagcccaggtcatagctgctcttggcggagtaagggacgttgttgaggccgctggcttggtactggtaggaacccatgtgcgcgtagggcgagcccccgccgccgccgccgcccgccgggtgctgctggttggtgtagtagctgctgtcggtggcggtggacaccggaagggtgggcgactcctggggcttgtggaggctgctgctgctgctgctgttgccacccgggccggcgccgccgccgctcgggggctgctggtgctggtggtacgtgctggaggcggcgatctgggtcgagtgcatatcagccactagactgtcaaagactccagtcatcctggcccgagacgggaaagagcagaggtggcgggcgtgcgggggaagccaggcgcctcctctgtctctcccggtcccctccagcagccaatgtaattacgggggtggtggtggggaaacaagaaaggaggcaaccgtctaggcgcctcctcctccgggggaggcgatcaccgtgcgctgctcgggacagctgcctctggtcgcatcctctttcggcctctgggcccgctcggctccttgcccagcgcgagcgcgggctctggcggggggcgggcagtggagggggcaggggtggctgggccgggtcggggctctgggaggcgggagcaggtgagcggccccgagcggctttacgattgtctgccaggcgggctcctgaagtgtgggcatttaacactcgtcacgtgagcgctggcgacgtcacctagcaacagccaatcagaagcaaacggccgcggagctccgggaacgcccggccaaggggcgggcgtcacatggtgggcgctgtggctgcggctgcggctgcagcggccccaggtgcaaacagactgccgccgaatgtgagcagcgaggcgaggggtcgaggtagcgaggagtcagggtggcccgcagcaggaagacagaaggcgtggagacagactggcgttttgcctcagaggaagaagtggggtcccctctcccattctgtgagcaagtgccagttccagtgattcgtactttcatgtccgaggtcagttttcaaacacattaaagtacatcggtgcccagagtccagccagctctatcttcacttttcctcgaagtgtctggcatttattcttgttagccactcggcacttgacataatcaattgatttaattatccacaaaccacgtgtaatgctcgcttcttaaccaatccgcagggatattaggacaattaatcatataatattgaaacgggttttccttgttgcttcaaagagaagctacataaacttaaaggtattattgctaatagtatatttgaaaccactttccctggtactttcccgacacgcgagactctgagtaattatatacgtttgataagtaaatgacaccctgaaagccatcccgaggacttcctccttcgggtggaaaggttcaccagttgtccttgaaaattcgatgctcttgcgaaaaaggaaataggataataggtgagattatagatttatcaagtagatactagatttatcacttctctgtaaatttacaacaaatataaaaagttttatctggtttgttgaatttaatcctgttttacagttttgcattttaggaccctgttctaccctatcattgcaatttttttcttttccctctgttttttaaaaaatcggaaatggtgacttcctctgtctctataaccttgtagttggaaaccttggcccgacggtgatggactgcacgacttgctggactcccaagtccgaagttcctgcggcagcgcttgctttgtggcgccacctggtgggcagtgtgcgaggttgcggggggcggggtagacggtctaatcacgcccaggcgccagcctctgaaaccccccaaaagaacaaaatagtaattaaaagccacaaaattgtgctagtgcgcaccatctgaagcaccctttcctaaagacataacatgtcgctgaaagaacttgttaaaacaactgtctgatagaaaacaagttgataccttcaaaaatatgatctttggtcttcttccccataaaaagcaagtgtgtaattaaaactccagcattcacacagagaaataatgagataggtaatgcgcctttaagtctacctggatttagttcccagcttttttttggttaaggaaggcccctagatggaaagcgccagcttatgagaaacgttggaggtggagctcacctccacccacctgcattgctttatgcggttctctgcctactttgtgggcctcagctgcaaaaccaacctcttgatattgaaacatgattgccttttggtgtttttttgtttgtttttgtttttttgagacggagtctcactctgtcacccaggctggagtgcagtggcgccatcttggctcactgcaacctccacctcctgggttcaagcgattctcctgcctcagcctcgtaagtagctgggattacaggcgcgcgccaccactcccggctaattttcgtatttttagtagagatggggtttcaccat

SEQ ID NO: 2873 - DNA, 4001 bp, Homo sapiens
tgcacacaattttttaaatacaaaggcatgtactttgaaaataataaaactatataactaaatataacatttgctaaacttctcagtgttaaatggtaccctaatatctaaaagtgcctaatagcatacatagttaagtatctgtattgtacataatcctagagaggacttatctgcctgaaaactttgttcaccactgtatccttcaacttaaacagtgcctagaacttaatatttgtttaataaatatttaccgtatttacaactacataagcagttattatcttttagcttttcattccttctttgtcagttcagagtctggacatgacttctatcctccaaagcaattttacaacttcctctgtggctacagaggctaaaacaatggtttttgaacttaccaaaggctctagttttataggctgctgtcgttttcttgtcttctcctgagcttttgtaatgtgcctaaacgttaggatttgtgtatcagattcattttctgtggatgtcacataactcactctttgtttggcttttatattattcagtcttgaaagtgcagaattttcggcatactcttcaatatttgtcaggtcaaattcactatctgtggcccgaaaagtcatccttactcctgaaaagaataggtgaggaaaaagaaaatgaaaagtagatcaaaaggattggggaaggaggctactggagagggacttaaggactaggaagagttgaattcgctcacttccctcaaataaaacccatcaaagttaccccagtcttcccgaactgaggacttgaaccaaaggaataaaaaattagaaactgtgcctaggcttcaagaacccctgtagctagggtggaacccaggaatttgcatttcttgcaagttcttggcggatgctgctgctgctgctcatctggagaccacactggtctagatttggaaggacaaaaggaaatgtaattagtattgagatcaatgtttctcatctcctgcggaacttgttcaaaatgcagctaattctagtacacgcagtctgaaaaatacagtataggtactcaagaagaaacaaagggaaaaaaaagaattgagggctaatttcttacacagtgcttctggagctttaacgtgcaggacaatcacttgcagagcttgttaaaatgaaggttctgattcatacactttgagtagcaaggtcctaaaacactagaaatatgagccttttgtaatggtcttgcactctgcaccaccacgcacactttcaccccattagatgagtggagatacttcgaaacaccttccaaaatagggttagcacaagaggtcttgaatcaggtgtcggcagacctaggttttatatagatcagtgctggccaatagaaatatgagagctttgtatgcaattttaattttcaagcaatagcatttttaaaaaagaaataggtgagattaattttaataatatgttttatttaccatatacaaaacataatcatttgaacacacagtataaaaattatagtgatatcttatgttgtcttttggtaccacgccttcaaaatccagtgtgctttttacatatgagcacattgcaattcagactagccacacgaggtctaaagattaccgtatttaacagcgcaggtccagatttgaccactcagcgtgagatcttggacaagtcttttgatatcgctattgctcactttccacccctctaaaatgatgggcggatagcagacaatcactgaaatgcctttccattgattttctctgcctctttgagcctttatgttctccgaaagtcagactttgtttctggcccagaaatcggagcccaggcccgagggtcggttcccaggactcaccaagtcaaaatacagcaaccaccgccgagggtctccagagagagcaatgcctggtcgggagtagaaagtactcggtagcgcggaatgtttcctgttgctgcgtagcaaccagctggcctctacggaagcactgcgccactgagtaacacgtcgccaggcaacgcctcaaccagccacagctttcggtccaggagcgcgccaggcaatcgagccaattagtgtctccgaaacatttcctacttcgctgattgttggagaagccgcacagcctggttcctcctctgcgctgggaattgagtactgtgccaggaggtgtaggcagagcagccaaaggaggtggttaattctgtttgcttcgttgcttatcgaccactcacacccatctcaacctcttacaggaatttcttttctgttttccttcaagaggcgtaagactgacttgacgttcactttaatagaaatttatccgaaagagtcgagaatttcaggagaggaatgtgggttgtgtagacaaatgaggtcccactctccaaggaagcaaccactctgcatccctgccctacccgccaacctcctcccgagtgtcttaaggctcaagaaatgtggcctcctcttcccttaaactccactgtggccttccaactaatgtccttttccacttggaaggtaacctaggtgtcaggcataggatgagcccgtattacttggttcccgtgccccttctaccaaagcagaccctggatcttattctggcgtttaatctcacttaagttcccaagtgactgttgctaattttgtatggagcgaccccatcgaaggccagggcctgttgcttactcgggatgccttatcccagttactgatcaggggaagaaatcctttcacctgtcttgatgaatccttacaccacatggaggagctctggttttcaaccttgtctccaaaatgacataatcatcattttcttttgctcttttcggttgctctttgttaccttgatatttgtttcttgctctatgtgaagttctttacattattgtactcacagcctgcatcttctcaatcttaacatattcagttatgtatttgatatggtagtatgattctctaaatcacagatagagctaaaatggagattacaggtcacatagtccaactcccctatttgatttgtaagggaactgaagcccagagaaagcaagtgctttactccaggtcaggcagctagttgtgccacagacaaaactagaatgcagatctcccaatccctaatgagaaactggaaacagcaagagagtaaagtcagtttagaaaaaattttaaaaattctgaaaaacttcaaatgtagacaaaataaagattaattccccagagatgaaaaatacacacaaaactagtcagctagtaaaatgcaatcattgatataaactaataatggaaaaagaaattcaaagccaactcagtacatcgaagcataaagttataataacaagcaatgttagacacatcctcagaatagatttcatttcagatgtgcagtgaaaattttaatctgttcccttcaaagtttatgcaatggagacaaatctattgctcctcaatcctagactcccttttttagattaaggtggattgtacacaactgttaccatgtgcagctgaaagcattccaaaagctaagaagtgtgtgtgtgtgtgtgtgtgtgtgtgtgtgtgactgtggtgaagtgggggtgggaggattggaagacacagacatagttttacaaagatattactatatgaaacactactcatcaaatctctccaagcttattttttaatgtggcaagatgttatcttcattatcaactgaccacttactaaatcaatgtagcagctttgtgtatagcctgctatttttatagttcttatagataattgttacatttcattggttgtttcttatgtgccaagtactgtgctttatatttcccattcattttcttaagtactgctaacaaacatgaaattcccatttcacagctaaagaagtaggttacaaatggttactcacaagttcacatctttaatagtaaaaggaaatgcagttaaaatttttttagcattaggttaagatttatatacca

SEQ ID NO: 2874 - DNA, 4001 bp, Homo sapiens
aatgtcacataaaaaatggcatttccagaagtttaatccattctgtttgttttaggttaaaacataaaaactttcatccttccaaaggaaagctacactctaaattagcataaatgaaattctcaagattagtttttaaattacaaatcaaccaaaacagtgatagagggccctctgctgttcaaaaatagtaagtggaaaatggaaatcatgtccattcttttaagatcccgctgcctcttcaataaatcacaacctttctggagggggagtgagagactagggtgtcatttcccaacatcacttttataaagatgaagcaaaatttagaacttaacggctggtgggttttttgtggatactttttagttgtagatgggtaagttaggggaattgtgaaaaacagctattgagaaataccattggaaatgtggtaaaagtgtattttaaactctaacaacgtaggatatggttcaagatctggccgaagactaacttgggcaacaagcaaagaagctgctcaatatataataatggtgacagtaacaaatgttattttttaaatctgattacattaatatcatgtagaaaaaaactagtaagatctattaaacaattgctcagtgtttttggttacttgtatctgaactttttgttttttgcttgtcatttactcttttattattaataccaatactaattatactttagcatatgaatcagtgtccatttcttagttcttaaattatacttatttttttaaaaaggttcaaaccaaattttcttgagcatttcaggtattaattacttatttgatgaactaaccaatcaggatcttcacatagttctgttagtaatgtacaactcaatggataggagactaaatccgttttaatactgtttccacaataaattctaacactaccgaaaaaagcattataaagcaataaaaaagaaataattaccgtttaatattgtttaaaagctaaatgaaatttgcaggcttaaaaacaactgtttttcttccaggaggtttatagagtccttttccttattcatcactacgtagaaagctagagttattttctagctagccagaataatgaccacgtttaatatcttcccattctgtgctgatattaagacgactgaccattgttctgcctttctgttagttgctcttaagttcaataaagaaagaattcttagaagaaaaaggagagaaagacagaaaggaaaaaaacgagaaaaaaagagaaagaaaagcagctattgcaaagtgcatcttttatcacataccatggaatatcatcttaagaagtgccatatgtcacttaccaaggcctttcatgtatagtataatattgtatagttatggtatggcatggtatctaatttgaaattgacaacaacctcaaaaagaagaaaagttgttctgatgtttcccccgctctgcataagaggtgggagaactaaggcttacaaagactaagagatttgtccaaagtcacatggctaggagttggcttcgattcccaccttagaacccaaacccgctgcaactcctcgcagagccgcctctcacccaagcacaccgccattagcactctgggggtgctctgggctgtggctccccctgctggcgcgccgctaggcggctaggtttggttgttatgacgaccaagggcaaacagctgggaagggaacttataagggcattcacggaaagcgctcagtaacccaggccacaagtggggtgaaggaagctgtacaccgcggagtcacagctggggagttcgctaggcaggaggggcttccaccacttccgaaacgcctgggaagcgtcgcggcggcggcgagcctggcaaagagcagccctctcacctgctcactgctcatggctgcgaggacgcgctggcctcaccggtgcttctgggttgctcctgcccgcggaacccctaggacgatagaggcagggccccgggacttgcagcggtctcagctccctccgcaccagagccgtctagcgtccgggcagcgtttgttgctaagcaacgggcccgcgcaggttccatttccggtcatctgttccttctggggctggacccggaagctggcgcgcggtcccgcaagaggagctttctggggcgctgctgccagtgttgtgaggtctaaggtgtgcgttgaataaccaaagacactgggtgggtctcctccaatatcctctgattactgaagtagatcctcacacttccgcaccctccttctaaataagccggatgcccaggactgctgccttaacccctcagaggtctcggagaaacactggaatgaaatgattacagatttcattgctaatgtgggcgagtggagtaatgcgaggcaggatccagtaaacacctttcattattcatgtgcttccaacccctgtgctgttgactcttcccacactccagaaaactatcctttggaagaataccagtaaaggaaccttccaacaattcttgaaaccaacattcacagatggtttactacatgaaaagtggtgtgctaagcacaaatgtgaccaagacatccattcgccacaggctggggggtgtccaagccaagcacttaccgtgtagtggagacggtgctaagaatggcagtcctcagtgagaacataaagcaccaactaattttctcatggagggcatggaagggatgtggaagctgaaatgtgaaggaagaagaaatgccaggcaaagaatgccgggcaaaaagcaggtcacatacaaaggcctgagacaagagagcatagctattggaagcagtgaaaatggttctgagaggtcgatgagtaggtttggataaaggggattggagccagtctagagaagaagctgaggtgataagcaggtgatatatcttaaaggaccctataaaagggcaggagtttggatgtcaaaagcaactgacctccactgaaaagttttatgctaagaaatggcagaattccatcctgaaattaacaaggaaccccaaggggtcataaatagccaaaacaatcttgaaattaaagaacaaagttggagtactcacacttcttgatttcagaacttactacaagactatagtgaccttaacaatttattttcaacaaatgatgctggggaaactaaatgtccatatgcggaaaaaaatgcagttggacctttacctaaaaacatcatatacaaaattatctcaaaattgatcaaagatgtaactgtaaggtcttaaactataaaactcttagaagaaaacttagaagaatcgcttcacgacattggatttggcagtgatttcttggacatgacaccaaaacgacaaggaaaaaatagacaattcggctgcatcagaataaaaaacctttgtgcatcaaagaatactctcatcagtaaaaagacaatccacacaggccgggtgtgttggcttacgcttgtaatcccagcactttgggaggccgaggcaggcagatcacgaggtcaggagatcgagaccatcccgcctaacatggtgaaaccctgtctctactaaaaacacacacagaaaattagccgggtgtggtggtgggcacctgtagtcccaactactcgggaggctgaggcaggagaatggcatgaacccaggaggcggaggttgcagtgagccgacatcacaccactgcactccagcctgggcgacacagtgatactccgtctcaaaaaaaaaaaaaaaaaagtccacagaatggaaggagatatttgcaaatctgatgagggattaatgtacagaatattaacaagtgttaatgaggatgtagagaaattggaactcttgtgcaccactggtgggaatgtaaaatggtgcagctggtatggaaaacagtatggcagttcctccaaaaattaaaatagaaatatattatgatccaacaattccacttctggtacaaacctaaagaagtgaaagctgggacacaaacatacatacatatatat

SEQ ID NO: 2875 - DNA, 4001 bp, Homo sapiens
aagcaagtgcacattattccctagcactccacctgccctgtttcttccctcggaatactcttcacaagctgtaactgtgtctgtgtgtgtgcctggtaggtgttggtcttccctgcccctctgggcaaagacagtgcctgcttgtcctccagtttccccagcacccagcgagtgccggacactgtcaccattcactgaattacttttcgaatgaatcaataaaaaggcagacctggattcatattccagctctgcgtggccttgagcaagttacttcacctctctcagcctcagtttccttgcctgtaaaataggggtgatagaacctgcctcataggacggctgtgagaactcatggagatgacacccaccaatgcctggcacgcaggaggctcagctcacatgagttacctgccctgcttccttcccctttcaggtctcatgccagccactcctaccagactctggggagcagacactgagctgtccctgtgggaggggggagcttaaatgtcaggctggaaaaaggcacagaggaaactaggtggcagagacattgctttaagaaaatgtgagctggggcatgaagtagggggtgatgtgctgggtcctgcctgaccccggcccttactgtcagacagcacttcatatgcctcggccacctccttaaatttcttctcagcaaactctttattatctgggtttttgtctgggtgccactggagagccttgcgccgatacctgcagaaagtgggtgcagaggagagagtcgggggacaaatgcaggcacttcccacccaggaaccgaacgacctgttttcccattagcctatcactgtcctttcacccccgggtcccagtccaccccagctgctagggctgccgctgctgtgatattttcatcaagttccaccctctctcctccgccaccagtgctgggaccacatgtacaagcggatacaatgccagggtccctagcccctccctagggctcactggactggggctgcaaaggttggggcacatgtggcctcgaagagtacagggacaccggcccctcctcctcatagagcctctttgcactgcatctttgcactgcagcctgagaatgcccaaatctagggggaagggggaggggaggggaaaggaggaggaggaggaggaggaggggaagatcaactggagaacaacccataacacagtgcagctcccagaggaactaactacttcactctctggacgttctccttgtactctaccaggggtctctttcctccctgcaggtgtcactcggaagaagcaccccagtgctttctaacgacctggttccctcagacacctacaggtgtcactctgaagtgccccatggtggtggcgggtggagggtgagaggtcttctgttgcatacggaggcacttacgccttcttgatgtcatcagcggacgcacttcgcggcacgtctaggatctcgtagtaggatgccatggcaactggtcagtcgtcaggcgggcctccttggggctgcagaagagaaggagtcaggcggaaagaaccaagagccccaccctgtggctgcagcagtccccctccccgggtggcggaaggcgctcccagttggaagcggagcacaccgggctctgcttgcggccggtgactaggctccctccggcagccttatctgcccccgcaggccggggccaagagctatctcgacgcccaggcccaggagccctatcggggccccccaactccagcagtccgatccagggcccccagcctgacccgggcccccggccgcacctcctccgccaggagtcccggcctcctgcggcgccccgcccctgccccccgccgggaaccgtctggcacccgcagcccggctcgcggctgctgcgtaggacgcgcccggcccagctgtgcgcgcaggcatgcgtcagcggtgcggaaactactagagacggggagaaggccggctccgcctgtcccctgggggggtgggggcctgcaggggctgccgggagaagagggcggagccggctattttgggcacacaccaggacgacgtcagccccagctgggacctgggagactgcggccccgcctccatccaagcgagaagcgctcgcacggaggctggggcagcccacaaacaagccgctcggcccccaggttcctctgtcactttcttataaacatgagcgatgatccatgcttactcacccacctcgaggactcagactcttccctccctccccccaccacggttctaactcctcccccttcttcagctcccagctccagccccaggtcccccagcaggctgccctggctttcctgagtaggtcagaactgccttttacagcatctcgtggcatttccttcatcaggcttgttagagccacaaattagcatttattggtttgattattttttattaccattcacctcccccactagaatgtcgatttcacaggacaggaattgtgtgttttttctcactggtctattagagcagtcgtaggggttcaaaactacccgtgggatgaataaataatgaacacctgcaaacctcttgttgacagttttgacacatttgggggaggtgaggtaaagggggccgtacaacggaattccccaggttcaagtcttcccaaactgatcctgagtaggcctattccacttcaaaatgctccctgggttcaggcctcattggagagttaggaaaccttccagaactggctcctgcttgatcccatccaggccaatccaaaggcgttagctgagcatttttctgcattcaagatgctgccaggccgtataaagaagaatgtggcccaagccctgcctttgcagagcttgaacttgataagataccagcccatcagtgtagcccgctgggaaacccgaggctttggaaacagagtacaacctggcattactgtgagacttgggaaaatctctgagcactctttttttctcactaaatataggtagtgcctagggttgtttgaaagtcaaatgagacatggtacgaattaggtgttactgcggtcctgctggcatcgtgattggctcaagcaataatggttatgtgagtccagaaaagtgctttaggctgggggacccaggaatacttcgccaacgagaagggtttgaggcggacgtgagagaagaaggtggtgtgagtgtcctggtttcctggctgcccaccatcagaacctcctgcctacatttggggaattcccatcgcaagggccctaatggaaagcaggccaccatttgccacaaagccccaatgcttgctctccctgactcggctctggggttgcaggcagaagacatgagctccgccaatcggatgctccaactgggactttgaatctggagcaagtcacggaatagcaaggctggtttaggaattcatttctgcggcggcggtggaggcgatggggccaacagcggcctctagtgtctggaggaggaagtgtcagcgctactgccgcaggtgagggacgagagtaggaggatcactgcggagggtggaggggacaggagtctcctacacaggctgtcctgtgcccaaccttgactgtggtactggctgcccagcttccctaggtgcctgtctgattgctgacccttgtttgctggcccttgcattgattctgtgtgctatccgatatctctataattgttgggggcaggggacttgaaacaatttgccagttagcttctgctgtttataagagtcctgactgacacaaagactaagggttagacttggtataagaggaaggagtggttgggttaagtcactccaaattttccagatctctgcctttttcttcttactctgctgtgccaacagacatttgtctagcacctaccgtgtatgtcttgttatattaagaaaaagaatataaaaaagtttaaattccaatctctgtgctcaaggggataggacatagacaaatgacaactgagggaaattatatggagca

SEQ ID NO: 2876 - DNA, 4001 bp, Homo sapiens
cctaatttgatatgtcccaagcatagcaataggatagttctgtgtggccttatggagatcctttttttacatttccaggacccactgccaagaccagcttggtcgtggagaccctaacccagcagcgctagacgaattaaagacacacacacagaaatatagagtgtggagtgggaaatcaggggactcacagccttcagggctgagagccccaaacagagatttacccacatatttattgacagcaagcctgtgataagcatcatttctatagattatagattaactaaaagtattccttacgggaaacaaagggatgggctctggctaattatctgcagcagaaacatgtccttaaggcacagatggctcatgttattatttgtagtttaggaacaccttaagcggttttcctccctgggtgggccaggtgttccttgcccttattccagtaaactcacaaccttcagcataggcatcatggctatcatgaacacgtcacagtgctgcagagattttgtttatggccagtttaggggccagcttctggccggaattgggggcttatccccagcaacctaccatagttggagaaccacgttcaggctgaagacagtcctagtataccaccgaccaaccatgtaaccccaaggtttgtcctcagccttcagagggaacatgcttccaccgatttcagctcagtgatatgggattcaaatgtctgacctccaaaatattaagataataaatgcatgttgttttgaaccatcattaaattaagccagaagtattgatattatttgtagatttcaccactacacactaaacaataaagtcaaatgatttagagcaaaccacctggctcacactttcccaacggaaaaaggtaatgctcaaagtgctgaactgaacattctgtcctaccactagcaaataatcattgtctgcctcaggcttaagtttaataaatagcaaattgcatacagatattttacaacgattgaaagacaaacagaggtcctatccgtgtagtcccaacgataagaacaggtgttggcatgaagtgtttataaattcttgggtacagctgttctgaaagtaaagttcactttcaatcctaaaaaaagtccgctattcctccagatgtgcttaaagtcaaatgtggactggaattacttggtgtcaatgcggagtaactgctctttgctatttattatgaaggactttaactcaactctccatcttcctccacttccaccctttcttggccattctcaatgattctcttggtggtgatttttttaccatcaactatttcagtggaagtcgacatggacttgaagctgcctgtcccatcactaccgtaggacatgcagaaggaagaaaggcccccacttcccagggagccaaaggaacgaaatcctgtatcaaaagaagaaaaaacacccccaaaagctggaaattcactgaaggcagagaaaaggggtgcagacgctctgcttctgcttccccagcagttcctctgacccccccaaaatattctccagcgggtttcccaagaggtcaaaggagaatgggtcctggccgccgaagaactccctgaagacgtcggctgggtcgcggaagctgaagacgtactcgaaggggtcctcgaagggcctgccgcctgtgcagccgccctccgcccccgcctcgccatagcggtcatagatatcgcgtttcttggcgtccgacaacacctcgtaggcctcggccacctgcttgaatctcctctccgcttcctccttgttctcagggtttttgtcggggtgccacttgagcgccagcttgcggtacgccttcttgatggcctcggatgaggcctgccggggcacgtccagcacctcgtagtagtccaccatgctggatggccagaacggcccaccaggcactggcacagcgagcggcaaggctgccagcacccaggcgcaggcccgagtgctcggagacctgggccgcctggagagacgccccttatgacgcagccacatctcattggtcgaggcctatgagcgcctcgcatcccaagatgcagtgcttctgggactggccctgctctctgtgaggctctgtgaggccctgtgatgctccaagaccaggccccgcccactccggcctccaaccagccatggtctccaaaaaggatgggaaaaagaggttggggaaaagagagggccttgactttggctgcctgaagaactgtttttcttaaagtaggctttatatcagtctttttcctcggccacaggagggaagagggtggtgggagtgagtttagtctgactggggctgaagacatcctgttgtttaggactgcagttctccaacgttccagccccggtgcccatttgcttttgttcatgtggattatatctatcatacgtactgcattagagattaaaacagaattaaaaagacatattaattgggcaatttagtaagaataaacccatgacacaatagcaaatcttatttttatgtaaattttattaagacaaaatgtagtgagaagagtggcatcgttttacagtttttgcatctctctttagtacttggctctatagagaggtggattctcatgtcagcttctgtattcaatctactgtgatattacacatcacccatgtagcttctggaaaactccactgtacacttgtgagagaatgacggtgaaaaaatcaagtagcattattatggaaatagttttaactttgcaaaattctcctgaaaaattcttggggatccctaggatttcctggctcatactttgagaatcgctagtctagcagagtagtccttggtattctgaagggattagtttaggacaaccctcctctccataccaaaatctagatgctcaagctccttttataaaatgacacagtatttgtatataacctaccaatatccttctttaagcctctagtcatctcttgattacttttacctaataaatgtaaatgctatgtaaatagttgttttacagtattggttttttatttgtattatttgtattgttttttcattgctcttccccccaaatatttttaatctgctgttggctgaatctgcagatgtgaagcccaagtatatggagggtcaaatgtgcatgttattcacttttcttgactgctaaaacaaccagggagatcctctcagacaaaaggaaatacagcactatttactgtatcgaaaccattaagacttgcaggccgtgtgtatagcactggggataaacgtgggatgcagtgattatttccactagaactgctatatcatgaccatgaattttgggggaatttttttgagatctgagttctcttcacctccttattctctttttgacactggattcttttctttgataaattgtgaggcaatacactagtaaaggtcactcagttctaaggggaaaatgattaaccaaagaacattctaagatttcctatagggtattaggtctaatggggatgtgttatgtcaccagaacaaacttctaagtttatatagcctctagtgacataacctgagacccggacttggcacttggtaagcacacaatgaacagtcatagaaagctggccgagggtagagttcagtgtgaacaaagcaatttgggaacatcaaagcaagtttggagaacaacaagtgatccagaatggctggagggtaagaggcagagggagggggcaagcagaaggggtggagaggaggaatgagcttagacaggggggctggggtctatcccagagttttgagagcaaggcagaggactctgaattttcttctgtgcccaggaagctgctgaccaaggttccagaagtgttggtggggtggcgtttttcagggagcagctgaggcagtgattcagaagggacagctgggggttgggcaactgggggacaggggccctgaaatgggaccatgacagctgggtctgagagacagtggtagaaacatcc
